United States Patent Application Publication US 2018/0126003 A1 - sequence listing, part 37

SEQ ID NO: 61884 - DNA, 2207 bp, Artificial Sequence
  derived and/or modified sequence
gcggcgcctagagggaaagcgagagggagacggacgttgagagaacgaggaggaaggagagaaaatggcgtccacggattacagtacctatagccaagctgcagcgcagcagggctacagtgcttacaccgcccagcccactcaaggatatgcacagaccacccaggcatatgggcaacaaagctatggaacctatggacagcccactgatgtcagctatacccaggctcagaccactgcaacctatgggcagaccgcctatgcaacttcttatggacagcctcccactggttatactactccaactgccccccaggcatacagccagcctgtccaggggtatggcactggtgcttatgataccaccactgctacagtcaccaccacccaggcctcctatgcagctcagtctgcatatggcactcagcctgcttatccagcctatgggcagcagccagcagccactgcacctacaagaccgcaggatggaaacaagcccactgagactagtcaacctcaatctagcacagggggttacaaccagcccagcctaggatatggacagagtaactacagttatccccaggtacctgggagctaccccatgcagccagtcactgcacctccatcctaccctcctaccagctattcctctacacagccgactagttatgatcagagcagttactctcagcagaacacctatgggcaaccgagcagctatggacagcagagtagctatggtcaacaaagcagctatgggcagcagcctcccactagttacccaccccaaactggatcctacagccaagctccaagtcaatatagccaacagagcagcagctacgggcagcagagttcattccgacaggaccaccccagtagcatgggtgtttatgggcaggagtctggaggattttccggaccaggagagaaccggagcatgagtggccctgataaccggggcaggggaagagggggatttgatcgtggaggcatgagcagaggtgggcggggaggaggacgcggtggaatgggcgctggagagcgaggtggcttcaataagcctggtggacccatggatgaaggaccagatcttgatctaggcccacctgtagatccagatgaagactctgacaacagtgcaatttatgtacaaggattaaatgacagtgtgactctagatgatctggcagacttctttaagcagtgtggggttgttaagatgaacaagagaactgggcaacccatgatccacatctacctggacaaggaaacaggaaagcccaaaggcgatgccacagtgtcctatgaagacccacccactgccaaggctgccgtggaatggtttgatgggaaagattttcaagggagcaaacttaaagtctcccttgctcggaagaagcctccaatgaacagtatgcggggtggtctgccaccccgtgagggcagaggcatgccaccaccactccgtggaggtccaggaggcccaggaggtcctgggggacccatgggtcgcatgggaggccgtggaggagatagaggaggcttccctccaagaggaccccggggttcccgagggaacccctctggaggaggaaacgtccagcaccgagctggagactggcagtgtcccaatccgggttgtggaaaccagaacttcgcctggagaacagagtgcaaccagtgtaaggccccaaagcctgaaggcttcctcccgccaccctttccgcccccgggtggtgatcgtggcagaggtggccctggtggcatgcggggaggaagaggtggcctcatggatcgtggtggtcccggtggaatgttcagaggtggccgtggtggagacagaggtggcttccgtggtggccggggcatggaccgaggtggctttggtggaggaagacgaggtggccctggggggccccctggacctttgatggaacagatgggaggaagaagaggaggacgtggaggacctggaaaaatggataaaggcgagcaccgtcaggagcgcagagatcggccctactagatgcagagaccccgcagagctgcattgactaccagatttattttttaaaccagaaaatgttttaaatttataattccatatttataatgttggccacaacattatgattattccttgtctgtactttagtatttttcaccatttgtgaagaaacattaaaacaagttaaatggta

SEQ ID NO: 61885 - DNA, 2189 bp, Artificial Sequence
  derived and/or modified sequence
aacgaggaggaaggagagaaaatggcgtccacggattacagtacctatagccaagctgcagcgcagcagggctacagtgcttacaccgcccagcccactcaaggatatgcacagaccacccaggcatatgggcaacaaagctatggaacctatggacagcccactgatgtcagctatacccaggctcagaccactgcaacctatgggcagaccgcctatgcaacttcttatggacagcctcccactgtagaagggaccagtacaggttatactactccaactgccccccaggcatacagccagcctgtccaggggtatggcactggtgcttatgataccaccactgctacagtcaccaccacccaggcctcctatgcagctcagtctgcatatggcactcagcctgcttatccagcctatgggcagcagccagcagccactgcacctacaagaccgcaggatggaaacaagcccactgagactagtcaacctcaatctagcacagggggttacaaccagcccagcctaggatatggacagagtaactacagttatccccaggtacctgggagctaccccatgcagccagtcactgcacctccatcctaccctcctaccagctattcctctacacagccgactagttatgatcagagcagttactctcagcagaacacctatgggcaaccgagcagctatggacagcagagtagctatggtcaacaaagcagctatgggcagcagcctcccactagttacccaccccaaactggatcctacagccaagctccaagtcaatatagccaacagagcagcagctacgggcagcagagttcattccgacaggaccaccccagtagcatgggtgtttatgggcaggagtctggaggattttccggaccaggagagaaccggagcatgagtggccctgataaccggggcaggggaagagggggatttgatcgtggaggcatgagcagaggtgggcggggaggaggacgcggtggaatgggcgctggagagcgaggtggcttcaataagcctggtggacccatggatgaaggaccagatcttgatctaggcccacctgtagatccagatgaagactctgacaacagtgcaatttatgtacaaggattaaatgacagtgtgactctagatgatctggcagacttctttaagcagtgtggggttgttaagatgaacaagagaactgggcaacccatgatccacatctacctggacaaggaaacaggaaagcccaaaggcgatgccacagtgtcctatgaagacccacccactgccaaggctgccgtggaatggtttgatgggaaagattttcaagggagcaaacttaaagtctcccttgctcggaagaagcctccaatgaacagtatgcggggtggtctgccaccccgtgagggcagaggcatgccaccaccactccgtggaggtccaggaggcccaggaggtcctgggggacccatgggtcgcatgggaggccgtggaggagatagaggaggcttccctccaagaggaccccggggttcccgagggaacccctctggaggaggaaacgtccagcaccgagctggagactggcagtgtcccaatccgggttgtggaaaccagaacttcgcctggagaacagagtgcaaccagtgtaaggccccaaagcctgaaggcttcctcccgccaccctttccgcccccgggtggtgatcgtggcagaggtggccctggtggcatgcggggaggaagaggtggcctcatggatcgtggtggtcccggtggaatgttcagaggtggccgtggtggagacagaggtggcttccgtggtggccggggcatggaccgaggtggctttggtggaggaagacgaggtggccctggggggccccctggacctttgatggaacagatgggaggaagaagaggaggacgtggaggacctggaaaaatggataaaggcgagcaccgtcaggagcgcagagatcggccctactagatgcagagaccccgcagagctgcattgactaccagatttattttttaaaccagaaaatgttttaaatttataattccatatttataatgttggccacaacattatgattattccttgtctgtactttagtatttttcaccatttgtgaagaaacattaaaacaagttaaatggtagtgtgcg

SEQ ID NO: 61886 - DNA, 1968 bp, Artificial Sequence
  derived and/or modified sequence
atggccagcacagactacagcacctacagccaggccgccgcccagcagggctacagcgcctacacagcccagcccacccagggctacgcccagaccacccaggcctacggccagcagagctatggcacctacggccagcccacagatgtgtcctacacccaggcccagaccacagccacctacggccagacagcctatgccaccagctatggccagcccccaacaggctacaccacccccacagccccccaggcctacagccagcctgtgcagggctatggaactggagcctatgacaccaccacagccaccgtgaccaccacccaggccagctatgctgcccagagcgcctacggcacccagcctgcctacccagcctacggccagcagcctgctgccacagcccccacccggccccaggacggcaacaagcccacagagaccagccagccccagagcagcactggaggctacaaccagcccagcctgggctacggccagagcaactacagctacccccaggtgcccggcagctaccccatgcagcctgtgacagcccctccttcctacccacccaccagctacagcagcacccagcccaccagctatgaccagagcagctacagccagcagaacacctacggccagcccagcagctatggccagcagagcagctatggccagcagagcagctatggccagcagccccccaccagctacccaccccagacaggcagctacagccaggcccccagccagtacagccagcagagcagcagctatggccagcagagcagcttccggcaggaccaccccagctccatgggcgtgtatggccaggagagcggcggcttcagcggccctggagagaacagatccatgagcggccctgacaacagaggccggggccggggcggctttgaccggggcggcatgagcagaggaggccggggcggcggccggggcggcatgggcgctggggagcggggcggcttcaacaagccaggcggccccatggatgagggccctgacctggacctgggcccccctgtggaccctgatgaagattctgacaacagcgccatctacgtgcagggcctgaatgacagcgtgaccctggatgacctggccgacttcttcaagcagtgtggggtggtgaagatgaacaagaggacaggccagcccatgatccacatctacctggacaaggagaccgggaagcccaagggagatgccaccgtgtcctatgaagatcctcccacagccaaggctgctgtggagtggtttgatggcaaggacttccagggcagcaagctgaaggtgtccctggccaggaagaagccacccatgaacagcatgagaggaggcctgcccccccgggagggccggggcatgcccccacccctgcggggcggccctgggggccctgggggccctgggggccccatgggccgcatgggcggccggggcggggaccggggcggcttccccccccggggcccccggggcagccggggcaaccccagcggcggcggcaatgtgcagcaccgggccggggactggcagtgccccaaccctggctgcggcaaccagaactttgcctggaggacagagtgcaaccagtgcaaggcccccaagccagagggcttcctgcccccacccttccccccacctggaggagaccggggccggggcggccctgggggcatgaggggcggccggggcggcctgatggacagaggaggccctgggggcatgttccggggcggccggggcggggaccggggcggcttccggggcggccggggcatggacagaggaggctttggaggcggcagaagaggaggccctgggggccccccaggccccctgatggagcagatgggcggcagaagaggaggccggggcggccctgggaagatggacaagggggagcaccggcaggagcggcgggaccggccctactag

SEQ ID NO: 61887 - DNA, 1986 bp, Artificial Sequence
  derived and/or modified sequence
atggccagcacagactacagcacctacagccaggccgccgcccagcagggctacagcgcctacacagcccagcccacccagggctacgcccagaccacccaggcctacggccagcagagctatggcacctacggccagcccacagatgtgtcctacacccaggcccagaccacagccacctacggccagacagcctatgccaccagctatggccagcccccaacagtggagggcaccagcacaggctacaccacccccacagccccccaggcctacagccagcctgtgcagggctatggaactggagcctatgacaccaccacagccaccgtgaccaccacccaggccagctatgctgcccagagcgcctacggcacccagcctgcctacccagcctacggccagcagcctgctgccacagcccccacccggccccaggacggcaacaagcccacagagaccagccagccccagagcagcactggaggctacaaccagcccagcctgggctacggccagagcaactacagctacccccaggtgcccggcagctaccccatgcagcctgtgacagcccctccttcctacccacccaccagctacagcagcacccagcccaccagctatgaccagagcagctacagccagcagaacacctacggccagcccagcagctatggccagcagagcagctatggccagcagagcagctatggccagcagccccccaccagctacccaccccagacaggcagctacagccaggcccccagccagtacagccagcagagcagcagctatggccagcagagcagcttccggcaggaccaccccagctccatgggcgtgtatggccaggagagcggcggcttcagcggccctggagagaacagatccatgagcggccctgacaacagaggccggggccggggcggctttgaccggggcggcatgagcagaggaggccggggcggcggccggggcggcatgggcgctggggagcggggcggcttcaacaagccaggcggccccatggatgagggccctgacctggacctgggcccccctgtggaccctgatgaagattctgacaacagcgccatctacgtgcagggcctgaatgacagcgtgaccctggatgacctggccgacttcttcaagcagtgtggggtggtgaagatgaacaagaggacaggccagcccatgatccacatctacctggacaaggagaccgggaagcccaagggagatgccaccgtgtcctatgaagatcctcccacagccaaggctgctgtggagtggtttgatggcaaggacttccagggcagcaagctgaaggtgtccctggccaggaagaagccacccatgaacagcatgagaggaggcctgcccccccgggagggccggggcatgcccccacccctgcggggcggccctgggggccctgggggccctgggggccccatgggccgcatgggcggccggggcggggaccggggcggcttccccccccggggcccccggggcagccggggcaaccccagcggcggcggcaatgtgcagcaccgggccggggactggcagtgccccaaccctggctgcggcaaccagaactttgcctggaggacagagtgcaaccagtgcaaggcccccaagccagagggcttcctgcccccacccttccccccacctggaggagaccggggccggggcggccctgggggcatgaggggcggccggggcggcctgatggacagaggaggccctgggggcatgttccggggcggccggggcggggaccggggcggcttccggggcggccggggcatggacagaggaggctttggaggcggcagaagaggaggccctgggggccccccaggccccctgatggagcagatgggcggcagaagaggaggccggggcggccctgggaagatggacaagggggagcaccggcaggagcggcgggaccggccctactag

SEQ ID NO: 61888 - DNA, 1968 bp, Artificial Sequence
  derived and/or modified sequence
atggccagcaccgactacagcacctacagccaggccgccgcccagcagggctactcagcatatacggctcagccaactcaggggtatgctcagacaacacaggcctacggccaacagagttatggtacgtatggccagcctacagatgtctcctatacgcaagctcagacgacggccacctacggacagactgcctatgctacctcatatggtcaaccacccacaggttataccactcctaccgctccgcaggcctacagccaacctgtccagggctatgggacaggcgcatatgacaccaccactgcgaccgtgaccacaacgcaggcgagctacgcagcccagagcgcatacggtacccaacctgcctacccagcctacgggcagcagcctgccgcgaccgccccgacaaggcctcaggacgggaataaacctactgagacatctcagccacagtccagtacaggcggctacaatcagccctccctgggctatggccaatctaactatagctatccccaggtccctggatcatacccaatgcagcctgtgaccgcacctcctagctacccgcccacgtcctactccagcactcagccaacgtcctatgaccagagcagctacagtcaacagaacacttacgggcagccgagctcatatgggcagcagtcctcctacggacagcagagctcatatggccagcagccgccaaccagctatcccccacagacaggctcatacagtcaggctccttctcagtattcccagcaatccagctcttacggccagcagtccagcttccggcaggatcacccgtcaagcatgggcgtctatggacaagaaagcggaggcttcagcggccctggcgaaaatcgctctatgagcggacccgataatcggggccggggccgaggaggctttgatagaggtggaatgtcaagggggggaagaggggggggcaggggagggatgggcgccggagaacgtggcgggtttaacaaaccaggaggtcctatggacgagggcccagatttggatctcggcccacccgtggacccagatgaggacagcgataatagcgctatatacgtgcaagggctaaatgacagtgtgacactcgatgacctggccgattttttcaaacagtgcggagttgtgaaaatgaataagagaaccggccagccaatgattcatatatatctcgataaagaaaccggaaaacccaagggcgatgccacagttagttatgaggacccacccacagccaaagcagccgtggagtggttcgacggaaaagacttccaaggcagtaagctcaaagtctcattggcacgaaaaaagccacctatgaactctatgcgtgggggactgccccccagggaggggagaggcatgccgccgccccttcgggggggacctgggggaccaggaggaccaggagggcccatggggaggatgggaggtcgtggaggagaccgcgggggcttccctccccgtggacccagggggtctagggggaacccctctggcgggggtaatgtgcagcaccgggccggcgattggcagtgcccaaaccccgggtgcggaaaccagaactttgcttggagaacggagtgtaatcagtgtaaggcaccaaaacctgagggtttccttccaccaccattcccgcctcctggaggcgataggggacgagggggcccgggggggatgagaggaggccggggcggcctcatggacaggggaggacctggcggaatgtttcgcggcggcaggggcggtgacaggggtggattccggggaggcagggggatggacagaggaggtttcggcgggggccggcgcggcggaccgggcggacctccaggaccattgatggagcaaatgggcggcagaagaggcgggaggggtggccccggcaagatggataagggcgagcacaggcaggagcgtcgggataggccctactag

SEQ ID NO: 61889 - DNA, 1986 bp, Artificial Sequence
  derived and/or modified sequence
atggccagcaccgactacagcacctacagccaggccgccgcccagcagggatacagtgcttacacggctcagccgacgcagggctatgctcagactacccaggcatatgggcagcagagttatggcacatacgggcagcccacggacgtcagttacactcaggcccagaccaccgccacatatggacagacagcctacgcaacctcttatggtcagcctcccactgtggaaggtacaagcactgggtataccacccctactgctccacaggcgtattctcagcctgtgcagggctacgggaccggtgcctatgacaccactacagccactgtaactactactcaagcttcctatgctgcgcagtcagcctacggaactcagccggcatatcccgcttacggccagcaacctgccgccaccgcccccacaaggccacaggacggcaacaagcctacggagacctcgcagcctcaaagtagcaccggcgggtataatcagcctagtctcggatacggtcagagtaactattcatatcctcaggtgccaggctcatatcccatgcaacccgtaactgcacccccatcctatccccctacctcctacagttccacccagccgaccagctatgaccagtcctcttattcccaacaaaacacatatggtcaaccatcaagttatggacaacagtccagctatggacagcagtctagctacggccagcaaccacctaccagctaccccccccagacaggatcctactcccaggctcccagccagtattcacagcagtcaagcagctacgggcagcaatcctccttccggcaagaccacccttcatcaatgggcgtttatgggcaagagagcggagggtttagtggccccggggagaatagatcgatgtcaggacccgacaacaggggacggggccgcggcggattcgacagggggggcatgtcacgcgggggacgggggggtggaaggggaggtatgggggctggagaacggggcggatttaacaagccaggcggcccaatggatgaagggcctgacctcgacctgggcccaccagtagatccagatgaggatagtgacaattctgcaatttacgtccagggtctgaatgactccgtgactctcgacgatctggcggactttttcaagcagtgtggtgtggtcaagatgaacaagaggacaggccagcccatgatccacatctatctggacaaggagactggtaaacctaaaggtgatgctaccgtgagctacgaagaccccccgactgccaaggcagcagtggagtggtttgatggcaaggattttcaggggagcaaacttaaagtcagcttggccaggaagaaacccccaatgaattccatgagaggtggattgccacctagagaggggaggggtatgcctcctcctctgcgcgggggcccagggggaccaggagggcctggaggccctatggggcggatggggggacgtggaggggacagaggcggtttcccacctcggggaccccggggctcacggggcaacccgtcgggtggtggcaatgtgcaacatagagccggggattggcaatgccctaatccgggttgtgggaaccagaacttcgcttggagaaccgagtgcaaccaatgcaaggcccctaagcccgaaggatttctcccacctccctttccccctccggggggtgatcggggcagagggggaccaggggggatgagaggaggccgaggagggctgatggatcgcggcggacccggcggaatgtttcgcggcggacggggaggagaccggggaggttttagagggggacgtggtatggaccgcggagggttcggcgggggaaggaggggcggccctggcggtccaccgggccctctgatggaacagatgggagggagacgaggagggcgcgggggaccgggaaagatggataagggcgaacatcgtcaagaaagaagggaccgtccatattag

SEQ ID NO: 61890 - DNA, 1968 bp, Artificial Sequence
  derived and/or modified sequence
atggcgagcactgattattctacatactcccaggccgctgctcaacagggatatagcgcgtacaccgcacagcccacacagggctacgctcagaccacccaagcctatgggcagcaatcatacggtacatacgggcaacctacagatgtctcctacacccaggctcagaccaccgcaacatatgggcagacggcttacgccaccagttacggccagcccccaactggatacactacccccactgccccacaagcctattctcagcccgtgcaggggtacggcaccggcgcatacgacacgaccacagccacggtgactactacacaagccagttacgcggcacagtccgcctatggaacacagccagcatacccagcatacgggcaacagcctgccgctaccgctcctaccagaccacaagatggcaataaaccaacagagacctcccagccacagagcagcaccggcggatataatcagccgtcattggggtacggccagagcaattatagctatcctcaggttccgggaagctatcccatgcagcctgtcacagccccaccctcatatccacccaccagttactcgtccacccagcctacttcatatgaccagtcaagctattcccagcaaaatacatacggacagccctccagttatggccaacaaagttcttatggccagcagtcatcttacggacaacagcccccaacatcatatccgccacagactgggagctacagccaggcaccctcacaatatagccaacagagcagctcctatggtcagcagagcagctttagacaggatcaccctagttcaatgggggtgtatggccaggaatcgggtggattttccgggcctggtgagaatcgcagtatgtcagggcctgacaaccgcggtcgcggtcgaggcggatttgatcggggtggtatgtcccggggtgggagaggaggaggtagagggggaatgggagccggagagagagggggatttaacaagcctggcggtcccatggacgaaggtcccgacctcgacctgggtccccctgttgacccagacgaagacagtgataacagtgcgatttatgtgcagggacttaatgactcagtgaccctggacgatctggctgatttttttaaacagtgcggcgtggtcaaaatgaacaagcgcactggacagccaatgattcatatctatcttgataaggaaaccgggaagccaaagggagacgctaccgtgtcctacgaagatcctccgaccgcaaaggccgctgtagaatggtttgatggcaaggacttccaaggctctaaactcaaagtcagcctggcccgaaaaaagcctcccatgaactccatgcgcggagggcttccccctcgggagggccgtggcatgccccctcctttgcgcggtggtccaggcggtccgggaggacctggaggcccaatgggaagaatgggaggtagagggggagaccggggagggtttccgcctcgaggtcccaggggcagccgcggtaatcctagtgggggtggaaacgtacagcaccgggcaggcgattggcagtgtccgaacccaggttgcgggaaccagaacttcgcctggagaactgaatgcaatcagtgtaaagctcccaagcccgagggattcctgccgccaccattcccaccccctggcggtgaccggggtcggggaggacccggaggtatgaggggcggacgcggaggactaatggatagagggggaccgggtggtatgttccggggaggcaggggcggagatcgcggaggcttccgcggaggaagagggatggaccggggaggctttggcggtgggcgacgcggtgggccaggaggaccaccagggccattgatggagcagatgggcggacgcagaggcggtaggggtggccctgggaagatggacaaaggagaacaccggcaagagcgacgggaccgcccatactag

SEQ ID NO: 61891 - DNA, 1986 bp, Artificial Sequence
  derived and/or modified sequence
atggcaagcactgattattccacatacagccaggcagccgctcaacaaggttacagtgcatacacagcacaacctacccaaggctacgctcagactacacaggcatacgggcagcagagttacggcacatatggacagccaaccgatgtttcttacacacaggcccaaaccaccgctacttatgggcagactgcctacgctaccagctacggccaaccacccactgtggaagggaccagtacaggctacactaccccaaccgcccctcaggcctactcgcagccagtacagggatacggaacgggggcttatgacacgaccaccgcgaccgtgacaacaactcaagcttcctatgcagcgcagtccgcatatggaacccagccggcataccccgcatacggccagcagccagctgccacagccccaacgcgtccgcaggatggtaataagcctaccgaaactagccagccgcagtcaagcaccgggggatataatcagccctctttgggctacggacaatctaactacagctatccgcaggttcccggatcttacccaatgcagcccgttacagcccctccatcttacccacctactagctattcgagcacacagcccacctcttatgaccaatccagctactcacaacagaacacctatggccagccctcctcatacgggcaacagagtagttacgggcagcagagttcatatggacagcagcccccaacatcttatcctcctcagacagggagttattctcaggctccttcacagtattcccaacaaagttcaagctacggccagcaaagttcctttagacaggatcacccatcctctatgggagtgtacgggcaggagtctgggggatttagcggcccaggcgagaacagatctatgagtggtcctgacaaccgcggaagggggagagggggattcgataggggcggaatgtcccgcggtggtcggggtggagggaggggaggcatgggcgctggggagagggggggtttcaataagccaggcggtcccatggatgaaggccctgacctcgaccttggtcctcctgttgatcctgacgaggacagcgacaattcggcgatctacgtgcaggggctcaacgactccgttacgcttgacgacctcgcggattttttcaagcagtgtggtgtcgtcaagatgaacaaaagaacgggacaaccaatgatacatatctatttggataaggagacaggtaagccgaaaggtgacgctaccgtcagctacgaagatcctcccaccgcaaaggcagctgtcgagtggtttgacggcaaggacttccaggggtccaagctcaaggttagccttgcacgaaaaaaaccgcctatgaattcaatgcgcggaggcctgccccctcgagaaggaaggggcatgcccccacctttgcgcggtggacccggaggaccaggcggaccaggcggacccatgggaaggatggggggacggggaggtgatcgtggcggattcccaccgaggggtcccagaggatcaagaggcaaccctagcggcggtggcaatgtgcagcacagggcaggtgattggcaatgcccaaatcctggctgtggaaaccagaacttcgcgtggagaactgagtgcaatcagtgcaaggccccaaagccagaagggttcctgcccccaccatttccccctccagggggagatcggggacgcggagggcctggcggtatgaggggtgggagggggggactgatggacagaggtggacccggtgggatgttccgcggaggcagggggggagatcggggaggctttagaggtggtcgcggaatggatcgtgggggtttcggcggaggcagaagggggggacctggcggtccaccaggacccctgatggagcagatgggcggacgacggggtggcagagggggtcccggaaagatggacaagggagaacatcgacaggaacgccgagacaggccctattag

SEQ ID NO: 61892 - protein, 600 aa, Artificial Sequence
  derived and/or modified sequence
MASTDYSTYSQAAAQQGYSAYTAQPTQGYAQTTQAYGQQSYGTYGQPTDVSYTQAQTTATYGQTAYATSYGQPPTGYTTPTAPQAYSQPVQGYGTGAYDTTTATVTTTQASYAAQSAYGTQPAYPAYGQQPAATAPTSYSSTQPTSYDQSSYSQQNTYGQPSSYGQQSSYGQQSSYGQQPPTSYPPQTGSYSQAPSQYSQQSSSYGQQSSFRQDHPSSMGVYGQESGGFSGPGENRSMSGPDNRGRGRGGFDRGGMSRGGRGGGRGGMGSAGERGGFNKPGGPMDEGPDLDLGPPVDPDEDSDNSAIYVQGLNDSVTLDDLADFFKQCGVVKMNKRTGQPMIHIYLDKETGKPKGDATVSYEDPPTAKAAVEWFDGKDFQGSKLKVSLARKKPPMNSMRGGLPPREGRGMPPPLRGGPGGPGGPGGPMGRMGGRGGDRGGFPPRGPRGSRGNPSGGGNVQHRAGDWQCPNPGCGNQNFAWRTECNQCKAPKPEGFLPPPFPPPGGDRGRGGPGGMRGGRGGLMDRGGPGGMFRGGRGGDRGGFRGGRGMDRGGFGGGRRGGPGGPPGPLMEQMGGRRGGRGGPGKMDKGEHRQERRDRPY

SEQ ID NO: 61893 - DNA, 1857 bp, Artificial Sequence
  derived and/or modified sequence
atggccagcaccgactacagcacctacagccaggccgccgcccagcagggctacagcgcctacaccgcccagcccacccagggctacgcccagaccacccaggcctacggccagcagagctacggcacctacggccagcccaccgacgtgagctacacccaggcccagaccaccgccacctacggccagaccgcctacgccaccagctacggccagccccccaccggctacaccacccccaccgccccccaggcctacagccagcccgtgcagggctacggcaccggcgcctacgacaccaccaccgccaccgtgaccaccacccaggccagctacgccgcccagagcgcctacggcacccagcccgcctaccccgcctacggccagcagcccgccgccaccgcccccaccagaccccaggacggcaacaagcccaccgagaccagccagccccagagcagcaccggcggctacaaccagcccagcctgggctacggccagagcaactacagctacccccaggtgcccggcagctaccccatgcagcccgtgaccgccccccccagctacccccccaccagctacagcagcacccagcccaccagctacgaccagagcagctacagccagcagaacacctacggccagcccagcagctacggccagcagagcagctacggccagcagagcagctacggccagcagccccccaccagctaccccccccagaccggcagctacagccaggcccccagccagtacagccagcagagcagcagctacggccagcagagcagcttcagacaggaccaccccagcagcatgggcgtgtacggccaggagagcggcggcttcagcggccccggcgagaacagaagcatgagcggccccgacaacagaggcagaggcagaggcggcttcgacagaggcggcatgagcagagaccccgacgaggacagcgacaacagcgccatctacgtgcagggcctgaacgacagcgtgaccctggacgacctggccgacttcttcaagcagtgcggcgtggtgaagatgaacaagagaaccggccagcccatgatccacatctacctggacaaggagaccggcaagcccaagggcgacgccaccgtgagctacgaggacccccccaccgccaaggccgccgtggagtggttcgacggcaaggacttccagggcagcaagctgaaggtgagcctggccagaaagaagccccccatgaacagcatgagaggcggcctgccccccagagagggcagaggcatgcccccccccctgagaggcggccccggcggccccggcggccccggcggccccatgggcagaatgggcggcagaggcggcgacagaggcggcttcccccccagaggccccagaggcagcagaggcaaccccagcggcggcggcaacgtgcagcacagagccggcgactggcagtgccccaaccccggctgcggcaaccagaacttcgcctggagaaccgagtgcaaccagtgcaaggcccccaagcccgagggcttcctgcccccccccttccccccccccggcggcgacagaggcagaggcggccccggcggcatgagaggcggcagaggcggcctgatggacagaggcggccccggcggcatgttcagaggcggcagaggcggcgacagaggcggcttcagaggcggcagaggcatggacagaggcggcttcggcggcggcagaagaggcggccccggcggcccccccggccccctgatggagcagatgggcggcagaagaggcggcagaggcggccccggcaagatggacaagggcgagcacagacaggagagaagagacagaccctactag

SEQ ID NO: 61894 - DNA, 1803 bp, Artificial Sequence
  derived and/or modified sequence
atggccagcaccgactacagcacctacagccaggccgccgcccagcagggctacagcgcctacaccgcccagcccacccagggctacgcccagaccacccaggcctacggccagcagagctacggcacctacggccagcccaccgacgtgagctacacccaggcccagaccaccgccacctacggccagaccgcctacgccaccagctacggccagccccccaccggctacaccacccccaccgccccccaggcctacagccagcccgtgcagggctacggcaccggcgcctacgacaccaccaccgccaccgtgaccaccacccaggccagctacgccgcccagagcgcctacggcacccagcccgcctaccccgcctacggccagcagcccgccgccaccgcccccaccagctacagcagcacccagcccaccagctacgaccagagcagctacagccagcagaacacctacggccagcccagcagctacggccagcagagcagctacggccagcagagcagctacggccagcagccccccaccagctaccccccccagaccggcagctacagccaggcccccagccagtacagccagcagagcagcagctacggccagcagagcagcttcagacaggaccaccccagcagcatgggcgtgtacggccaggagagcggcggcttcagcggccccggcgagaacagaagcatgagcggccccgacaacagaggcagaggcagaggcggcttcgacagaggcggcatgagcagaggcggcagaggcggcggcagaggcggcatgggcagcgccggcgagagaggcggcttcaacaagcccggcggccccatggacgagggccccgacctggacctgggcccccccgtggaccccgacgaggacagcgacaacagcgccatctacgtgcagggcctgaacgacagcgtgaccctggacgacctggccgacttcttcaagcagtgcggcgtggtgaagatgaacaagagaaccggccagcccatgatccacatctacctggacaaggagaccggcaagcccaagggcgacgccaccgtgagctacgaggacccccccaccgccaaggccgccgtggagtggttcgacggcaaggacttccagggcagcaagctgaaggtgagcctggccagaaagaagccccccatgaacagcatgagaggcggcctgccccccagagagggcagaggcatgcccccccccctgagaggcggccccggcggccccggcggccccggcggccccatgggcagaatgggcggcagaggcggcgacagaggcggcttcccccccagaggccccagaggcagcagaggcaaccccagcggcggcggcaacgtgcagcacagagccggcgactggcagtgccccaaccccggctgcggcaaccagaacttcgcctggagaaccgagtgcaaccagtgcaaggcccccaagcccgagggcttcctgcccccccccttccccccccccggcggcgacagaggcagaggcggccccggcggcatgagaggcggcagaggcggcctgatggacagaggcggccccggcggcatgttcagaggcggcagaggcggcgacagaggcggcttcagaggcggcagaggcatggacagaggcggcttcggcggcggcagaagaggcggccccggcggcccccccggccccctgatggagcagatgggcggcagaagaggcggcagaggcggccccggcaagatggacaagggcgagcacagacaggagagaagagacagaccctactag

SEQ ID NO: 61895 - DNA, 1752 bp, Artificial Sequence
  derived and/or modified sequence
atggccagcaccgactacagcacctacagccaggccgccgcccagcagggctacagcgcctacaccgcccagcccacccagggctacgcccagaccacccaggcctacggccagcagagctacggcacctacggccagcccaccgacgtgagctacacccaggcccagaccaccgccacctacggccagaccgcctacgccaccagctacggccagccccccaccggctacaccacccccaccgccccccaggcctacagccagcccgtgcagggctacggcaccggcgcctacgacaccaccaccgccaccgtgaccaccacccaggccagctacgccgcccagagcgcctacggcacccagcccgcctaccccgcctacggccagcagcccgccgccaccgcccccaccagaccccaggacggcaacaagcccaccgagaccagccagccccagagcagcaccggcggctacaaccagcccagcctgggctacggccagagcaactacagctacccccaggtgcccggcagctaccccatgcagcccgtgaccgccccccccagctacccccccaccagctacagcagcacccagcccaccagctacgaccagagcagctacagccagcagaacacctacggccagcccagcagctacggccagcagagcagctacggccagcagagcagctacggccagcagccccccaccagctaccccccccagaccggcagctacagccaggcccccagccagtacagccagcagagcagcagctacggccagcagagacccatggacgagggccccgacctggacctgggcccccccgtggaccccgacgaggacagcgacaacagcgccatctacgtgcagggcctgaacgacagcgtgaccctggacgacctggccgacttcttcaagcagtgcggcgtggtgaagatgaacaagagaaccggccagcccatgatccacatctacctggacaaggagaccggcaagcccaagggcgacgccaccgtgagctacgaggacccccccaccgccaaggccgccgtggagtggttcgacggcaaggacttccagggcagcaagctgaaggtgagcctggccagaaagaagccccccatgaacagcatgagaggcggcctgccccccagagagggcagaggcatgcccccccccctgagaggcggccccggcggccccggcggccccggcggccccatgggcagaatgggcggcagaggcggcgacagaggcggcttcccccccagaggccccagaggcagcagaggcaaccccagcggcggcggcaacgtgcagcacagagccggcgactggcagtgccccaaccccggctgcggcaaccagaacttcgcctggagaaccgagtgcaaccagtgcaaggcccccaagcccgagggcttcctgcccccccccttccccccccccggcggcgacagaggcagaggcggccccggcggcatgagaggcggcagaggcggcctgatggacagaggcggccccggcggcatgttcagaggcggcagaggcggcgacagaggcggcttcagaggcggcagaggcatggacagaggcggcttcggcggcggcagaagaggcggccccggcggcccccccggccccctgatggagcagatgggcggcagaagaggcggcagaggcggccccggcaagatggacaagggcgagcacagacaggagagaagagacagaccctactag

SEQ ID NO: 61896 - DNA, 1971 bp, Artificial Sequence
  derived and/or modified sequence
atggccagcaccgactacagcacctacagccaggccgccgcccagcagggctacagcgcctacaccgcccagcccacccagggctacgcccagaccacccaggcctacggccagcagagctacggcacctacggccagcccaccgacgtgagctacacccaggcccagaccaccgccacctacggccagaccgcctacgccaccagctacggccagccccccaccggctacaccacccccaccgccccccaggcctacagccagcccgtgcagggctacggcaccggcgcctacgacaccaccaccgccaccgtgaccaccacccaggccagctacgccgcccagagcgcctacggcacccagcccgcctaccccgcctacggccagcagcccgccgccaccgcccccaccagaccccaggacggcaacaagcccaccgagaccagccagccccagagcagcaccggcggctacaaccagcccagcctgggctacggccagagcaactacagctacccccaggtgcccggcagctaccccatgcagcccgtgaccgccccccccagctacccccccaccagctacagcagcacccagcccaccagctacgaccagagcagctacagccagcagaacacctacggccagcccagcagctacggccagcagagcagctacggccagcagagcagctacggccagcagccccccaccagctaccccccccagaccggcagctacagccaggcccccagccagtacagccagcagagcagcagctacggccagcagagcagcttcagacaggaccaccccagcagcatgggcgtgtacggccaggagagcggcggcttcagcggccccggcgagaacagaagcatgagcggccccgacaacagaggcagaggcagaggcggcttcgacagaggcggcatgagcagaggcggcagaggcggcggcagaggcggcatgggcagcgccggcgagagaggcggcttcaacaagcccggcggccccatggacgagggccccgacctggacctgggcccccccgtggaccccgacgaggacagcgacaacagcgccatctacgtgcagggcctgaacgacagcgtgaccctggacgacctggccgacttcttcaagcagtgcggcgtggtgaagatgaacaagagaaccggccagcccatgatccacatctacctggacaaggagaccggcaagcccaagggcgacgccaccgtgagctacgaggacccccccaccgccaaggccgccgtggagtggttcgacggcaaggacttccagggcagcaagctgaaggtgagcctggccagaaagaagccccccatgaacagcatgagaggcggcctgccccccagagagggcagaggcatgcccccccccctgagaggcggccccggcggccccggcggccccggcggccccatgggcagaatgggcggcagaggcggcgacagaggcggcttcccccccagaggccccagaggcagcagaggcaaccccagcggcggcggcaacgtgcagcacagagccggcgactggcagtgccccaaccccggctgcggcaaccagaacttcgcctggagaaccgagtgcaaccagtgcaaggcccccaagcccgagggcttcctgcccccccccttccccccccccggcggcgacagaggcagaggcggccccggcggcatgagaggcggcagaggcggcctgatggacagaggcggccccggcggcatgttcagaggcggcagaggcggcgacagaggcggcttcagaggcggcagaggcatggacagaggcggcttcggcggcggcagaagaggcggccccggcggcccccccggccccctgatggagcagatgggcggcagaagaggcggcagaggcggccccggcaagatggacaagggcgagcacagacaggagagaagagacagaccctactag

SEQ ID NO: 61897 - DNA, 1857 bp, Artificial Sequence
  derived and/or modified sequence
atggcttctaccgattactccacctatagtcaggccgctgcgcagcagggttactctgcttacactgcgcagccaacacagggctatgcccagaccacccaggcctacgggcagcaatcatacggtacctatggacagccgactgatgtatcttacactcaggcccaaactactgccacatatgggcagaccgcttatgccaccagctacggtcagccaccaacgggctacacaacaccaacagcaccccaagcctattcccaacccgtccagggctacggaactggtgcttatgataccaccaccgccaccgttaccaccacacaagcaagttacgcagctcaaagtgcctacggtactcagcccgcatatccagcatacgggcagcaaccggctgccactgcaccaacgagaccacaggatggtaacaagcctactgaaacgtcacagcctcaatcgagcaccggagggtataaccagcctagccttggatacggtcagagtaactactcatacccccaggtccctggttcatatcccatgcagccagtgaccgccccgccttcatacccccccactagctattcttcaactcagcctacttcctacgatcaatcctcttactcacagcagaacacatacgggcagccaagttcttatggtcagcagtccagttatggccagcagagctcctatggccagcagccgcctaccagctatccaccccagaccggttcttactcccaggctcctagccagtattcccagcaaagctctagctacggacagcagtcctcattccggcaggaccatccgtcttctatgggcgtctacggacaggagtctggaggattcagcggtcccggcgaaaatcgctctatgtcagggccagacaacagggggcggggccgcggcggcttcgacaggggcgggatgagccgggaccccgacgaggattccgacaattctgccatttacgtgcagggacttaatgacagcgtgactttagacgacttagcggatttcttcaagcagtgtggtgtagtgaaaatgaataagcggactggacaacctatgatccacatctatctggacaaagagactggcaagccgaagggcgatgctacagtgtcttacgaggatccccctactgctaaggccgctgttgagtggttcgacgggaaggatttccaaggcagtaaattaaaagtgtctctggcgcgtaagaagcctcccatgaactcgatgcgtggggggctgcctccaagggaaggaagaggtatgccgcctcccctccggggcgggccgggtggccctggtgggcctggcggtcctatgggaagaatgggtggtagaggaggcgacaggggtggcttcccacccagaggccctcggggcagtagggggaaccctagcggtggcggtaatgtacagcacagggccggcgattggcagtgcccaaatcccgggtgtggcaaccaaaactttgcatggcgaaccgagtgcaatcagtgtaaagccccaaagcctgaggggttcctgcctcccccctttcccccaccagggggcgatcgcggccgtggcggtcctggaggcatgcggggagggagaggtgggctgatggatcgcggagggcccggcgggatgttccggggcggccgtggaggggatcgtggtggatttaggggcggccggggaatggaccgcggagggtttggtggtggcaggagaggaggccccggtggcccccctggtccactcatggagcagatgggaggaaggagaggcgggaggggcggcccgggaaaaatggacaaaggagaacataggcaggagcggcgcgaccgcccctactag

SEQ ID NO: 61898 - DNA, 1803 bp, Artificial Sequence
  derived and/or modified sequence
atggccagcaccgattattcaacctattcccaggccgcagcgcagcagggttactctgcttataccgctcaacccacccagggatatgcccaaacaactcaggcttacggccagcagagttatggtacctatggccaacctacggatgtatcatacactcaggctcagactaccgcaacctatggacagacagcctatgccacctcgtacgggcagcccccaactggatatacaaccccaaccgctcctcaggcttactctcagcctgttcaagggtatggcacaggggcttacgacaccacaacagcgactgtgaccaccacccaagcttcgtatgctgctcagagcgcctatggcacccaacctgcctaccctgcatacgggcagcagcccgcagcgacagcccccacttcttacagtagcacccagcccacgagctatgatcagtcaagctactctcagcagaacacgtacggtcagcccagcagctatggccagcagtccagctacggccaacagtcttcctatggccagcagcctccaactagttaccctcctcagacagggagctacagtcaggcaccctcacaatatagtcaacaatcaagtagctacggccaacagtctagctttaggcaagatcatccctctagcatgggggtatacggacaagagtcgggtggattctccggccccggagaaaatagaagtatgagtggaccagacaaccgcggccggggaagaggaggatttgatcggggggggatgtctagagggggaaggggtgggggccggggcggcatggggagcgccggtgagcggggcgggtttaacaaaccaggtggccccatggacgagggaccagatctagaccttggccccccggttgacccagatgaggactctgacaacagcgccatctacgtccaagggctcaacgattcagtcacgcttgacgatctcgccgacttcttcaaacagtgtggcgtagtaaaaatgaacaaacgaacaggccagccgatgatccatatttatctcgacaaggaaacagggaaacctaagggggacgctaccgtgagttacgaagatccgccaacggctaaagccgctgtagagtggtttgacgggaaagatttccagggatccaaactcaaggtgtcactagcgagaaagaaaccacccatgaattcaatgagaggcggccttcccccacgggagggccggggaatgccacctccgctgcgcggcgggccaggtggccccgggggacccggaggtccaatgggccggatggggggcagaggaggcgatcgcggaggttttcccccccgtggtcctcggggaagccgtggcaacccctcagggggcgggaacgtgcagcacagagcaggcgactggcagtgccctaaccctggttgtggtaaccaaaatttcgcctggaggaccgagtgcaaccagtgtaaagcccctaagcccgaagggtttttgccccctccatttccccccccaggaggcgaccgggggcgtgggggtccaggcggcatgcgcggcggccggggcggtctgatggaccgcggggggcctggtgggatgttcaggggggggcgaggaggtgaccggggtggcttccgagggggaaggggcatggaccgtggaggattcggcggtggccgtcggggaggaccggggggacccccaggacctctcatggaacagatgggcggccggaggggtggcagaggcggcccaggcaagatggataagggcgaacataggcaagaacgacgggacagaccgtactag

SEQ ID NO: 61899 - DNA, 1752 bp, Artificial Sequence
  derived and/or modified sequence
atggctagcactgactattctacctattcgcaggctgctgcccaacaggggtactccgcctacaccgcccagcctacccaggggtacgctcagactactcaagcctacggtcagcagagctacggaacatacggccaacccacagatgttagctacactcaggcccaaactaccgcaacatacggccagaccgcttacgccacaagctatggacagccccctaccggctatacaactcccaccgccccccaggcctacagtcagcccgtgcaggggtatggtactggtgcttacgacactaccaccgcgaccgttacaaccacacaagcttcttatgcagctcagagcgcttatggaacccagcccgcttatcccgcttacgggcagcaacccgctgcaacagcaccaaccagacctcaggatggcaacaaacctaccgaaacctctcagccccagtcctcaaccggcgggtacaaccagccgagtctggggtatggtcaaagtaattattcttacccccaggtgccagggtcttatcctatgcagcctgtgacggcccctccttcatacccccctacgtcatactctagcactcagcccaccagttatgaccagtcgtcttacagccagcagaacacctatggacagccatcttcctatggtcagcaaagtagttatgggcagcagagtagttatggccaacagccacctaccagctacccccctcaaaccgggtcttacagccaggccccatctcagtatagccagcagagctcctcctatggccagcagagaccaatggacgagggacctgacctggatctcggaccacctgtcgatcccgatgaggactctgacaactctgcgatatatgtgcaaggcctgaacgacagcgtcaccctggatgatctagccgatttcttcaaacagtgcggagtcgtgaaaatgaacaagcgcactgggcaacccatgattcatatctatctcgataaggagactggtaagccaaagggtgacgcaactgtgtcttacgaagatcccccgaccgccaaagcagcggtggaatggtttgatggcaaggacttccagggttcaaagctgaaggtaagtttagcgcggaagaagccccccatgaactctatgcggggaggacttcctccgcgggagggaaggggtatgcctccacccctgagagggggtccggggggacccggagggccaggcggcccaatgggacgaatgggaggtaggggcggggatcgagggggcttccctccccgcggaccaagggggtcacgaggtaatccgagcggggggggcaatgtccaacatcgggccggcgattggcagtgcccaaatcccggatgcggtaaccaaaatttcgcttggagaacggaatgcaatcagtgcaaggccccaaaacctgaaggcttcttaccgcctcctttccctcctccaggaggagaccgcgggaggggtggcccggggggtatgcgggggggtagaggtggactcatggatcggggcggcccgggcggcatgtttcgcggaggccgtggtggggacagaggaggctttaggggcgggcgggggatggaccggggtggatttgggggtgggaggcgaggtggcccaggggggcctcccggaccacttatggagcagatgggcgggaggagaggtggccggggtggcccaggaaagatggataaaggcgaacatcgacaggaacgccgtgacagaccatactag

SEQ ID NO: 61900 - DNA, 1971 bp, Artificial Sequence
  derived and/or modified sequence
atggcatcaacagattacagcacctactctcaggccgctgcccagcaggggtatagcgcctacactgcccagccaacccaagggtacgcgcagacgacacaagcttacggccagcaaagctatggaacgtatggtcaaccaaccgatgtgtcctatacacaagcacagactaccgctacttacggccaaactgcatacgcaacatcatacgggcagcctccaacaggttatacgaccccaactgcgcctcaggcgtactctcagcctgttcaggggtacggaaccggggcttatgacacaacgaccgcaaccgtcaccacaactcaggcctcctatgccgcacaaagtgcatatggtacccaacccgcataccccgcttacggccagcagcctgctgccacagcgccaactcgtccccaagacggcaataagcccacagagacctcgcagcctcagtccagtaccgggggatacaaccagcccagcctgggatacggtcagtcaaattacagctatcctcaagttccgggtagctaccctatgcaaccagttaccgcaccgccttcttacccccccaccagctatagcagcacacagcctacgagttacgatcagtcttcttacagccagcaaaatacatatggccagcccagcagctacgggcagcagtccagctacgggcagcaatcttcctacggacagcagcccccaacctcctacccccctcaaaccggctcctattcgcaggctccctcccagtattcccaacagagttcgtcctatggacagcagagcagtttcagacaagatcacccctcaagcatgggcgtctacgggcaggagagtggcggtttctccggccccggggaaaaccggagtatgagtggacctgacaataggggtagggggcggggaggattcgatcgcggcggaatgagccgcggaggcagaggcggtggtagggggggcatgggttcagccggagagaggggtggctttaacaaaccaggaggacccatggatgagggccctgacctggacttggggcctcccgtggacccggatgaggacagcgacaactctgccatctacgtccagggacttaacgacagcgtgactcttgatgacctggccgacttcttcaagcagtgcggcgtcgttaagatgaacaagcgcacaggccagcctatgatccacatatacctggacaaggagacaggtaagcctaagggagacgccaccgtgagctatgaggaccccccgacagccaaggcggccgtcgaatggttcgacggaaaggacttccagggctccaagctcaaagtttcgctcgcccggaagaaacctccaatgaacagtatgaggggaggccttccccctagagagggccgcgggatgcctcctccactccgcggtggccctggtggccccggaggaccaggaggccctatgggacgaatgggtggacggggcggcgatagaggcgggttcccaccccggggtccacggggcagtagaggtaatccctctggtggaggcaacgtccagcaccgcgctggggattggcagtgtccaaatccggggtgcggcaatcagaactttgcatggcgaacagaatgcaaccagtgtaaggctcccaagcccgagggattcctcccgcctccgtttcctccccccgggggagacagggggcggggcggcccaggtggcatgcgcggggggcgcggcggcctcatggacaggggggggcctggaggcatgtttagaggggggagggggggggaccgcggcggatttagaggcggccgcgggatggatcggggcggatttggaggaggtaggcgaggagggcccgggggccctcctggccccttaatggagcagatgggtggcaggcgcggtggccggggcggtcccgggaaaatggacaagggcgagcacagacaggagaggcgcgacaggccctattag

SEQ ID NO: 61901 - DNA, 2267 bp, Artificial Sequence
  derived and/or modified sequence
gcgagagggagacggacgttgagagaacgaggaggaaggagagaaaatggcgtccacggattacagtacctatagccaagctgcagcgcagcagggctacagtgcttacaccgcccagcccactcaaggatatgcacagaccacccaggcatatgggcaacaaagctatggaacctatggacagcccactgatgtcagctatacccaggctcagaccactgcaacctatgggcagaccgcctatgcaacttcttatggacagcctcccactggttatactactccaactgccccccaggcatacagccagcctgtccaggggtatggcactggtgcttatgataccaccactgctacagtcaccaccacccaggcctcctatgcagctcagtctgcatatggcactcagcctgcttatccagcctatgggcagcagccagcagccactgcacctacaagaccgcaggatggaaacaagcccactgagactagtcaacctcaatctagcacagggggttacaaccagcccagcctaggatatggacagagtaactacagttatccccaggtacctgggagctaccccatgcagccagtcactgcacctccatcctaccctcctaccagctattcctctacacagccgactagttatgatcagagcagttactctcagcagaacacctatgggcaaccgagcagctatggacagcagagtagctatggtcaacaaagcagctatgggcagcagcctcccactagttacccaccccaaactggatcctacagccaagctccaagtcaatatagccaacagagcagcagctacgggcagcagagttcattccgacaggaccaccccagtagcatgggtgtttatgggcaggagtctggaggattttccggaccaggagagaaccggagcatgagtggccctgataaccggggcaggggaagagggggatttgatcgtggaggcatgagcagagatccagatgaagactctgacaacagtgcaatttatgtacaaggattaaatgacagtgtgactctagatgatctggcagacttctttaagcagtgtggggttgttaagatgaacaagagaactgggcaacccatgatccacatctacctggacaaggaaacaggaaagcccaaaggcgatgccacagtgtcctatgaagacccacccactgccaaggctgccgtggaatggtttgatgggaaagattttcaagggagcaaacttaaagtctcccttgctcggaagaagcctccaatgaacagtatgcggggtggtctgccaccccgtgagggcagaggcatgccaccaccactccgtggaggtccaggaggcccaggaggtcctgggggacccatgggtcgcatgggaggccgtggaggagatagaggaggcttccctccaagaggaccccggggttcccgagggaacccctctggaggaggaaacgtccagcaccgagctggagactggcagtgtcccaatccgggttgtggaaaccagaacttcgcctggagaacagagtgcaaccagtgtaaggccccaaagcctgaaggcttcctcccgccaccctttccgcccccgggtggtgatcgtggcagaggtggccctggtggcatgcggggaggaagaggtggcctcatggatcgtggtggtcccggtggaatgttcagaggtggccgtggtggagacagaggtggcttccgtggtggccggggcatggaccgaggtggctttggtggaggaagacgaggtggccctggggggccccctggacctttgatggaacagatgggaggaagaagaggaggacgtggaggacctggaaaaatggataaaggcgagcaccgtcaggagcgcagagatcggccctactagatgcagagaccccgcagagctgcattgactaccagatttattttttaaaccagaaaatgttttaaatttataattccatatttataatgttggccacaacattatgattattccttgtctgtactttagtatttttcaccatttgtgaagaaacattaaaacaagttaaatggtagtgtgcggagtttttttttcttccttcttttaaaaatggttgtttaagactttaacaatgggaaccccttgtgagcatgctcagtatcattgtggagaaccaagagggcctcttaactgtaacaatgttcatggttgtgatgttttttttttttttttaaataaaattccaaatgtttataaagagtca

SEQ ID NO: 61902 - DNA, 1989 bp, Artificial Sequence
  derived and/or modified sequence
aaggagagaaaatggcgtccacggattacagtacctatagccaagctgcagcgcagcagggctacagtgcttacaccgcccagcccactcaaggatatgcacagaccacccaggcatatgggcaacaaagctatggaacctatggacagcccactgatgtcagctatacccaggctcagaccactgcaacctatgggcagaccgcctatgcaacttcttatggacagcctcccactggttatactactccaactgccccccaggcatacagccagcctgtccaggggtatggcactggtgcttatgataccaccactgctacagtcaccaccacccaggcctcctatgcagctcagtctgcatatggcactcagcctgcttatccagcctatgggcagcagccagcagccactgcacctacaagctattcctctacacagccgactagttatgatcagagcagttactctcagcagaacacctatgggcaaccgagcagctatggacagcagagtagctatggtcaacaaagcagctatgggcagcagcctcccactagttacccaccccaaactggatcctacagccaagctccaagtcaatatagccaacagagcagcagctacgggcagcagagttcattccgacaggaccaccccagtagcatgggtgtttatgggcaggagtctggaggattttccggaccaggagagaaccggagcatgagtggccctgataaccggggcaggggaagagggggatttgatcgtggaggcatgagcagaggtgggcggggaggaggacgcggtggaatgggcagcgctggagagcgaggtggcttcaataagcctggtggacccatggatgaaggaccagatcttgatctaggcccacctgtagatccagatgaagactctgacaacagtgcaatttatgtacaaggattaaatgacagtgtgactctagatgatctggcagacttctttaagcagtgtggggttgttaagatgaacaagagaactgggcaacccatgatccacatctacctggacaaggaaacaggaaagcccaaaggcgatgccacagtgtcctatgaagacccacccactgccaaggctgccgtggaatggtttgatgggaaagattttcaagggagcaaacttaaagtctcccttgctcggaagaagcctccaatgaacagtatgcggggtggtctgccaccccgtgagggcagaggcatgccaccaccactccgtggaggtccaggaggcccaggaggtcctgggggacccatgggtcgcatgggaggccgtggaggagatagaggaggcttccctccaagaggaccccggggttcccgagggaacccctctggaggaggaaacgtccagcaccgagctggagactggcagtgtcccaatccgggttgtggaaaccagaacttcgcctggagaacagagtgcaaccagtgtaaggccccaaagcctgaaggcttcctcccgccaccctttccgcccccgggtggtgatcgtggcagaggtggccctggtggcatgcggggaggaagaggtggcctcatggatcgtggtggtcccggtggaatgttcagaggtggccgtggtggagacagaggtggcttccgtggtggccggggcatggaccgaggtggctttggtggaggaagacgaggtggccctggggggccccctggacctttgatggaacagatgggaggaagaagaggaggacgtggaggacctggaaaaatggataaaggcgagcaccgtcaggagcgcagagatcggccctactagatgcagagaccccgcagagctgcattgactaccagatttattttttaaaccagaaaatgttttaaatttataattccatatttataatgttggccacaacattatgattattccttgtctgtactttagtatttttcaccatttgtgaagaaacattaaaacaagttaaatggta

SEQ ID NO: 61903 - DNA, 2443 bp, Artificial Sequence
  derived and/or modified sequence
agagccagcggacggaaccattccaaacagcctagtctcgtgctgagagcctctccggtttcacgctgagacccgctcacccccgctctggccccttagatgctattttggcccgagtgtcacgtcgggcgctctttagagaggactgggacaagagttgcggacgcgaagaacgagtaagcggtggttcatccctcctgaccccacccccgtggcctggcccgatggtcgcgcccggggttgcgagatttgcgcctgcgcagtgcggcgcctagagggaaagcgagagggagacggacgttgagagaacgaggaggaaggagagaaaatggcgtccacggattacagtacctatagccaagctgcagcgcagcagggctacagtgcttacaccgcccagcccactcaaggatatgcacagaccacccaggcatatgggcaacaaagctatggaacctatggacagcccactgatgtcagctatacccaggctcagaccactgcaacctatgggcagaccgcctatgcaacttcttatggacagcctcccactggttatactactccaactgccccccaggcatacagccagcctgtccaggggtatggcactggtgcttatgataccaccactgctacagtcaccaccacccaggcctcctatgcagctcagtctgcatatggcactcagcctgcttatccagcctatgggcagcagccagcagccactgcacctacaagaccgcaggatggaaacaagcccactgagactagtcaacctcaatctagcacagggggttacaaccagcccagcctaggatatggacagagtaactacagttatccccaggtacctgggagctaccccatgcagccagtcactgcacctccatcctaccctcctaccagctattcctctacacagccgactagttatgatcagagcagttactctcagcagaacacctatgggcaaccgagcagctatggacagcagagtagctatggtcaacaaagcagctatgggcagcagcctcccactagttacccaccccaaactggatcctacagccaagctccaagtcaatatagccaacagagcagcagctacgggcagcagagacccatggatgaaggaccagatcttgatctaggcccacctgtagatccagatgaagactctgacaacagtgcaatttatgtacaaggattaaatgacagtgtgactctagatgatctggcagacttctttaagcagtgtggggttgttaagatgaacaagagaactgggcaacccatgatccacatctacctggacaaggaaacaggaaagcccaaaggcgatgccacagtgtcctatgaagacccacccactgccaaggctgccgtggaatggtttgatgggaaagattttcaagggagcaaacttaaagtctcccttgctcggaagaagcctccaatgaacagtatgcggggtggtctgccaccccgtgagggcagaggcatgccaccaccactccgtggaggtccaggaggcccaggaggtcctgggggacccatgggtcgcatgggaggccgtggaggagatagaggaggcttccctccaagaggaccccggggttcccgagggaacccctctggaggaggaaacgtccagcaccgagctggagactggcagtgtcccaatccgggttgtggaaaccagaacttcgcctggagaacagagtgcaaccagtgtaaggccccaaagcctgaaggcttcctcccgccaccctttccgcccccgggtggtgatcgtggcagaggtggccctggtggcatgcggggaggaagaggtggcctcatggatcgtggtggtcccggtggaatgttcagaggtggccgtggtggagacagaggtggcttccgtggtggccggggcatggaccgaggtggctttggtggaggaagacgaggtggccctggggggccccctggacctttgatggaacagatgggaggaagaagaggaggacgtggaggacctggaaaaatggataaaggcgagcaccgtcaggagcgcagagatcggccctactagatgcagagaccccgcagagctgcattgactaccagatttattttttaaaccagaaaatgttttaaatttataattccatatttataatgttggccacaacattatgattattccttgtctgtactttagtatttttcaccatttgtgaagaaacattaaaacaagttaaatggtagtgtgcggagtttttttttcttccttcttttaaaaatggttgtttaagactttaacaatgggaaccccttgtgagcatgctcagtatcattgtggagaaccaagagggcctcttaactgtaacaatgttcatggttgtgatgttttttttttttttttaaataaaattccaaatgtttataaagagtc

SEQ ID NO: 61904 - DNA, 2654 bp, Artificial Sequence
  derived and/or modified sequence
ggacggaaccattccaaacagcctagtctcgtgctgagagcctctccggtttcacgctgagacccgctcacccccgctctggccccttagatgctattttggcccgagtgtcacgtcgggcgctctttagagaggactgggacaagagttgcggacgcgaagaacgagtaagcggtggttcatccctcctgaccccacccccgtggcctggcccgatggtcgcgcccggggttgcgagatttgcgcctgcgcagtgcggcgcctagagggaaagcgagagggagacggacgttgagagaacgaggaggaaggagagaaaatggcgtccacggattacagtacctatagccaagctgcagcgcagcagggctacagtgcttacaccgcccagcccactcaaggatatgcacagaccacccaggcatatgggcaacaaagctatggaacctatggacagcccactgatgtcagctatacccaggctcagaccactgcaacctatgggcagaccgcctatgcaacttcttatggacagcctcccactggttatactactccaactgccccccaggcatacagccagcctgtccaggggtatggcactggtgcttatgataccaccactgctacagtcaccaccacccaggcctcctatgcagctcagtctgcatatggcactcagcctgcttatccagcctatgggcagcagccagcagccactgcacctacaagaccgcaggatggaaacaagcccactgagactagtcaacctcaatctagcacagggggttacaaccagcccagcctaggatatggacagagtaactacagttatccccaggtacctgggagctaccccatgcagccagtcactgcacctccatcctaccctcctaccagctattcctctacacagccgactagttatgatcagagcagttactctcagcagaacacctatgggcaaccgagcagctatggacagcagagtagctatggtcaacaaagcagctatgggcagcagcctcccactagttacccaccccaaactggatcctacagccaagctccaagtcaatatagccaacagagcagcagctacgggcagcagagttcattccgacaggaccaccccagtagcatgggtgtttatgggcaggagtctggaggattttccggaccaggagagaaccggagcatgagtggccctgataaccggggcaggggaagagggggatttgatcgtggaggcatgagcagaggtgggcggggaggaggacgcggtggaatgggcagcgctggagagcgaggtggcttcaataagcctggtggacccatggatgaaggaccagatcttgatctaggcccacctgtagatccagatgaagactctgacaacagtgcaatttatgtacaaggattaaatgacagtgtgactctagatgatctggcagacttctttaagcagtgtggggttgttaagatgaacaagagaactgggcaacccatgatccacatctacctggacaaggaaacaggaaagcccaaaggcgatgccacagtgtcctatgaagacccacccactgccaaggctgccgtggaatggtttgatgggaaagattttcaagggagcaaacttaaagtctcccttgctcggaagaagcctccaatgaacagtatgcggggtggtctgccaccccgtgagggcagaggcatgccaccaccactccgtggaggtccaggaggcccaggaggtcctgggggacccatgggtcgcatgggaggccgtggaggagatagaggaggcttccctccaagaggaccccggggttcccgagggaacccctctggaggaggaaacgtccagcaccgagctggagactggcagtgtcccaatccgggttgtggaaaccagaacttcgcctggagaacagagtgcaaccagtgtaaggccccaaagcctgaaggcttcctcccgccaccctttccgcccccgggtggtgatcgtggcagaggtggccctggtggcatgcggggaggaagaggtggcctcatggatcgtggtggtcccggtggaatgttcagaggtggccgtggtggagacagaggtggcttccgtggtggccggggcatggaccgaggtggctttggtggaggaagacgaggtggccctggggggccccctggacctttgatggaacagatgggaggaagaagaggaggacgtggaggacctggaaaaatggataaaggcgagcaccgtcaggagcgcagagatcggccctactagatgcagagaccccgcagagctgcattgactaccagatttattttttaaaccagaaaatgttttaaatttataattccatatttataatgttggccacaacattatgattattccttgtctgtactttagtatttttcaccatttgtgaagaaacattaaaacaagttaaatggtagtgtgcggagtttttttttcttccttcttttaaaaatggttgtttaagactttaacaatgggaaccccttgtgagcatgctcagtatcattgtggagaaccaagagggcctcttaactgtaacaatgttcatggttgtgatgttttttttttttttttaaataaaattccaaatgtttataaagagtca

SEQ ID NO: 61905 - DNA, 1857 bp, Artificial Sequence
  derived and/or modified sequence
atggccagcacagactacagcacctacagccaggccgccgcccagcagggctacagcgcctacacagcccagcccacccagggctacgcccagaccacccaggcctacggccagcagagctatggcacctacggccagcccacagatgtgtcctacacccaggcccagaccacagccacctacggccagacagcctatgccaccagctatggccagcccccaacaggctacaccacccccacagccccccaggcctacagccagcctgtgcagggctatggaactggagcctatgacaccaccacagccaccgtgaccaccacccaggccagctatgctgcccagagcgcctacggcacccagcctgcctacccagcctacggccagcagcctgctgccacagcccccacccggccccaggacggcaacaagcccacagagaccagccagccccagagcagcactggaggctacaaccagcccagcctgggctacggccagagcaactacagctacccccaggtgcccggcagctaccccatgcagcctgtgacagcccctccttcctacccacccaccagctacagcagcacccagcccaccagctatgaccagagcagctacagccagcagaacacctacggccagcccagcagctatggccagcagagcagctatggccagcagagcagctatggccagcagccccccaccagctacccaccccagacaggcagctacagccaggcccccagccagtacagccagcagagcagcagctatggccagcagagcagcttccggcaggaccaccccagctccatgggcgtgtatggccaggagagcggcggcttcagcggccctggagagaacagatccatgagcggccctgacaacagaggccggggccggggcggctttgaccggggcggcatgagccgggaccctgatgaggacagcgacaacagcgccatctacgtgcagggcctgaatgattctgtgaccctggatgacctggccgacttcttcaagcagtgtggggtggtgaagatgaacaagaggacaggccagcccatgatccacatctacctggacaaggagaccgggaagcccaagggagatgccaccgtgtcctatgaggaccccccaacagccaaggctgctgtggagtggtttgatggcaaggacttccagggcagcaagctgaaggtgtccctggccaggaagaagccacccatgaacagcatgaggggcggcctgcccccccgggagggccggggcatgcccccacccctgcggggcggccctgggggccctgggggccctgggggccccatgggccgcatgggcggccggggcggggacagaggaggcttccccccccggggcccccggggcagccggggcaaccccagcggcggcggcaatgtgcagcacagagctggggactggcagtgccccaaccctggctgcggcaaccagaactttgcctggaggacagagtgcaaccagtgcaaggcccccaagccagagggcttcctgcccccacccttccccccacctggaggagaccggggccggggcggccctgggggcatgagaggaggccggggcggcctgatggaccggggcggccctgggggcatgttccggggcggccggggcggggacagaggaggcttccggggcggccggggcatggaccggggcggctttggaggcggccggcggggcggccctgggggccccccaggccccctgatggagcagatgggcggccggcggggcggccggggcggccctgggaagatggacaagggggagcaccggcaggagcggcgggaccggccctactag

SEQ ID NO: 61906 - DNA, 1803 bp, Artificial Sequence
  derived and/or modified sequence
atggccagcacagactacagcacctacagccaggccgccgcccagcagggctacagcgcctacacagcccagcccacccagggctacgcccagaccacccaggcctacggccagcagagctatggcacctacggccagcccacagatgtgtcctacacccaggcccagaccacagccacctacggccagacagcctatgccaccagctatggccagcccccaacaggctacaccacccccacagccccccaggcctacagccagcctgtgcagggctatggaactggagcctatgacaccaccacagccaccgtgaccaccacccaggccagctatgctgcccagagcgcctacggcacccagcctgcctacccagcctacggccagcagcctgctgccacagcccccaccagctacagcagcacccagcccaccagctatgaccagagcagctacagccagcagaacacctacggccagcccagcagctatggccagcagagcagctatggccagcagagcagctatggccagcagccccccaccagctacccaccccagacaggcagctacagccaggcccccagccagtacagccagcagagcagcagctatggccagcagagcagcttccggcaggaccaccccagctccatgggcgtgtatggccaggagagcggcggcttcagcggccctggagagaacagatccatgagcggccctgacaacagaggccggggccggggcggctttgaccggggcggcatgagcagaggaggccggggcggcggccggggcggcatgggcagcgctggggagcggggcggcttcaacaagccaggcggccccatggatgagggccctgacctggacctgggcccccctgtggaccctgatgaggacagcgacaacagcgccatctacgtgcagggcctgaatgattctgtgaccctggatgacctggccgacttcttcaagcagtgtggggtggtgaagatgaacaagaggacaggccagcccatgatccacatctacctggacaaggagaccgggaagcccaagggagatgccaccgtgtcctatgaggaccccccaacagccaaggctgctgtggagtggtttgatggcaaggacttccagggcagcaagctgaaggtgtccctggccaggaagaagccacccatgaacagcatgaggggcggcctgcccccccgggagggccggggcatgcccccacccctgcggggcggccctgggggccctgggggccctgggggccccatgggccgcatgggcggccggggcggggacagaggaggcttccccccccggggcccccggggcagccggggcaaccccagcggcggcggcaatgtgcagcacagagctggggactggcagtgccccaaccctggctgcggcaaccagaactttgcctggaggacagagtgcaaccagtgcaaggcccccaagccagagggcttcctgcccccacccttccccccacctggaggagaccggggccggggcggccctgggggcatgagaggaggccggggcggcctgatggaccggggcggccctgggggcatgttccggggcggccggggcggggacagaggaggcttccggggcggccggggcatggaccggggcggctttggaggcggccggcggggcggccctgggggccccccaggccccctgatggagcagatgggcggccggcggggcggccggggcggccctgggaagatggacaagggggagcaccggcaggagcggcgggaccggccctactag

SEQ ID NO: 61907 - DNA, 1752 bp, Artificial Sequence
  derived and/or modified sequence
atggccagcacagactacagcacctacagccaggccgccgcccagcagggctacagcgcctacacagcccagcccacccagggctacgcccagaccacccaggcctacggccagcagagctatggcacctacggccagcccacagatgtgtcctacacccaggcccagaccacagccacctacggccagacagcctatgccaccagctatggccagcccccaacaggctacaccacccccacagccccccaggcctacagccagcctgtgcagggctatggaactggagcctatgacaccaccacagccaccgtgaccaccacccaggccagctatgctgcccagagcgcctacggcacccagcctgcctacccagcctacggccagcagcctgctgccacagcccccacccggccccaggacggcaacaagcccacagagaccagccagccccagagcagcactggaggctacaaccagcccagcctgggctacggccagagcaactacagctacccccaggtgcccggcagctaccccatgcagcctgtgacagcccctccttcctacccacccaccagctacagcagcacccagcccaccagctatgaccagagcagctacagccagcagaacacctacggccagcccagcagctatggccagcagagcagctatggccagcagagcagctatggccagcagccccccaccagctacccaccccagacaggcagctacagccaggcccccagccagtacagccagcagagcagcagctatggccagcagaggcccatggatgagggccctgacctggacctgggcccccctgtggaccctgatgaagattctgacaacagcgccatctacgtgcagggcctgaatgacagcgtgaccctggatgacctggccgacttcttcaagcagtgtggggtggtgaagatgaacaagaggacaggccagcccatgatccacatctacctggacaaggagaccgggaagcccaagggagatgccaccgtgtcctatgaagatcctcccacagccaaggctgctgtggagtggtttgatggcaaggacttccagggcagcaagctgaaggtgtccctggccaggaagaagccacccatgaacagcatgagaggaggcctgcccccccgggagggccggggcatgcccccacccctgcggggcggccctgggggccctgggggccctgggggccccatgggccgcatgggcggccggggcggggaccggggcggcttccccccccggggcccccggggcagccggggcaaccccagcggcggcggcaatgtgcagcaccgggccggggactggcagtgccccaaccctggctgcggcaaccagaactttgcctggaggacagagtgcaaccagtgcaaggcccccaagccagagggcttcctgcccccacccttccccccacctggaggagaccggggccggggcggccctgggggcatgaggggcggccggggcggcctgatggacagaggaggccctgggggcatgttccggggcggccggggcggggaccggggcggcttccggggcggccggggcatggacagaggaggctttggaggcggcagaagaggaggccctgggggccccccaggccccctgatggagcagatgggcggcagaagaggaggccggggcggccctgggaagatggacaagggggagcaccggcaggagcggcgggaccggccctactag

SEQ ID NO: 61908 - DNA, 1971 bp, Artificial Sequence
  derived and/or modified sequence
atggccagcacagactacagcacctacagccaggccgccgcccagcagggctacagcgcctacacagcccagcccacccagggctacgcccagaccacccaggcctacggccagcagagctatggcacctacggccagcccacagatgtgtcctacacccaggcccagaccacagccacctacggccagacagcctatgccaccagctatggccagcccccaacaggctacaccacccccacagccccccaggcctacagccagcctgtgcagggctatggaactggagcctatgacaccaccacagccaccgtgaccaccacccaggccagctatgctgcccagagcgcctacggcacccagcctgcctacccagcctacggccagcagcctgctgccacagcccccacccggccccaggacggcaacaagcccacagagaccagccagccccagagcagcactggaggctacaaccagcccagcctgggctacggccagagcaactacagctacccccaggtgcccggcagctaccccatgcagcctgtgacagcccctccttcctacccacccaccagctacagcagcacccagcccaccagctatgaccagagcagctacagccagcagaacacctacggccagcccagcagctatggccagcagagcagctatggccagcagagcagctatggccagcagccccccaccagctacccaccccagacaggcagctacagccaggcccccagccagtacagccagcagagcagcagctatggccagcagagcagcttccggcaggaccaccccagctccatgggcgtgtatggccaggagagcggcggcttcagcggccctggagagaacagatccatgagcggccctgacaacagaggccggggccggggcggctttgaccggggcggcatgagcagaggaggccggggcggcggccggggcggcatgggcagcgctggggagcggggcggcttcaacaagccaggcggccccatggatgagggccctgacctggacctgggcccccctgtggaccctgatgaggacagcgacaacagcgccatctacgtgcagggcctgaatgattctgtgaccctggatgacctggccgacttcttcaagcagtgtggggtggtgaagatgaacaagaggacaggccagcccatgatccacatctacctggacaaggagaccgggaagcccaagggagatgccaccgtgtcctatgaggaccccccaacagccaaggctgctgtggagtggtttgatggcaaggacttccagggcagcaagctgaaggtgtccctggccaggaagaagccacccatgaacagcatgaggggcggcctgcccccccgggagggccggggcatgcccccacccctgcggggcggccctgggggccctgggggccctgggggccccatgggccgcatgggcggccggggcggggacagaggaggcttccccccccggggcccccggggcagccggggcaaccccagcggcggcggcaatgtgcagcacagagctggggactggcagtgccccaaccctggctgcggcaaccagaactttgcctggaggacagagtgcaaccagtgcaaggcccccaagccagagggcttcctgcccccacccttccccccacctggaggagaccggggccggggcggccctgggggcatgagaggaggccggggcggcctgatggaccggggcggccctgggggcatgttccggggcggccggggcggggacagaggaggcttccggggcggccggggcatggaccggggcggctttggaggcggccggcggggcggccctgggggccccccaggccccctgatggagcagatgggcggccggcggggcggccggggcggccctgggaagatggacaagggggagcaccggcaggagcggcgggaccggccctactag

SEQ ID NO: 61909 - DNA, 1857 bp, Artificial Sequence
  derived and/or modified sequence
atggccagcaccgactacagcacctacagccaggccgccgcccagcaaggatacagtgcttacaccgcccaaccgactcaaggctacgcccaaaccacccaagcttacgggcagcagagctacggcacctatggccagcctacagacgtgagctatacccaagcgcagactacggcaacctatggccaaacggcatacgcaacatcctatggccagccccccacaggctatactacccctacagcacctcaagcttatagtcagcccgtgcaaggatatggcacaggggcatatgacaccaccacagcgactgtgaccacaacgcaggcctcttatgccgcccagtctgcctatgggacccagcctgcctaccctgcctacggccaacaacctgcagccacagctcctactcgaccccaagatgggaataagccgacagaaacctcccagccacagagtagtacagggggttataatcaaccaagcttaggctatggtcagagcaactatagttacccacaggtccctggttcttaccctatgcagccagtgactgcgcccccatcctacccgcctacttcctatagcagcacccaacccacttcctacgaccagagttcttattctcaacagaacacctatggccagcccagctcctacggacagcaatcatcctatggccagcagtcatcgtacggacagcagcctccaacgagttatccgccccagaccgggagctactcccaggcgccctctcagtattcacagcagagttcctcctacggtcagcagtcctccttccgccaagatcatcctagtagcatgggcgtttacggccaggagtctggggggttttccgggcctggagagaataggagtatgagcggacccgataatagaggacgcgggcgcggaggatttgatcgcggcggaatgtccagggaccccgatgaagatagcgacaatagcgccatctacgtccaaggccttaatgatagcgtgacgctcgatgacctcgcggattttttcaaacagtgtggcgtggtcaaaatgaataagagaactggtcaacctatgatccacatctatcttgataaggagaccggaaaaccaaaaggcgacgccactgtgtcatacgaagacccaccaaccgctaaggcagcagtcgagtggttcgacggcaaggacttccagggcagcaagctaaaagtatccctcgcaagaaagaagcctcccatgaattctatgcgcggggggctgcctcctagagaggggagagggatgcccccacccctgcggggggggcccggcgggcccggaggccccggaggacctatggggcgcatggggggacggggcggcgataggggagggttccccccgagaggccctcgggggtcccgcgggaatccctctgggggaggaaacgtgcaacaccgcgcaggagactggcagtgccccaaccccgggtgtgggaaccagaatttcgcatggcgtaccgagtgtaaccagtgcaaagccccaaaacctgaaggcttcttaccgccacccttcccccccccaggcggtgaccggggacgcgggggtcccggagggatgagaggtggccgaggaggactgatggaccgtggcggcccgggggggatgtttagaggcggtcgtggaggagacagagggggtttcagaggtggccggggaatggacagaggagggtttggaggcgggagacggggaggccctggaggaccccccggccctctgatggagcagatgggagggcggcggggtgggcgcggaggacccggaaagatggacaaaggggagcatcgacaggagaggcgggaccgcccatactag

SEQ ID NO: 61910 - DNA, 1803 bp, Artificial Sequence
  derived and/or modified sequence
atggccagcaccgactacagcacctacagccaggccgccgcccagcagggatacagcgcctacacggcccagcccacccaggggtatgctcagactacccaggcatatggccagcagtcctacggtacttacggccagccaaccgacgtgagttacacccaggcacagaccaccgctacctacggccaaactgcgtatgcgaccagttacgggcagcccccgactggatataccacacctacagccccacaagcatactcgcaaccagtccagggctatggaaccggtgcttacgatactaccaccgccactgtgacaaccacccaggcatcctacgccgcacaaagcgcatacgggacccagccggcctaccccgcttatggtcagcaacccgctgctactgcccccacttcgtactcctcaacacagccaacctcttacgaccagtcatcttactctcagcagaatacctatggccagccgtcaagctacggtcagcagtcctcgtacggtcaacagtcctcctacgggcagcaaccacccaccagctacccgccacaaacaggcagttactctcaggccccctcccagtactcccagcagagcagcagctatggccagcagtccagctttagacaggaccacccaagctctatgggcgtttatgggcaggagagtggaggcttttccggtcctggcgaaaatagaagtatgtcagggcctgataatcggggcaggggacgcgggggtttcgaccggggaggtatgagccgcggcggccgtggagggggccgtgggggtatggggagcgcgggtgaaagaggaggatttaataaaccaggtgggcccatggatgaagggcccgacttggacctggggcctcccgttgaccccgatgaagactcagacaattctgctatttatgtccagggactgaacgactcagttactctcgatgacctggccgattttttcaaacagtgtggcgttgtgaagatgaacaagcggacggggcaaccgatgattcatatctacctcgataaggaaaccggcaaaccgaagggtgacgctacagtgtcctacgaggatccaccgactgccaaggccgcagttgagtggttcgacgggaaggattttcagggcagtaagctgaaggtgtccctcgcccgcaagaagcctcctatgaatagcatgcgcggtggccttcccccaagagaaggaaggggaatgcctccaccgctgaggggaggccctggtggcccaggtgggcccggcggtcccatgggccggatgggcggccgcgggggtgatcggggtggattcccccccagaggtcccaggggatcgaggggaaacccttctggcggcggaaatgtccagcatcgagccggcgattggcagtgccctaaccccggttgcggaaatcaaaactttgcatggcgcaccgaatgtaatcagtgcaaggcaccaaagccagaagggttccttccaccaccctttcccccacccggcggcgatcgcggcagaggagggcctggcggaatgcggggtggcagaggcgggctgatggacaggggagggcccggcggaatgttccggggtgggcgaggcggcgatcgcggagggtttagaggaggccgtggcatggaccggggtggatttggcggcgggcgcagaggggggcctgggggacctccagggccgctcatggagcaaatgggtggtcgcagaggaggcaggggcggcccgggcaagatggataaaggggagcaccggcaggaaaggagagacaggccctactag

SEQ ID NO: 61911 - DNA, 1752 bp, Artificial Sequence
  derived and/or modified sequence
atggccagcaccgactacagcacctacagccaggccgccgcccagcagggatatagcgcgtacacagcacagcctacccagggctatgctcagacaacacaggcctatggacagcagagctatgggacctatggccaacctacagacgtgagctatacgcaggcccagaccactgctacatacgggcagaccgcctatgccacgtcttacggccaacctcccacagggtacactacacccacagccccacaggcctacagccaacctgtacaaggatacggaacaggtgcttacgatacaacaaccgccaccgtcactacaactcaagcgtcttacgcggctcagagtgcgtatgggactcagccggcatatcctgcatacggtcagcagcccgccgccacagcacctaccagaccgcaggacggaaataagcctactgagacaagccagcctcagtcctcaaccggcggatataaccaaccatcactgggctatggacagtccaattattcgtaccctcaagtccctgggtcatatcccatgcaaccggtgactgctcccccaagttatccccctacatcctattcgtccacccaacctacctcatacgaccagagttcctatagtcagcaaaacacctacggacagcccagctcctacgggcaacagtcatcttatgggcaacagagttcgtacggtcagcagcctccgacgtcttacccaccacaaactggtagttacagtcaagctccctcacagtactcccagcaatccagctcctatggccaacaacggccaatggatgaaggaccagacctggacttgggccctccagttgatcccgatgaggattctgataatagtgctatttacgtccagggtttaaacgatagcgttacactcgacgacttggcggacttcttcaaacaatgtggcgtggtgaagatgaacaagcgcaccggacaacctatgatccacatttacttagataaagaaactgggaaaccgaaaggggacgcaaccgtctcttacgaagatccacctactgcaaaggccgccgtagagtggttcgacgggaaagatttccagggttctaagttaaaggtgagtttggcacgtaagaaaccccctatgaattcgatgcgggggggcctgcccccacgggagggccggggtatgcctccacccttgaggggcgggcctggcggaccaggaggtccaggagggccaatgggtaggatgggtggtcggggcggagacagaggcgggtttccaccacgtggcccccgggggagtcggggcaatccctcgggagggggtaacgttcagcatagagctggggactggcagtgtccaaaccccggatgtggtaatcagaatttcgcctggagaaccgagtgcaatcaatgcaaggctcctaaacctgaagggtttttgcctccgccttttcccccccctggtggcgacaggggtagagggggccccggtggtatgaggggaggccggggcggactcatggacaggggaggtcccggtggcatgtttagaggcggccgggggggcgacaggggaggtttccgcggcgggaggggaatggacaggggaggttttggggggggcagaagagggggcccgggcgggcctcccggacccctcatggagcagatgggcggtcggaggggggggcgcggaggccccggcaaaatggataagggtgagcaccgccaggaacgaagggacagaccatactag

SEQ ID NO: 61912 - DNA, 1971 bp, Artificial Sequence
  derived and/or modified sequence
atggccagcaccgactacagcacctacagccaggccgccgcccagcagggctactccgcctataccgctcaacccacccagggatatgcgcaaacaactcaggcttacggccagcaaagctacgggacatacggacagcctacagacgtgtcctacactcaggcacagacaactgcgacctatgggcagacggcatatgcgacgtcttacggacagccccccactggatatacaacacctactgcccctcaagcctactcccagccagtccaggggtacgggactggggcctacgataccaccaccgctacggtgaccaccacccaggcctcctatgctgcccagagcgcatatggcactcaacctgcctatccggcttacggtcagcagccggcagctaccgcgccaacacgacctcaggacgggaacaagcccactgagacctcccagccgcaatcatccactggcggttataatcagccatcactggggtatgggcagagtaattatagctatccccaggtccccgggtcttatcccatgcagcccgtgaccgcgcctcccagttatccacctaccagctacagtagcactcagcccaccagttatgatcaatctagctatagtcagcagaatacttatgggcagccctctagctatggacaacagagctcctacggccagcagtcaagctatggacagcagccgccaactagttatcccccacagactggcagttacagtcaggccccaagccaatacagtcagcagagtagtagctatggtcaacagtcctcattcagacaagatcacccgtcctctatgggtgtgtatggacaggaaagtggtggcttttctgggcccggtgagaaccgttcgatgtcggggccagacaatcggggaagaggtcgcgggggttttgatcgcgggggaatgtctcgcggcggacgcggcggggggcggggcggcatgggctccgccggtgagcgaggcgggttcaataagccaggggggcctatggatgaagggcctgatcttgatctaggtccccccgtagaccctgacgaagattctgataattctgctatctatgtgcagggtctcaacgatagtgttacgctggacgacctggccgatttctttaagcaatgcggggttgtgaagatgaacaagaggacagggcaaccgatgatccacatttacctggataaagaaacaggcaagcctaaaggggatgctacagtctcctatgaggacccgccaacagccaaggcagccgtcgaatggtttgacggaaaggacttccagggaagtaaactgaaggtctccctggcccgcaagaagccccctatgaattcgatgcgcggtggtcttccacctcgcgagggtcgaggtatgcctcctccgttgcgaggggggcctggaggtccaggcggacccggggggcccatggggcggatgggcgggaggggcggggaccgcggcggatttcccccgcgtgggccaagaggcagcagaggcaatcctagtgggggcggcaatgtacagcaccgagccggggattggcagtgtcccaaccccgggtgcggtaatcaaaattttgcctggcggaccgaatgtaatcagtgtaaggcgccaaagcccgaaggctttttgccgcctccattccccccacctgggggagaccgtgggcggggaggacccggcggaatgcggggcggccggggtggacttatggacagggggggcccaggcggaatgttccgcggtggaagagggggagataggggcggttttcggggcgggcgagggatggacagggggggcttcgggggcggacgccgaggaggacctggcggccctcctggacctctgatggagcagatgggaggacgaagggggggccgaggaggacctgggaaaatggataaaggcgagcatcgacaggagaggcgggacagaccctactag

SEQ ID NO: 61913 - DNA, 1857 bp, Artificial Sequence
  derived and/or modified sequence
atggcgtcaactgattactccacttactcacaggctgccgcacaacagggttactccgcatacactgcgcagcccacacaaggctacgctcaaacaacacaggcgtatggccagcagagttatggtacatatggtcaaccgactgatgtatcatacacacaggcacagaccactgccacatacgggcagaccgcctatgcaaccagttatggccagccacccaccgggtatacgactcctactgcgcctcaagcctactcacagcccgtgcagggatacggaacaggagcatacgataccaccactgccactgtgaccacaacgcaagcaagttatgccgcacaaagtgcttacgggactcagccagcctaccctgcctacggacagcagccggcagcaaccgcgccaacacggccacaggatggaaataagccaaccgagacgtctcagccccaatcatcaactggaggttataaccagcctagcttaggttatggacaatcaaattactcttacccacaggtacctgggtcgtacccaatgcagccggtaacggcacctccttcatatcccccaacttcttacagttccactcagccgacatcttatgatcagtcctcttacagccagcaaaacacgtacgggcagccgtcatcatatggccagcagtcctcctatggtcagcagtctagttacggccagcagcctcctacttcctatccccctcaaaccggtagctattcccaagccccaagccagtattcacagcaatcatccagctacggccagcaatctagttttagacaggatcacccatcaagtatgggcgtttacggacaggagtcaggagggttttccgggccaggagagaatcgttcaatgtcgggtccagataatcgcggtagaggccgaggaggatttgatcgcggtggaatgtcccgggatccggacgaggatagtgataattctgcgatatacgttcaaggcttaaatgactcggtcacactggacgatcttgcagacttctttaaacagtgcggtgttgtgaagatgaacaagaggacgggccagcctatgattcatatctatctggataaggagactggaaagccaaaaggagacgccacagtgagctatgaggacccacctaccgcaaaggcagccgttgaatggttcgatggcaaggacttccaaggcagcaaactaaaagtgtcacttgccagaaaaaaacctcctatgaacagcatgagaggaggtcttccccctagggagggcagaggaatgcccccaccccttcgaggaggccctggaggacccggtggacccggaggacccatggggaggatggggggacgcggtggcgacaggggaggcttccctccacgtggccctcggggatcacggggaaatccctcaggcggagggaatgtccagcatagggccggagattggcagtgcccaaatcccggttgcggaaaccaaaactttgcctggcgcaccgagtgtaatcagtgcaaggctccgaagcctgaaggtttcctgcctcccccatttccgcctcctgggggtgatagaggtaggggtggacctggtggcatgagggggggtcggggagggctcatggatcggggaggaccaggcggaatgttcaggggcggaagaggaggggacagagggggattcaggggaggcagaggaatggatcggggaggcttcgggggaggcagacggggtggacccggtggtccccctggccctctcatggaacagatgggaggcaggcgcggtgggagaggcggacctggcaaaatggataaaggcgagcataggcaggagcgacgggatcggccttactag

SEQ ID NO: 61914 - DNA, 1803 bp, Artificial Sequence
  derived and/or modified sequence
atggcctccaccgactactcaacttatagtcaggctgcggcacagcaggggtatagtgcctacacggctcagcccacccaaggctacgctcagacgacgcaagcatatgggcagcagtcatatgggacatatgggcaacccacagatgtgtcgtacacacaggctcaaacgacagcaacttacggacaaactgcctatgcgacctcctacgggcagcctcccacagggtacacaaccccaacggcaccccaggcttactcccagcctgtccagggctacggcactggagcctacgatactacaaccgctacagtgacaaccacgcaggcatcatacgcagcacagtcggcatacggcacacagccggcttatcctgcctacggccagcaacccgctgccaccgccccaacaagctacagctccacacagccgacctcatacgaccagtcctcgtattctcagcaaaacacctacggccagcccagctcttacgggcaacaatcatcctacggtcagcagagctcatatggacagcagcctcctacttcttacccaccccagacaggaagctacagtcaagcccctagccaatactcccagcagagctcatcctacgggcaacagagcagttttagacaagatcacccgagctctatgggcgtctacggacaggagagtggcggtttctctggccctggagagaaccgttcaatgtcaggcccagataaccggggaagaggtcgcggtggcttcgacagaggaggtatgtcaagggggggtagggggggagggagagggggtatgggcagcgccggtgagcggggaggctttaacaagccagggggaccaatggatgaagggcctgatctagacctgggcccacccgttgacccagatgaagacagtgacaatagtgctatttatgttcaggggcttaacgatagtgtaaccttagatgatctggctgactttttcaaacagtgcggagtggtaaaaatgaacaagcggacgggtcaacctatgattcacatctatttggacaaagagacggggaaacctaaaggcgacgctaccgtcagctatgaggacccccctaccgccaaagcagctgtggaatggttcgacggcaaggacttccaggggtcaaaactgaaggtatcactggcacgaaaaaagcccccaatgaatagtatgaggggagggctaccacctcgcgaagggcgaggtatgcctccgcctcttcgaggcggacccggtggtccaggtggtcctgggggtcccatgggaagaatgggcggacgcggtggggaccgaggaggctttcctccacgaggacccaggggatcccgcggtaacccatctggcggaggcaacgttcagcatcgggcaggcgactggcagtgtcctaatccaggatgtggaaatcaaaatttcgcgtggagaaccgaatgtaaccaatgtaaggccccaaaaccagagggattcctgcccccaccttttccacctcccggaggcgacaggggccgaggtggccctggtggcatgcggggtggtcggggaggtcttatggatcggggtggtcccggaggtatgtttcgcggtggacgaggaggcgaccggggtggatttcgtggtggaagaggtatggatagaggagggtttggtggagggagacgtgggggaccagggggaccacccggtcctcttatggaacagatggggggacgtcgaggaggacgcggtggaccgggtaagatggataaaggagagcacaggcaagagaggcgggatcgcccttactag

SEQ ID NO: 61915 - DNA, 1752 bp, Artificial Sequence
  derived and/or modified sequence
atggcttctaccgactactctacatatagccaggctgccgctcagcagggctactctgcgtataccgctcagcctactcagggctacgcccaaaccacccaagcctatggacagcagtcttatgggacgtacggacagcctaccgacgtttcctatacccaggcacagactaccgctacatatggacagaccgcttacgctacgagttacggtcagccacctactggatacaccactccaaccgccccacaggcctattcacagccagtacaggggtatggaaccggggcttacgacaccaccaccgccacagttaccactacacaggcgtcttacgccgctcagagtgcttatggtacacagcccgcttaccccgcttatggtcagcagccagctgcaaccgccccaacccgcccacaggatggaaacaagcccaccgagaccagccagccacagtcctcaaccgggggttataatcaacccagcctcggttacgggcaatctaattattcctacccacaggtaccaggctcttaccccatgcagcctgtgacggctcccccttcatacccaccaactagttattctagtacccagccgacgtcctatgaccagtccagctatagtcaacaaaatacgtacggacagccctctagctacggacaacagtctagctacggacagcagtccagctacggacagcagccgcctacatcttatccaccacagaccggttcttatagtcaggctccatctcagtacagccagcagtcttcgtcctacggtcagcagcgccctatggacgagggccctgatctggatctggggccacccgttgaccctgacgaagactctgacaatagtgctatatatgtgcaaggcctgaacgatagtgtgaccctcgacgatctagctgacttttttaagcagtgtggagtggtgaagatgaataaacggacaggccaaccaatgatccatatctatctagataaagagaccggaaaacctaaaggcgacgcaaccgtgagctacgaagatcctcctaccgctaaggccgctgtggagtggttcgatgggaaggattttcagggatctaagctcaaagtctctctggcaagaaagaagcccccaatgaatagcatgaggggaggtttgccaccgcgagaagggcgtggcatgcctcccccactgcggggagggccaggaggcccaggagggcctggcggtcccatggggaggatgggaggaagaggaggggaccgaggcggattcccaccacggggtcctaggggatcgaggggcaatccaagcggcggtggaaatgtgcagcaccgcgcaggtgattggcagtgtcctaatccaggctgcggcaaccaaaatttcgcctggcgcaccgaatgtaatcagtgtaaggccccaaaacccgagggctttctgcccccacccttccccccaccaggaggcgataggggcaggggcggaccgggaggcatgcgtgggggacggggaggtttaatggatagaggtggcccaggtggaatgtttaggggcggtcgagggggtgatcgcggaggatttcgcggtggtagggggatggaccggggaggattcggaggaggcaggcgcggtggcccagggggaccacccggacctctaatggagcagatgggtggacggagaggcggtagaggcggacctggaaagatggataagggagagcaccggcaggaaaggagagataggccatactag

SEQ ID NO: 61916 - DNA, 1971 bp, Artificial Sequence
  derived and/or modified sequence
atggctagtaccgattattccacctactcccaggctgccgcacagcagggctactcggcctacaccgcccagcccactcaagggtatgcacaaacaactcaggcttacggacagcagagttacggcacctacggtcaacctactgacgtgagctacacccaggcacagacaacagcgacatacggccagaccgcctatgctacatcatacggacaaccacctactgggtataccacaccaacagctccccaagcatactcccagcccgtgcagggttatggtactggagcctatgatacgactaccgccaccgtgacaaccacacaggcctcttacgccgcacagtcagcctacggtacgcagcccgcatatccagcatatggccagcagccggcagccacggcaccaacaaggccacaggacggtaataaaccaaccgagactagtcagccccagtcaagcacaggtggttataaccagccatctctcggctatggacagtccaactacagctacccccaggttcccggtagctaccctatgcaaccagtgacggcgccaccgagctaccctcccaccagctacagctcaacccagcccaccagctacgatcagagtagctactctcagcagaatacatacggccagccctcatcgtacggccagcagagttcatatggtcagcagtcctcctacgggcagcaaccacccacatcgtatcctccacaaacgggctcctatagccaggctccaagtcagtactcccagcagtcctcttcatatggtcagcagagtagctttcgacaggaccatccttcttcaatgggagtgtatggacaggagagcggaggcttcagtggaccaggagaaaaccgctccatgtccggccctgacaatcgtggccgtggacggggtgggttcgatcggggtggaatgtcaagaggaggacggggaggaggccgaggtggcatgggcagcgctggggagagagggggattcaacaagccaggcggacccatggacgaaggaccggatttggatctgggaccgcctgttgaccccgacgaggattccgacaactccgccatctacgtccaagggctgaatgacagcgtgaccctcgatgacttggcagacttctttaaacagtgtggcgtggtcaagatgaataagaggacaggacagccaatgatccacatctatctggataaggagacaggtaagcccaagggagacgctaccgtgagctacgaggaccctcctacggccaaggcggcagtggaatggtttgacggtaaagacttccagggatctaagcttaaggtaagcctcgccaggaaaaagccaccgatgaattctatgaggggcggacttccccctcgcgaaggcagaggaatgccgccaccgctgagggggggacccggtggccctggagggcctggcggacctatgggacggatggggggtagaggcggtgaccggggtggattccccccacgcggacccagggggtctcgcggtaatcccagcgggggaggaaacgtccagcatagggcaggcgactggcaatgtcccaaccccggttgcggaaatcagaacttcgcctggaggacagagtgcaaccagtgcaaggcgccaaagcctgagggcttcctgcctccaccttttccacccccagggggtgaccggggacgcggaggtccgggtggcatgagggggggtaggggcggattaatggacagaggcggtcctggaggcatgttccggggagggagaggcggtgaccggggtggattccgaggaggtagaggtatggatcggggaggcttcggcggtgggaggagaggtggacccggaggtcctcccggaccgcttatggagcaaatgggcggtcgacgcggagggcgtgggggtcccggtaaaatggacaagggagagcaccggcaagaaaggcgggatcggccttattag

SEQ ID NO: 61917 - DNA, 677 bp, Artificial Sequence
  derived and/or modified sequence
gcagcgtcctcactgtcccggctgccaggggctgcggcgacgcggccagtcagcagcgagttcaggtcgcgcagattttattgatgagctctgactttcagcactttccctaagtcaagaagagtctagcgtacccttcggctgcttcatttcagcctccctgcctcagctcttcagccctattccccctcgccctgtcctggggtgtgtacagcagcccaggccttccttctccttcccggctccgtggcccgaagccgccgagagagctcgggacagcgcaggaccaggcagccgctcgctctcctgtcaccttaactgcaggctccgaggggcgcctttggagtgtactgaggaatctgagaattgctctcacacaccaacccagcaacatccgtggagaaaactctcaccagcaactcctttaaaacaccgtcatttcaaaccattgtggtcttcaagcaacaacagcagcacaaaaaaccccaaccaaacaaaactcttgacagaagctgtgacaaccagaaaggatgcctcataaagggggaagactttaactaggggcgcgcagatgtgtgaggccttttattgtgagagtggacagacatccgagatttcagagccccatattcgagccccgtggaatcccgcggcccccagccagagccagcatgcag

SEQ ID NO: 61918 - protein, 354 aa, Artificial Sequence
  derived and/or modified sequence
MASTDYSTYSQAAAQQGYSAYTAQPTQGYAQTTQAYGQQSYGTYGQPTDVSYTQAQTTATYGQTAYATSYGQPPTGYTTPTAPQAYSQPVQGYGTGAYDTTTATVTTTQASYAAQSAYGTQPAYPAYGQQPAATAPTRPQDGNKPTETSQPQSSTGGYNQPSLGYGQSNYSYPQVPGSYPMQPVTAPPSYPPTSYSSTQPTSYDQSSYSQQNTYGQPSSYGQQSSYGQQSSYGQQPPTSYPPQTGSYSQAPSQYSQQSSSYGQQSSFRQDHPSSMGVYGQESGGFSGPGENRSMSGPDNRGRGRGGFDRGGMSRGGRGGGRGGMGLQSESLVYTSILKKYPYSVLSRQHNEKWD

SEQ ID NO: 61919 - DNA, 543 bp, Artificial Sequence
  derived and/or modified sequence
atggccagcaccgactacagcacctacagccaggccgccgcccagcagggctacagcgcctacaccgcccagcccacccagggctacgcccagaccacccaggccagctacgccgcccagagcgcctacggcacccagcccgcctaccccgcctacggccagcagcccgccgccaccgcccccaccagaccccaggacggcaacaagcccaccgagaccagccagccccagagcagcaccggcggctacaaccagcccagcctgggctacggccagagcaactacagctacccccaggtgcccggcagctaccccatgcagcccgtgaccgccccccccagctacccccccaccagctacagcagcacccagcccaccagctacgaccagagcagctacagccagcagaacacctacggccagcccagcagctacggccagcagagcagctacggccagcagagcagctacggccagcagccccccaccagctaccccccccagaccggcagctacagccaggcccccagccagtacagctag

SEQ ID NO: 61920 - DNA, 1065 bp, Artificial Sequence
  derived and/or modified sequence
atggccagcaccgactacagcacctacagccaggccgccgcccagcagggctacagcgcctacaccgcccagcccacccagggctacgcccagaccacccaggcctacggccagcagagctacggcacctacggccagcccaccgacgtgagctacacccaggcccagaccaccgccacctacggccagaccgcctacgccaccagctacggccagccccccaccggctacaccacccccaccgccccccaggcctacagccagcccgtgcagggctacggcaccggcgcctacgacaccaccaccgccaccgtgaccaccacccaggccagctacgccgcccagagcgcctacggcacccagcccgcctaccccgcctacggccagcagcccgccgccaccgcccccaccagaccccaggacggcaacaagcccaccgagaccagccagccccagagcagcaccggcggctacaaccagcccagcctgggctacggccagagcaactacagctacccccaggtgcccggcagctaccccatgcagcccgtgaccgccccccccagctacccccccaccagctacagcagcacccagcccaccagctacgaccagagcagctacagccagcagaacacctacggccagcccagcagctacggccagcagagcagctacggccagcagagcagctacggccagcagccccccaccagctaccccccccagaccggcagctacagccaggcccccagccagtacagccagcagagcagcagctacggccagcagagcagcttcagacaggaccaccccagcagcatgggcgtgtacggccaggagagcggcggcttcagcggccccggcgagaacagaagcatgagcggccccgacaacagaggcagaggcagaggcggcttcgacagaggcggcatgagcagaggcggcagaggcggcggcagaggcggcatgggcctgcagagcgagagcctggtgtacaccagcatcctgaagaagtacccctacagcgtgctgagcagacagcacaacgagaagtgggactag

SEQ ID NO: 61921 - DNA, 543 bp, Artificial Sequence
  derived and/or modified sequence
atggcaagcacagattattctacctactcacaagccgccgcccagcagggctactcagcatacaccgcccaacccacccagggttatgcgcagacaactcaagctagttatgctgctcaaagcgcctatgggacccagcctgcctaccccgcatacggccaacagcccgcagcaaccgcaccaacgagaccccaggacggaaataaaccaaccgaaacgtctcagccccagagctcaaccggaggctataatcaacccagcctgggatacggccagtctaactattcttaccctcaggtgcccgggtcttatcccatgcagcccgtgaccgccccaccaagctaccccccgacatcgtacagcagtacccagcccacttcatatgatcaatcttcgtactcgcaacagaacacatacggtcagccctcctcctatggacagcagtcttcttatggccagcagtcctcgtacgggcagcagccccccaccagctacccaccacagactgggtcatatagccaagctccgagccagtacagctag

SEQ ID NO: 61922 - DNA, 1065 bp, Artificial Sequence
  derived and/or modified sequence
atggcctcgacagactactctacgtacagtcaagctgctgcccagcagggctacagcgcctacactgcccagccgactcagggctacgcgcagactactcaagcttatggccaacaaagttatggaacatacggacagccaaccgacgtctcctacacccaagcacagactacagccacatacggacagacagcctacgcaacatcttatggacagccaccaacggggtatacgacccccacagccccccaagcatacagccagccagtacagggctacggcacgggggcttatgatacgacgacggccaccgtcaccaccacccaagcgtcttatgcagcccagagcgcttatggcactcagccggcttaccccgcttacgggcagcaacccgcggctaccgctcccacacgtcctcaggacggaaataagccaacggagacatcccagccgcagagctctaccggagggtacaaccaaccatccctgggctatggccagtcaaattactcatacccacaggttcccggctcgtacccaatgcaacctgtcactgccccaccctcttatccacctacaagctactccagtactcagcctaccagctatgatcagtcctcatactcccaacaaaatacgtacggccaaccatcctcatacggacagcagtccagttacggacagcaatccagctatggacagcaacccccaacaagctatcctccacagacaggttcatatagtcaggccccctcgcagtacagccaacagtcatcctcttacgggcagcagtcttccttcaggcaagatcatcccagttctatgggggtgtacggacaggagtctggcggtttcagcgggccgggtgagaaccggtcaatgagcgggcccgacaaccgcgggcggggacggggcggattcgaccgggggggtatgagcagaggcggacgtggcggagggcgcggcggcatgggcctgcagtccgaatccctcgtgtacacatcaatcctgaaaaaatacccctacagcgtgctttcccgccaacataatgagaaatgggattag

SEQ ID NO: 61923 - DNA, 587 bp, Artificial Sequence
  derived and/or modified sequence
agcgagagggagacggacgttgagagaacgaggaggaaggagagaaaatggcgtccacggattacagtacctatagccaagctgcagcgcagcagggctacagtgcttacaccgcccagcccactcaaggatatgcacagaccacccaggcctcctatgcagctcagtctgcatatggcactcagcctgcttatccagcctatgggcagcagccagcagccactgcacctacaagaccgcaggatggaaacaagcccactgagactagtcaacctcaatctagcacagggggttacaaccagcccagcctaggatatggacagagtaactacagttatccccaggtacctgggagctaccccatgcagccagtcactgcacctccatcctaccctcctaccagctattcctctacacagccgactagttatgatcagagcagttactctcagcagaacacctatgggcaaccgagcagctatggacagcagagtagctatggtcaacaaagcagctatgggcagcagcctcccactagttacccaccccaaactggatcctacagccaagctccaagtcaatatagc

SEQ ID NO: 61924 - DNA, 1265 bp, Artificial Sequence
  derived and/or modified sequence
cgaggaggaaggagagaaaatggcgtccacggattacagtacctatagccaagctgcagcgcagcagggctacagtgcttacaccgcccagcccactcaaggatatgcacagaccacccaggcatatgggcaacaaagctatggaacctatggacagcccactgatgtcagctatacccaggctcagaccactgcaacctatgggcagaccgcctatgcaacttcttatggacagcctcccactggttatactactccaactgccccccaggcatacagccagcctgtccaggggtatggcactggtgcttatgataccaccactgctacagtcaccaccacccaggcctcctatgcagctcagtctgcatatggcactcagcctgcttatccagcctatgggcagcagccagcagccactgcacctacaagaccgcaggatggaaacaagcccactgagactagtcaacctcaatctagcacagggggttacaaccagcccagcctaggatatggacagagtaactacagttatccccaggtacctgggagctaccccatgcagccagtcactgcacctccatcctaccctcctaccagctattcctctacacagccgactagttatgatcagagcagttactctcagcagaacacctatgggcaaccgagcagctatggacagcagagtagctatggtcaacaaagcagctatgggcagcagcctcccactagttacccaccccaaactggatcctacagccaagctccaagtcaatatagccaacagagcagcagctacgggcagcagagttcattccgacaggaccaccccagtagcatgggtgtttatgggcaggagtctggaggattttccggaccaggagagaaccggagcatgagtggccctgataaccggggcaggggaagagggggatttgatcgtggaggcatgagcagaggtgggcggggaggaggacgcggtggaatggggttacaaagtgagagccttgtatacacttcaatacttaaaaagtacccgtactcagtactcagccggcagcataatgaaaagtgggactagacacggtgtccatatggagaggaaaaatatacatagaatatttttaacaaaatgtattcattgtataaatggaatccttctgtaactttggtaactgcatacttgttgtttggtaatgaaccagaggaggtataatactctagaattgtgtaacattaaagtgtaaacttttgtgtttaaa

SEQ ID NO: 61925 - DNA, 543 bp, Artificial Sequence
  derived and/or modified sequence
atggccagcacagactacagcacctacagccaggccgccgcccagcagggctacagcgcctacacagcccagcccacccagggctacgcccagaccacccaggccagctatgctgcccagagcgcctacggcacccagcctgcctacccagcctacggccagcagcctgctgccacagcccccacccggccccaggacggcaacaagcccacagagaccagccagccccagagcagcactggaggctacaaccagcccagcctgggctacggccagagcaactacagctacccccaggtgcccggcagctaccccatgcagcctgtgacagccccacccagctacccacccaccagctacagcagcacccagcccaccagctatgaccagagcagctacagccagcagaacacctacggccagcccagcagctatggccagcagagcagctatggccagcagagcagctatggccagcagccccccaccagctacccaccccagacaggcagctacagccaggcccccagccagtacagctag

SEQ ID NO: 61926 - DNA, 1065 bp, Artificial Sequence
  derived and/or modified sequence
atggccagcacagactacagcacctacagccaggccgccgcccagcagggctacagcgcctacacagcccagcccacccagggctacgcccagaccacccaggcctacggccagcagagctatggcacctacggccagcccacagatgtgtcctacacccaggcccagaccacagccacctacggccagacagcctatgccaccagctatggccagcccccaacaggctacaccacccccacagccccccaggcctacagccagcctgtgcagggctatggaactggagcctatgacaccaccacagccaccgtgaccaccacccaggccagctatgctgcccagagcgcctacggcacccagcctgcctacccagcctacggccagcagcctgctgccacagcccccacccggccccaggacggcaacaagcccacagagaccagccagccccagagcagcactggaggctacaaccagcccagcctgggctacggccagagcaactacagctacccccaggtgcccggcagctaccccatgcagcctgtgacagcccctccttcctacccacccaccagctacagcagcacccagcccaccagctatgaccagagcagctacagccagcagaacacctacggccagcccagcagctatggccagcagagcagctatggccagcagagcagctatggccagcagccccccaccagctacccaccccagacaggcagctacagccaggcccccagccagtacagccagcagagcagcagctatggccagcagagcagcttccggcaggaccaccccagctccatgggcgtgtatggccaggagagcggcggcttcagcggccctggagagaacagatccatgagcggccctgacaacagaggccggggccggggcggctttgaccggggcggcatgagcagaggaggccggggcggcggccggggcggcatgggcctgcagagcgagagcctggtgtacaccagcatcctgaagaagtacccctacagcgtgctgagccggcagcacaatgagaagtgggactag

SEQ ID NO: 61927 - DNA, 543 bp, Artificial Sequence
  derived and/or modified sequence
atggccagcaccgactacagcacctacagccaggccgccgcccagcaagggtactctgcatacaccgcccaaccgacccaaggttatgctcagacaacccaagccagctacgcagctcagagcgcatatggaacgcagccagcctacccggcctatgggcagcagcccgcagcgactgctcctacccggccacaggacgggaacaaacctactgagacatcacagccccaatcaagcactgggggttataatcagccgtccctcggctacggacagtctaactacagctacccacaggtaccagggagctatcccatgcagccagttactgctccgccaagttacccccccacatcttatagctctactcaaccgacatcttacgaccagtcatcatacagccaacagaatacatatggccaaccatcttcctacgggcaacagagcagctacgggcaacagtcctcttatggacagcaaccaccaacttcttatccgccccagacaggcagctattcacaggctcccagccagtactcttag

SEQ ID NO: 61928 - DNA, 1065 bp, Artificial Sequence
  derived and/or modified sequence
atggccagcaccgactacagcacctacagccaggccgccgcccagcaaggttattcggcatacacagcccagcccacccagggctatgcgcaaaccacccaagcatacgggcagcagtcctatggcacctacggtcagccaacagatgtatcctacactcaggctcagacaaccgcaacgtatgggcagacagcctacgcaactagctatggccagcctcccacaggatacactaccccgactgctccccaggcctactcccagcctgtgcagggttatggaactggagcttacgatacaaccacagccaccgtcaccactacccaggcctcatatgccgcccagtccgcatacggtacccagccggcgtatccggcctatgggcagcaacctgctgcaacagctccgaccagacctcaggacggaaacaagccgacagagacgagccagcctcaatcaagtacgggaggctataaccagccctccctgggctatgggcagtccaattactcataccctcaggtccccgggagttatccaatgcagcctgttacagccccccccagctatcccccaaccagttacagtagtactcaacccacttcctacgatcagtcgtcttactcccagcagaacacttacggccagccatcttcttacggacagcaaagctcttatggccaacagtcatcatacggccagcagccccctacctcctacccccctcagaccggcagctatagtcaggctccatcccagtactcccaacagtctagctcttacgggcagcaatcctcctttcggcaggatcatccctcgtccatgggagtgtacggacaggaatccggaggcttcagcggtccaggcgagaatcgcagcatgagcggcccggacaatcggggcaggggaagaggtggcttcgaccggggcggcatgtctagaggtggccgcggtggaggacgcggaggcatgggcctgcagagtgaatcacttgtgtacacttctattctgaagaagtatccttacagcgtgctctctagacagcataatgagaaatgggactag

SEQ ID NO: 61929 - DNA, 543 bp, Artificial Sequence
  derived and/or modified sequence
atggcctctaccgattattcaacttattctcaagcggcagcccagcagggatactccgcctacactgcccagcctacccaaggatatgctcagacgacccaggctagctatgctgcacaatccgcttacggaacccagcccgcataccctgcttacggacaacagcctgctgccactgcacccacccgaccacaggacggcaacaaacccactgagaccagccagcctcagtccagtactggcggatataatcagccctccctcggttacggacagtcaaactactcatacccacaggtcccgggaagttaccccatgcagcctgttacagcccctccttcatatccgcctacaagctactcttctacgcagccgactagctatgatcagagctcctattctcaacagaatacttacgggcagccatcgtcttacggacagcaatcatcttacggtcagcaatcctcttatggacagcagccacccacatcctacccgccacagaccggatcttattctcaggcccctagtcagtacagctag

SEQ ID NO: 61930 - DNA, 1065 bp, Artificial Sequence
  derived and/or modified sequence
atggctagcaccgattatagcacctactcccaggccgcagcacagcagggctacagcgcctacacggctcagcctactcagggctatgcacagacaactcaggcctatgggcagcagtcgtatggcacatatggacagccaaccgacgtgtcctacacacaagctcagaccacagccacttacggacaaacagcgtatgcaacatcctatggtcagcctccgactgggtataccactcctacagcgcctcaggcctacagtcaacccgtccagggttacggtacaggagcttacgatacaacaaccgctactgtgactaccactcaggcaagttacgctgcgcaatcggcatatggaacccagcctgcctaccccgcttatggccaacagcccgctgccacagccccaactagacctcaggacggaaacaagccaacagagacctcccagccccagtcctcaacgggaggatacaaccaaccttccctgggctatggtcaaagcaattatagttatccacaggttcccggttcctatccgatgcaaccagtgaccgccccacccagttacccacccacaagctattcttccacccagccaacgtcttacgatcaaagcagctatagccagcagaacacatatggacagcccagctcttacgggcaacagtctagctatgggcaacagtcctcctatgggcagcagccacctacttcttacccccctcagactggctcatatagccaagcacctagtcaatattcccaacaatcgtcctcatatgggcagcaaagctcctttagacaggatcatccttcttcgatgggcgtttatgggcaagagtccggaggcttctcgggccctggggaaaataggtctatgagcggtcccgataatcggggaagaggacgagggggttttgacagaggcggaatgtcacggggagggcgagggggtggaaggggaggcatgggcctgcagtccgagagcctcgtctacacaagcatcttaaagaaatatccctattcagtcctgtcaaggcagcacaatgaaaaatgggactag

SEQ ID NO: 61931 - protein, 719 aa, Artificial Sequence
  derived and/or modified sequence
MSSARTPLPTLNERDTEQPTLGHLDSKPSSKSNMIRGRNSATSADEQPHIGNYRLLKTIGKGNFAKVKLARHILTGKEVAVKIIDKTQLNSSSLQKLFREVRIMKVLNHPNIVKLFEVIETEKTLYLVMEYASGGEVFDYLVAHGRMKEKEARAKFRQIVSAVQYCHQKFIVHRDLKAENLLLDADMNIKIADFGFSNEFTFGNKLDTFCGSPPYAAPELFQGKKYDGPEVDVWSLGVILYTLVSGSLPFDGQNLKELRERVLRGKYRIPFYMSTDCENLLKKFLILNPSKRGTLEQIMKDRWMNVGHEDDELKPYVEPLPDYKDPRRTELMVSMGYTREEIQDSLVGQRYNEVMATYLLLGYKSSELEGDTITLKPRPSADLTNSSAPSPSHKVQRSVSANPKQRRFSDQAAGPAIPTSNSYSKKTQSNNAENKRPEEDRESGRKASSTAKVPASPLPGLERKKTTPTPSTNSVLSTSTNRSRNSPLLERASLGQASIQNGKDSTAPQRVPVASPSAHNISSSGGAPDRTNFPRGVSSRSTFHAGQLRQVRDQQNLPYGVTPASPSGHSQGRRGASGSIFSKFTSKFVRRNLSFRFARRPHVVGSGGNDKEKEEFREAKPRSLRFTWSMKTTSSMEPNEMMREIRKVLDANSCQSELHEKYMLLCMHGTPGHEDFVQWEMEVCKLPRLSLNGVRFKRISGTSMAFKNIASKIANELKL

SEQ ID NO: 61932 - DNA, 2160 bp, Artificial Sequence
  derived and/or modified sequence
atgtctagcgcccgaacaccattgcctactctcaacgaaagggacactgagcagccaaccctgggacacctcgactccaagccatccagcaagagtaatatgattagaggcaggaacagtgctactagtgccgacgagcagcctcatatcgggaactatcgcttattgaagacgatcggtaaagggaatttcgccaaagtgaagctagctcgtcacatactgaccggcaaagaggtggccgtcaaaataatcgacaagactcagctaaacagttcatctttacagaagttattccgcgaggtgcgtatcatgaaggtccttaatcatccaaatattgtgaaactctttgaagtgattgaaactgagaagactttatatctggtgatggagtacgctagcgggggagaagtctttgattacctggtggcccatggcagaatgaaagagaaggaggcgcgcgctaagtttcgtcagatcgtttccgccgtccagtactgtcatcagaagttcatcgtccatagggacctcaaggcagagaacctgcttctggacgccgacatgaacatcaagatcgcagacttcggtttctccaatgagttcaccttcgggaacaaacttgacactttctgcggcagcccaccatacgccgcccctgagctgttccaggggaaaaagtatgacggtccagaggtcgacgtatggagtctgggcgtcatcctgtataccttagtgtcggggagcctgcctttcgatggtcagaacctgaaggagttaagagagcgggtattacgcggcaagtacaggatccctttttacatgagcaccgactgtgaaaacctcctgaagaaattcctcatcctcaatccctcgaaacgtggtaccttggaacagattatgaaggatcgctggatgaatgtgggacacgaggacgatgaactgaagccctatgtcgagccgctgcctgattataaagaccccagaaggaccgagctgatggtgtctatgggatatactcgggaggagattcaggacagcttggttggccagagatacaacgaggtgatggccacatatctcctgctggggtacaagtcatctgagctggaaggcgacactatcaccctcaaaccccggccgagcgccgacctcacaaacagcagcgccccttctccctcccataaggtgcagcgcagtgtgagcgcgaaccccaaacagcggagattctctgaccaggctgctggacccgccatcccgaccagcaattcttattccaaaaagactcaaagcaataatgctgagaacaaacgcccagaggaggatagagaatccggacgcaaggcaagctctaccgcgaaagtacctgcttctcccttacccggactggagcgcaaaaaaacaactcccaccccctcaacaaacagcgttcttagtacgagcacaaatagatccaggaattcccccctcttagagcgggcctccctgggccaggctagcatacagaacggaaaagacagtacagctccccaacgggtccccgtggctagcccatccgcacataatatctcctcgtcggggggtgctcctgaccgcactaattttccgcggggtgtatctagcagatctacttttcacgctggacaactacggcaggtccgagaccaacaaaacctgccatatggcgtcactccagcttctccatccggtcactctcagggccgccgaggagcctcaggatccattttttcaaaattcacctccaaatttgtgagacgaaatctgagcttcagattcgcacgcaggccacatgtggttggctctgggggcaacgataaagagaaagaggagttcagagaggctaaacccagatcactacggttcacttggtccatgaagactacctctagtatggaacccaatgaaatgatgagggagatccggaaggtgctcgatgcgaactcatgtcagtcagagctccacgaaaagtacatgctgctttgcatgcacggaacaccaggacacgaagacttcgtccaatgggagatggaggtctgtaagctcccacgactgagcctgaacggagtccgatttaaacgcatatcaggcacctcgatggcatttaaaaacattgcttctaagatagccaacgagctcaaactttag

SEQ ID NO: 61933 - DNA, 2160 bp, Artificial Sequence
  derived and/or modified sequence
atgagcagcgcccggacccccctgcccaccctgaatgaaagagacacagagcagcccaccctgggccacctggacagcaagcccagcagcaagagcaacatgatccggggcaggaacagcgccaccagcgcagatgagcagccccacatcggcaactaccgcctgctgaagaccatcggcaaaggaaactttgccaaggtgaagctggcccggcacatcctgaccgggaaggaggtggccgtgaagatcatcgacaagacccagctgaacagcagcagcctgcagaagctgttccgggaggtgcgcatcatgaaggtgctgaaccaccccaacatcgtgaagctgtttgaggtgattgaaacagagaagaccctgtacctggtgatggagtatgccagcggcggggaggtgtttgactacctggtggcccacggccgcatgaaggagaaggaggcccgggccaagttccggcagatcgtgtctgctgtgcagtactgccaccagaagttcatcgtgcaccgggacctgaaggccgagaacctgctgctggatgctgacatgaacatcaagattgctgactttggcttcagcaatgagttcaccttcggcaacaagctggacaccttctgtggcagccccccctatgctgcccctgagctgttccagggcaagaagtatgatggccctgaggtggatgtgtggagcctgggcgtcatcctgtacaccctggtgtctggcagcctgccctttgatggccagaacctgaaggagctgcgggagcgggtgctgcggggcaagtaccgcatccccttctacatgagcacagactgtgagaacctgctgaagaagttcctgatcctgaaccccagcaagaggggcaccctggagcagatcatgaaggaccgctggatgaatgtgggccatgaagatgatgagctgaagccctacgtggagcccctgcctgactacaaggaccccaggagaacagagctgatggtgtccatgggctacacccgggaggagatccaggacagcctggtgggccagcgctacaatgaggtgatggccacctacctgctgctgggctacaagagcagcgagctggagggggacaccatcaccctgaagccccggcccagcgctgacctgaccaacagcagcgcccccagccccagccacaaggtgcagaggtctgtgtctgccaaccccaagcagaggcgcttcagtgaccaggccgccggccctgccatccccaccagcaacagctacagcaagaagacccagagcaacaatgctgagaacaagaggccagaagaagatcgggagagcggcaggaaggccagcagcacagccaaggtgcctgccagccccctgcccggcctggagaggaagaagaccacccccacccccagcaccaacagcgtgctgagcaccagcaccaacagaagcaggaacagccccctgctggagcgggccagcctgggccaggccagcatccagaatggcaaggacagcacagccccccagagggtgcctgtggccagccccagcgcccacaacatcagcagcagcggcggggccccagacaggaccaacttcccccggggcgtgagcagccgcagcaccttccacgccggccagctgcggcaggtgcgggaccagcagaacctgccctatggagtgaccccagccagccccagcggccacagccagggcagaagaggagccagcggcagcatcttcagcaagttcaccagcaagtttgtgagaagaaacctgtccttccgctttgcccggcggccccacgtggtgggcagcggcggcaatgacaaggagaaggaggagttccgggaggccaagcccaggagcctgcgcttcacctggagcatgaagaccaccagctccatggagcccaatgagatgatgagggagatcaggaaggtgctggatgccaacagctgccagagcgagctgcacgagaagtacatgctgctgtgcatgcacggcaccccaggccacgaggactttgtgcagtgggagatggaggtgtgcaagctgccccggctgagcctgaatggagtgcgcttcaagaggatcagcggcacctccatggccttcaagaacatcgccagcaagatcgccaatgagctgaagctgtag

SEQ ID NO: 61934 - DNA, 3004 bp, Artificial Sequence
  derived and/or modified sequence
gaattcacccgtagtctgtggccgggaggagaaggcgcgccccacctcccgtttctagccgcttcggatgtttccggctgctgccggcgaaaagagccgagggccggcggtggtggcggccatgttgggagcagcaggtccggcggcggctgcctgtgtgccgggcgcggagcagtgccgctgagggcaggggaggagcgaggcaggcggccggctgcggcggcagagagtaggcggagcggcgcggcccggccgaaaggcggcacagcccagccgggggtcgggggggtgcggtccggagccgctcggagccggcgcggcctagcccgagcggcgcatccccgggctggcgtgagcggctgcccggcctccccgcacccccggccggggcccatgcggcgggtgctcctgctgtgagaagccccgcccggccgggctccgcgccttcccttccctcccttcctccaagcttctcggttccctcccccgagataccggcgccatgtccagcgctcggacccccctacccacgctgaacgagagggacacggagcagcccaccttgggacaccttgactccaagcccagcagtaagtccaacatgattcggggccgcaactcagccacctctgctgatgagcagccccacattggaaactaccggctcctcaagaccattggcaagggtaattttgccaaggtgaagttggcccgacacatcctgactgggaaagaggtagctgtgaagatcattgacaagactcaactgaactcctccagcctccagaaactattccgcgaagtaagaataatgaaggttttgaatcatcccaacatagttaaattatttgaagtgattgagactgagaaaacgctctaccttgtcatggagtacgctagtggcggagaggtatttgattacctagtggctcatggcaggatgaaagaaaaagaggctcgagccaaattccgccagatagtgtctgctgtgcagtactgtcaccagaagtttattgtccatagagacttaaaggcagaaaacctgctcttggatgctgatatgaacatcaagattgcagactttggcttcagcaatgaattcacctttgggaacaagctggacaccttctgtggcagtcccccttatgctgccccagaactcttccagggcaaaaaatatgatggacccgaggtggatgtgtggagcctaggagttatcctctatacactggtcagcggatccctgccttttgatggacagaacctcaaggagctgcgggaacgggtactgaggggaaaataccgtattccattctacatgtccacggactgtgaaaacctgcttaagaaatttctcattcttaatcccagcaagagaggcactttagagcaaatcatgaaagatcgatggatgaatgtgggtcacgaagatgatgaactaaagccttacgtggagccactccctgactacaaggacccccggcggacagagctgatggtgtccatgggttatacacgggaagagatccaggactcgctggtgggccagagatacaacgaggtgatggccacctatctgctcctgggctacaagagctccgagctggaaggcgacaccatcaccctgaaaccccggccttcagctgatctgaccaatagcagcgccccatccccatcccacaaggtacagcgcagcgtgtcggccaatcccaagcagcggcgcttcagcgaccaggcagctggtcctgccattcccacctctaattcttactctaagaagactcagagtaacaacgcagaaaataagcggcctgaggaggaccgggagtcagggcggaaagccagcagcacagccaaggtgcctgccagccccctgcccggtctggagaggaagaagaccaccccaaccccctccacgaacagcgtcctctccaccagcacaaatcgaagcaggaattccccacttttggagcgggccagcctcggccaggcctccatccagaatggcaaagacagcacagccccccagcgtgtccctgttgcctccccatccgcccacaacatcagcagcagtggtggagccccagaccgaactaacttcccccggggtgtgtccagccgaagcaccttccatgctgggcagctccgacaggtgcgggaccagcagaatttgccctacggtgtgaccccagcctctccctctggccacagccagggccggcggggggcctctgggagcatcttcagcaagttcacctccaagtttgtacgcagaaatctgtctttcaggtttgccagaagacctcacgtggtgggcagtggcggcaacgacaaagaaaaggaagaatttcgggaggccaagccccgctccctccgcttcacgtggagtatgaagaccacgagctccatggagcccaacgagatgatgcgggagatccgcaaggtgctggacgcgaacagctgccagagcgagctgcatgagaagtacatgctgctgtgcatgcacggcacgccgggccacgaggacttcgtgcagtgggagatggaggtgtgcaaactgccgcggctctctctcaacggggttcgatttaagcggatatcgggcacctccatggccttcaaaaacattgcctccaaaatagccaacgagctgaagctttaacaggctgccaggagcgggggcggcgggggcgggccagctggacgggctgccggccgctgcgccgccccacctgggcgagactgcagcgatggattggtgtgtctcccctgctggcacttctcccctccctggcccttctcagttttctcttacatgtttgtggggggtgggagattgttctccagcaccccacattcacccctgcccagagattcccccttctcctctcccctactggaggcaaaggaaggggagggtggatgggggggcagggctccccctcggtactgcggttgcacagagtatttcgcctaaaccaagaaattttttattaccaaaaag

SEQ ID NO: 61935 - DNA, 2160 bp, Artificial Sequence
  derived and/or modified sequence
atgagcagcgcccggacccccctgcccaccctgaacgagcgggacaccgagcagcccaccctgggtcatctggatagcaaaccttcgagtaagagtaacatgattaggggcaggaactccgctacctctgcagacgaacagccgcacatcgggaactacaggctgctgaagacaatagggaagggcaatttcgctaaggttaaactagcccgccacatcctcaccgggaaggaagtggccgtgaaaataatcgataagactcaactgaattcaagctcgctgcagaagctgttccgtgaagttcgaataatgaaggtcctgaaccaccccaacattgttaagctcttcgaagtgatagaaacagaaaaaaccctgtatctcgtgatggaatatgcctctggaggagaggtgttcgactacttagtggcccacgggagaatgaaggagaaagaagctcgggctaagttcaggcagatcgtatcagcagtccaatactgtcaccagaagtttattgtccaccgagatctgaaggctgagaaccttctactcgatgccgatatgaacattaaaatcgcagacttcggctttagcaatgagttcactttcggtaacaaactcgacaccttttgtgggagtcccccgtacgccgccccagagcttttccaaggcaaaaagtacgatggcccggaggtagacgtctggagtctcggggtgattctatatacgctggtgagtgggtctctcccttttgacggccagaacctgaaggaactgcgtgagcgggtgctccgaggcaaatacagaatcccattttacatgtctaccgattgtgagaatctgctgaagaagttcctcatcttgaacccgtcgaagagagggaccctcgagcagattatgaaagatcggtggatgaacgtgggccacgaagacgacgagcttaaaccctacgtggagccactccctgattacaaggacccgaggagaacagagctgatggtgtcaatggggtatactcgcgaggaaattcaggattccctggtgggtcaacgctacaatgaggtaatggcaacctatcttctgctgggttacaagtcctcagaactagagggggatacaatcactctcaagccccgtccaagtgcggacttgactaattcgtccgccccgtctccatctcacaaggttcagcgctccgtgtccgccaatcctaagcagcggcggttttccgaccaggccgccggacccgccatcccaaccagtaattcatactcaaagaaaacccagtctaacaacgcagagaacaaacgaccagaagaggaccgggagtccgggcgtaaagcctcaagtacggccaaagtccctgcctcccctctgccggggctggagaggaagaaaacaacccctacccctagtacaaatagtgtcttaagcacatctacaaaccgatcacggaactcacctctgttggagagagcaagcctcggacaggccagtatacagaatggaaaggacagtactgcgccgcagcgggtgcctgtggcttcacctagtgctcacaatatttcctccagcggcggagcacctgatagaaccaactttcctcgcggagtttctagccgcagtacgttccacgcaggacagctcagacaggttcgggatcagcagaatttgccgtatggagttacccccgcttctcctagtggtcactctcagggaaggaggggagctagtggcagcatcttctctaaattcacatcaaaatttgttagacggaatctgagttttaggtttgccagacgcccccacgtagtcgggtctggcggcaacgacaaagaaaaagaagagttcagagaagcaaagccccgcagcctccgctttacttggagcatgaaaaccacaagtagcatggagcctaacgagatgatgcgagagatccgcaaggtattagatgcaaacagttgtcaatcggaattgcacgaaaagtatatgcttctgtgtatgcacggtaccccaggccatgaggattttgtacagtgggaaatggaggtgtgcaagttgcccaggttatcattaaatggcgttcgctttaagcgcattagcggtactagcatggcatttaaaaacatagcaagcaaaatcgcaaacgagctcaaattgtag

SEQ ID NO: 61936 - DNA, 2160 bp, Artificial Sequence
  derived and/or modified sequence
atgtccagtgctcgcacaccactgcccacactcaatgaacgggataccgaacagccaaccctgggtcacctggacagtaaaccctcctctaagtccaacatgatcagaggacgcaatagcgctacgtccgcagatgaacagccccacatcggcaactaccggctgctgaagacgatagggaagggcaacttcgccaaggtgaaactggcccgtcacatacttaccggcaaagaggtggctgtcaagatcattgataaaacccaactcaactcatcttcgcttcagaagctctttagagaagtgcgaatcatgaaggtcctgaaccaccctaatatagtgaagctgttcgaagtgatcgaaacagagaagaccctctacctcgtgatggaatatgctagcggaggcgaggtcttcgattacctggttgcccacggcaggatgaaagaaaaagaggctcgtgcgaaattcaggcagatcgtttccgctgttcagtattgtcaccagaagtttatcgtgcaccgtgacctcaaagcagaaaacctcttactcgatgccgatatgaacataaagattgccgattttggattttcaaatgaatttactttcgggaataaattggatacattctgcggaagccctccttacgctgctcccgaactgttccaggggaaaaagtatgacggaccagaggtggacgtatggagcttaggagtcatcttatataccctggtgtcagggagcctccccttcgatggacagaacctgaaagagctgagagaacgggtgctgcggggaaagtatcgtatccccttttacatgtcaaccgattgcgaaaacctgttgaagaagtttctgatactgaacccgagcaagcggggaaccttagaacaaattatgaaagaccggtggatgaatgtgggtcatgaggacgacgaactgaagccctacgttgagcccctgccggactataaagatccaaggcgaaccgagcttatggtctctatgggctatacccgggaggaaatccaagattcgctggtcggccagaggtacaacgaagtgatggctacctatctgcttctcggttacaagtctagcgaactggagggggataccattacactgaaacccaggcctagtgctgaccttaccaactctagtgccccaagtccgagccacaaagtacagagatccgtgtccgccaacccgaaacagcgacgcttctctgatcaggccgctggacctgccatccctacaagtaacagctactcgaaaaagacgcaatcgaataatgccgagaataagaggccagaagaggatagagagtcagggagaaaggcttcatctacagcaaaagtgcctgctagtcctctcccagggttagaaaggaagaagacaacacccacgccgtctacaaactcggtgctttcgacatccacaaatcgcagccgcaacagccctttgctcgagcgcgcatccttaggccaggctagcatccagaatggtaaggattctaccgcccctcaaagagtgcccgtggcttcgccttccgcacataatataagctcgtcagggggagccccagacagaacaaacttcccgagaggagtgagcagccggtcgacttttcacgccggtcagctgcggcaggtgcgggaccagcagaatctgccgtatggtgtgacccctgcttccccttccggccactcacaaggacggagaggagcgtcaggatctatttttagtaagtttacctccaaatttgtgcgccgaaacttgagctttagatttgccagacgtccacacgtcgtgggaagtgggggtaacgataaagagaaggaggaattcagagaggccaagccaagaagcctgaggttcacctggtctatgaaaactacctcatcgatggaaccaaatgaaatgatgagggaaatacgcaaggtcctggatgcaaattcatgccagtctgagcttcacgagaagtacatgttactgtgcatgcatggtacaccaggccatgaggattttgttcaatgggaaatggaagtgtgtaaactgccacgcctttccctgaacggggtgagatttaagaggataagcggcacgtccatggcctttaaaaacatcgccagcaagatagctaacgagctcaagctgtag

SEQ ID NO: 61937 - DNA, 2160 bp, Artificial Sequence
  derived and/or modified sequence
atgagcagcgccagaacccccctgcccaccctgaacgagagagacaccgagcagcccaccctgggccacctggacagcaagcccagcagcaagagcaacatgatcagaggcagaaacagcgccaccagcgccgacgagcagccccacatcggcaactacagactgctgaagaccatcggcaagggcaacttcgccaaggtgaagctggccagacacatcctgaccggcaaggaggtggccgtgaagatcatcgacaagacccagctgaacagcagcagcctgcagaagctgttcagagaggtgagaatcatgaaggtgctgaaccaccccaacatcgtgaagctgttcgaggtgatcgagaccgagaagaccctgtacctggtgatggagtacgccagcggcggcgaggtgttcgactacctggtggcccacggcagaatgaaggagaaggaggccagagccaagttcagacagatcgtgagcgccgtgcagtactgccaccagaagttcatcgtgcacagagacctgaaggccgagaacctgctgctggacgccgacatgaacatcaagatcgccgacttcggcttcagcaacgagttcaccttcggcaacaagctggacaccttctgcggcagccccccctacgccgcccccgagctgttccagggcaagaagtacgacggccccgaggtggacgtgtggagcctgggcgtgatcctgtacaccctggtgagcggcagcctgcccttcgacggccagaacctgaaggagctgagagagagagtgctgagaggcaagtacagaatccccttctacatgagcaccgactgcgagaacctgctgaagaagttcctgatcctgaaccccagcaagagaggcaccctggagcagatcatgaaggacagatggatgaacgtgggccacgaggacgacgagctgaagccctacgtggagcccctgcccgactacaaggaccccagaagaaccgagctgatggtgagcatgggctacaccagagaggagatccaggacagcctggtgggccagagatacaacgaggtgatggccacctacctgctgctgggctacaagagcagcgagctggagggcgacaccatcaccctgaagcccagacccagcgccgacctgaccaacagcagcgcccccagccccagccacaaggtgcagagaagcgtgagcgccaaccccaagcagagaagattcagcgaccaggccgccggccccgccatccccaccagcaacagctacagcaagaagacccagagcaacaacgccgagaacaagagacccgaggaggacagagagagcggcagaaaggccagcagcaccgccaaggtgcccgccagccccctgcccggcctggagagaaagaagaccacccccacccccagcaccaacagcgtgctgagcaccagcaccaacagaagcagaaacagccccctgctggagagagccagcctgggccaggccagcatccagaacggcaaggacagcaccgccccccagagagtgcccgtggccagccccagcgcccacaacatcagcagcagcggcggcgcccccgacagaaccaacttccccagaggcgtgagcagcagaagcaccttccacgccggccagctgagacaggtgagagaccagcagaacctgccctacggcgtgacccccgccagccccagcggccacagccagggcagaagaggcgccagcggcagcatcttcagcaagttcaccagcaagttcgtgagaagaaacctgagcttcagattcgccagaagaccccacgtggtgggcagcggcggcaacgacaaggagaaggaggagttcagagaggccaagcccagaagcctgagattcacctggagcatgaagaccaccagcagcatggagcccaacgagatgatgagagagatcagaaaggtgctggacgccaacagctgccagagcgagctgcacgagaagtacatgctgctgtgcatgcacggcacccccggccacgaggacttcgtgcagtgggagatggaggtgtgcaagctgcccagactgagcctgaacggcgtgagattcaagagaatcagcggcaccagcatggccttcaagaacatcgccagcaagatcgccaacgagctgaagctgtag

SEQ ID NO: 61938 - protein, 709 aa, Artificial Sequence
  derived and/or modified sequence
MSSARTPLPTLNERDTEQPTLGHLDSKPSSKSNMIRGRNSATSADEQPHIGNYRLLKTIGKGNFAKVKLARHILTGKEVAVKIIDKTQLNSSSLQKLFREVRIMKVLNHPNIVKLFEVIETEKTLYLVMEYASGGEVFDYLVAHGRMKEKEARAKFRQIVSAVQYCHQKFIVHRDLKAENLLLDADMNIKIADFGFSNEFTFGNKLDTFCGSPPYAAPELFQGKKYDGPEVDVWSLGVILYTLVSGSLPFDGQNLKELRERVLRGKYRIPFYMSTDCENLLKKFLILNPSKRGTLEQIMKDRWMNVGHEDDELKPYVEPLPDYKDPRRTELMVSMGYTREEIQDSLVGQRYNEVMATYLLLGYKSSELEGDTITLKPRPSADLTNSSAPSPSHKVQRSVSANPKQRRFSDQAGPAIPTSNSYSKKTQSNNAENKRPEEDRESGRKASSTAKVPASPLPGLERKKTTPTPSTNSVLSTSTNRSRNSPLLERASLGQASIQNGKDSTAPQRVPVASPSAHNISSSGGAPDRTNFPRGVSSRSTFHAGQLRQVRDQQNLPYGVTPASPSGHSQGRRGASGSIFSKFTSKFVRRPHVVGSGGNDKEKEEFREAKPRSLRFTWSMKTTSSMEPNEMMREIRKVLDANSCQSELHEKYMLLCMHGTPGHEDFVQWEMEVCKLPRLSLNGVRFKRISGTSMAFKNIASKIANELKL

SEQ ID NO: 61939 - protein, 41 aa, Artificial Sequence
  derived and/or modified sequence
MSSARTPLPTLNERDTEQPTLGHLDSKPSSKSNMIRGRNSA

SEQ ID NO: 61940 - DNA, 246 bp, Artificial Sequence
  derived and/or modified sequence
atgtgcagctgggaggtgaccaccccccagggcctgggcaccagcagcgccagcgaggagagcctgaccgacgaccacagactgctgaaggtgatcagccagggcagcttcgccgaggtgaaggccgccggccccgcccacagccactgggaccaggacggctgcggcggccaccccaacagagccgccggcctgctgcagccccccggcagcgtgctgcagggcccctacgacgagggcccctag

SEQ ID NO: 61941 - DNA, 246 bp, Artificial Sequence
  derived and/or modified sequence
atgtgctcctgggaggtgaccaccccccagggcctgggcaccagcagcgccagcgaggagagcctgacagatgaccaccggctgctgaaggtgatcagccagggcagctttgctgaggtgaaggctgctggccctgcccacagccactgggaccaggacggctgcggcggccaccccaacagagctgctggcctgctgcagcccccaggctctgtgctgcagggcccctatgatgagggcccctag

SEQ ID NO: 61942 - DNA, 246 bp, Artificial Sequence
  derived and/or modified sequence
atgtgcagctgggaggtgaccaccccccagggcctgggcaccagcagcgcttctgaggagtccctgacggatgaccatcgacttcttaaggtaatttcccaggggtcttttgcggaagtcaaggcagcaggacccgctcactcccattgggaccaagatggatgcggaggccaccctaatagggctgccggcctgctgcagccccctgggagcgttttacagggcccctatgatgagggcccttag

SEQ ID NO: 61943 - DNA, 246 bp, Artificial Sequence
  derived and/or modified sequence
atgtgtagttgggaggttactacaccccagggattaggcacctcgtctgcttctgaagaatcgttgaccgatgaccaccgtctacttaaagttattagtcagggtagcttcgcagaagtcaaggccgctgggccagctcattcccactgggatcaagatggatgtgggggtcatcccaatagagcagccggtctcctgcaacctcctgggtcagtcctgcaaggtccatatgatgagggaccatag

SEQ ID NO: 61944 - DNA, 2130 bp, Artificial Sequence
  derived and/or modified sequence
atgagctctgctaggactccccttcccacactgaatgagcgggacaccgagcagccgacactaggccacctggatagcaaacctagctctaaaagcaatatgattcgaggtcggaatagcgcaacctccgcagatgaacagccacacataggaaactataggctcctgaagaccatagggaaaggcaattttgccaaggtgaaactcgcaagacatattcttactgggaaagaggtcgctgtgaaaattatcgacaaaacgcagctgaattcatcttccctccagaagctgtttagagaagtcagaatcatgaaggtgttgaaccatccaaatatcgttaagttgtttgaggtcatcgagacagagaagacactttatttggtcatggagtatgcatctggcggagaggttttcgactaccttgtggcacatgggcggatgaaagaaaaagaagcgagagccaaattcagacagatcgtatctgcagtccagtattgtcatcagaaattcatagtccaccgggacctaaaagcagagaacttgctgttagatgcagacatgaatattaagatcgcagacttcggtttctcaaatgagtttacattcggtaacaagcttgacactttctgtggctctcccccatatgcagcaccggagttattccagggcaaaaagtacgatggaccagaagtggatgtgtggtcacttggtgtgattctgtacacgctcgtgtccggctctcttccatttgatggccagaatcttaaagaattgcgggagagggttctgaggggtaagtaccgcataccattctacatgagcacagactgtgagaatctgctgaagaaattcctgatcttaaatcccagcaaacgaggtactcttgagcagatcatgaaggatcgctggatgaatgttggccatgaagatgacgagcttaaaccatacgtcgagcctctgcccgattataaggaccctagaaggactgaactcatggttagtatggggtatacaagagaagagattcaagatagtctggtgggacagaggtacaatgaggtgatggctacttatctcctgctgggctataaaagttcagagttggaaggcgacaccataactctgaaaccccgtccatctgctgacctgactaactcaagtgccccctccccctcacacaaagttcaaagatcggtctcagcaaaccctaaacaaaggagatttagtgaccaggccggcccagctattcctacctcaaattcgtattccaaaaaaacccagtcaaacaacgccgagaacaaacggccggaggaagacagggaatccggacgcaaagcaagcagcaccgcaaaggtgccggcctctcctctgccaggcctggagaggaagaaaacgactccaacacccagtaccaactccgtactgtctacaagcactaatcgaagcaggaactctccgctgctggaacgagcaagtttgggtcaggcctcaattcagaacggaaaagattccaccgccccgcagagggtacctgttgcctctccttctgcccacaatatctctagcagcggcggagcccccgaccgtaccaattttcccaggggcgtgtccagccgctctacctttcacgctggtcagctgaggcaagtgcgcgatcagcagaatcttccttatggggtcacgcccgctagcccaagcgggcattcccagggacgaagaggagcatctggcagcatattcagtaagttcaccagtaaattcgttaggcggcctcacgtggtcggctctgggggcaatgataaagaaaaggaagagtttagagaggccaagccacgatctttgcgcttcacctggtcaatgaaaaccacttctagcatggaacctaacgaaatgatgcgtgagattaggaaagttctggacgccaactcctgccagtctgaattgcatgagaagtatatgttgctctgtatgcatggtacgcctggtcacgaggactttgtccagtgggaaatggaggtttgtaaactccctcgtctgtctctgaacggggtgaggttcaagcgcatctcagggacctccatggcttttaaaaatatcgcatctaaaatagcaaacgagctcaagctatag

SEQ ID NO: 61945 - DNA, 339 bp, Artificial Sequence
  derived and/or modified sequence
atgattcgggggcgaaactctgctacatctgccgacgagcagccgcacatcggtaactaccgactgttaaaaaccattggtaaaggcaactttgcgaaggtcaaactggccaggcatatcctgaccggaaaggaggtggcagtaaagatcatcgacaaaacacaactaaattctagtagtctccagaagctgtttcgggaggtcagaataatgaaggtacttaatcatccaaacatagtgaagttgttcgaggttatagaaaccgagaagaccttgtacctggtcatggaatatgccagtggaggcgaggtttttgattatctcgtggcacacggatag

SEQ ID NO: 61946 - DNA, 486 bp, Artificial Sequence
  derived and/or modified sequence
atgattagaggcagaaactccgcaacctcagctgatgaacagccacacatcgggaattaccggttgctgaaaactattggtaaggggaacttcgctaaggtcaagcttgccaggcacattctgacaggtaaagaggtagcggtaaaaatcatagacaagactcagctcaactcctcctcgcttcaaaaactttttcgagaggtccgcattatgaaggtgctaaaccatcccaacatcgtcaagctgtttgaagttatagaaactgagaaaactttgtacctggtcatggagtacgcttctggcggagaggtcttcgactacctggttgcgcacggccgaatgaaggaaaaggaggcccgggccaaattcaggcagattgtgagcgcagtgcagtactgtcatcagaaatttatcgtacatcgtgatcttaaggcggaaaatttactgctggatgccgatatgaatatcaagattgcagacttctag

SEQ ID NO: 61947 - DNA, 276 bp, Artificial Sequence
  derived and/or modified sequence
atgggtggccagaggaacacaagcgtagggaatatagtgcagaggtggagggaccacgtggtttgtcagaaggccggcgtgatctatagcgggaggaaggcacaggagcacggcactggccgcacagacttcactcctgctcaaagactgatgatgccaacactgggccatctggactccaagccatccagtaaaagcaatatgattagaggccggaattccgcaaccagcgctgatgaacagccacatattggaaactatcggcttctcaaatag

SEQ ID NO: 61948 - DNA, 2130 bp, Artificial Sequence
  derived and/or modified sequence
atgagcagcgcccggacccccctgcccaccctgaatgaaagagacacagagcagcccaccctgggccacctggacagcaagcccagcagcaagagcaacatgatccggggcaggaacagcgccaccagcgcagatgagcagccccacatcggcaactaccgcctgctgaagaccatcggcaaaggaaactttgccaaggtgaagctggcccggcacatcctgaccgggaaggaggtggccgtgaagatcatcgacaagacccagctgaacagcagcagcctgcagaagctgttccgggaggtgcgcatcatgaaggtgctgaaccaccccaacatcgtgaagctgtttgaggtgattgaaacagagaagaccctgtacctggtgatggagtatgccagcggcggggaggtgtttgactacctggtggcccacggccgcatgaaggagaaggaggcccgggccaagttccggcagatcgtgtctgctgtgcagtactgccaccagaagttcatcgtgcaccgggacctgaaggccgagaacctgctgctggatgctgacatgaacatcaagattgctgactttggcttcagcaatgagttcaccttcggcaacaagctggacaccttctgtggcagccccccctatgctgcccctgagctgttccagggcaagaagtatgatggccctgaggtggatgtgtggagcctgggcgtcatcctgtacaccctggtgtctggcagcctgccctttgatggccagaacctgaaggagctgcgggagcgggtgctgcggggcaagtaccgcatccccttctacatgagcacagactgtgagaacctgctgaagaagttcctgatcctgaaccccagcaagaggggcaccctggagcagatcatgaaggaccgctggatgaatgtgggccatgaagatgatgagctgaagccctacgtggagcccctgcctgactacaaggaccccaggagaacagagctgatggtgtccatgggctacacccgggaggagatccaggacagcctggtgggccagcgctacaatgaggtgatggccacctacctgctgctgggctacaagagcagcgagctggagggggacaccatcaccctgaagccccggcccagcgctgacctgaccaacagcagcgcccccagccccagccacaaggtgcagaggtctgtgtctgccaaccccaagcagaggcgcttcagtgaccaggccggccctgccatccccaccagcaacagctacagcaagaagacccagagcaacaatgctgagaacaagaggcctgaggaggaccgggagagcggcaggaaggccagcagcacagccaaggtgcctgccagccccctgcccggcctggagaggaagaagaccacccccacccccagcaccaacagcgtgctgagcaccagcaccaacagaagcaggaacagccccctgctggagcgggccagcctgggccaggccagcatccagaatggcaaggacagcacagccccccagagggtgcctgtggccagccccagcgcccacaacatcagcagcagtggaggagccccagacaggaccaacttcccccggggcgtgagcagccgcagcaccttccacgccggccagctgcggcaggtgcgggaccagcagaacctgccctacggcgtgaccccagccagccccagcggccacagccagggccggcggggggccagcggcagcatcttcagcaagttcaccagcaagtttgtgagaagaccccacgtggtgggcagcggcggcaatgacaaggagaaggaggagttccgggaggccaagcccaggagcctgcgcttcacctggagcatgaagaccaccagctccatggagcccaatgagatgatgagggagatcaggaaggtgctggatgccaacagctgccagagcgagctgcacgagaagtacatgctgctgtgcatgcacggcaccccaggccacgaggactttgtgcagtgggagatggaggtgtgcaagctgccccggctgagcctgaatggagtgcgcttcaagaggatcagcggcacctccatggccttcaagaacatcgccagcaagatcgccaatgagctgaagctgtag

SEQ ID NO: 61949 - DNA, 339 bp, Artificial Sequence
  derived and/or modified sequence
atgatccggggcagaaattctgccaccagcgcagatgagcagccccacatcggcaactaccgcctgctgaagaccatcggcaagggcaactttgccaaggtgaagctggcccggcacatcctgaccgggaaggaggtggccgtgaagatcatcgacaagacccagctgaacagcagcagcctgcagaagctgttccgggaggtgcgcatcatgaaggtgctgaaccaccccaacatcgtgaagctgtttgaagtcatcgagacagagaagaccctgtacctggtgatggagtatgccagcggcggggaggtgtttgactacctggtggcccatggatag

SEQ ID NO: 61950 - DNA, 486 bp, Artificial Sequence
  derived and/or modified sequence
atgatccggggcagaaattctgccaccagcgcagatgagcagccccacatcggcaactaccgcctgctgaagaccatcggcaagggcaactttgccaaggtgaagctggcccggcacatcctgaccgggaaggaggtggccgtgaagatcatcgacaagacccagctgaacagcagcagcctgcagaagctgttccgggaggtgcgcatcatgaaggtgctgaaccaccccaacatcgtgaagctgtttgaagtcatcgagacagagaagaccctgtacctggtgatggagtatgccagcggcggggaggtgtttgactacctggtggcccacggccgcatgaaggagaaggaggcccgggccaagttccggcagatcgtgtctgctgtgcagtactgccaccagaagttcatcgtgcaccgggacctgaaggccgagaacctgctgctggatgctgacatgaacatcaagattgctgacttctag

SEQ ID NO: 61951 - DNA, 276 bp, Artificial Sequence
  derived and/or modified sequence
atgggcggccagaggaacacctctgtgggcaacatcgtgcagcgctggagggaccacgtggtgtgccagaaggccggggtcatctacagcggcaggaaggcccaggagcacggcactggaagaacagacttcaccccagcccagaggctgatgatgcccaccctgggccacctggacagcaagcccagcagcaagagcaacatgatccggggcaggaacagcgccaccagcgcagatgagcagccccacatcggcaactaccgcctgctgaagtag

SEQ ID NO: 61952 - DNA, 2903 bp, Artificial Sequence
  derived and/or modified sequence
gaaaagagccgagggccggcggtggtggcggccatgttgggagcagcaggtccggcggcggctgcctgtgtgccgggcgcggagcagtgccgctgagggcaggggaggagcgaggcaggcggccggctgcggcggcagagagtaggcggagcggcgcggcccggccgaaaggcggcacagcccagccgggggtcgggggggtgcggtccggagccgctcggagccggcgcggcctagcccgagcggcgcatccccgggctggcgtgagcggctgcccggcctccccgcacccccggccggggcccatgcggcgggtgctcctgctgtgagaagccccgcccggccgggctccgcgccttcccttccctcccttcctccaagcttctcggttccctcccccgagataccggcgccatgtccagcgctcggacccccctacccacgctgaacgagagggacacggagcagcccaccttgggacaccttgactccaagcccagcagtaagtccaacatgattcggggccgcaactcagccacctctgctgatgagcagccccacattggaaactaccggctcctcaagaccattggcaagggtaattttgccaaggtgaagttggcccgacacatcctgactgggaaagaggtagctgtgaagatcattgacaagactcaactgaactcctccagcctccagaaactattccgcgaagtaagaataatgaaggttttgaatcatcccaacatagttaaattatttgaagtgattgagactgagaaaacgctctaccttgtcatggagtacgctagtggcggagaggtatttgattacctagtggctcatggcaggatgaaagaaaaagaggctcgagccaaattccgccagatagtgtctgctgtgcagtactgtcaccagaagtttattgtccatagagacttaaaggcagaaaacctgctcttggatgctgatatgaacatcaagattgcagactttggcttcagcaatgaattcacctttgggaacaagctggacaccttctgtggcagtcccccttatgctgccccagaactcttccagggcaaaaaatatgatggacccgaggtggatgtgtggagcctaggagttatcctctatacactggtcagcggatccctgccttttgatggacagaacctcaaggagctgcgggaacgggtactgaggggaaaataccgtattccattctacatgtccacggactgtgaaaacctgcttaagaaatttctcattcttaatcccagcaagagaggcactttagagcaaatcatgaaagatcgatggatgaatgtgggtcacgaagatgatgaactaaagccttacgtggagccactccctgactacaaggacccccggcggacagagctgatggtgtccatgggttatacacgggaagagatccaggactcgctggtgggccagagatacaacgaggtgatggccacctatctgctcctgggctacaagagctccgagctggaaggcgacaccatcaccctgaaaccccggccttcagctgatctgaccaatagcagcgccccatccccatcccacaaggtacagcgcagcgtgtcggccaatcccaagcagcggcgcttcagcgaccaggctggtcctgccattcccacctctaattcttactctaagaagactcagagtaacaacgcagaaaataagcggcctgaggaggaccgggagtcagggcggaaagccagcagcacagccaaggtgcctgccagccccctgcccggtctggagaggaagaagaccaccccaaccccctccacgaacagcgtcctctccaccagcacaaatcgaagcaggaattccccacttttggagcgggccagcctcggccaggcctccatccagaatggcaaagacagcacagccccccagcgtgtccctgttgcctccccatccgcccacaacatcagcagcagtggtggagccccagaccgaactaacttcccccggggtgtgtccagccgaagcaccttccatgctgggcagctccgacaggtgcgggaccagcagaatttgccctacggtgtgaccccagcctctccctctggccacagccagggccggcggggggcctctgggagcatcttcagcaagttcacctccaagtttgtacgcagacctcacgtggtgggcagtggcggcaacgacaaagaaaaggaagaatttcgggaggccaagccccgctccctccgcttcacgtggagtatgaagaccacgagctccatggagcccaacgagatgatgcgggagatccgcaaggtgctggacgcgaacagctgccagagcgagctgcatgagaagtacatgctgctgtgcatgcacggcacgccgggccacgaggacttcgtgcagtgggagatggaggtgtgcaaactgccgcggctctctctcaacggggttcgatttaagcggatatcgggcacctccatggccttcaaaaacattgcctccaaaatagccaacgagctgaagctttaacaggctgccaggagcgggggcggcgggggcgggccagctggacgggctgccggccgctgcgccgccccacctgggcgagactgcagcgatggattggtgtgtctcccctgctggcacttctcccctccctggcccttctcagttttctcttacatgtttgtggggggtgggagattgttctccagcaccccacattcacccctgcccagagattcccccttctcctctcccctactggaggcaaaggaaggggagggtggatgggggggcagggctccccctcggtactgcggttgcacagagtatttcgcctaaaccaagaaattttttattaccaaaaagaaaaaagaaaaaaaaaa

SEQ ID NO: 61953 - DNA, 1176 bp, Artificial Sequence
  derived and/or modified sequence
gttgggagcagcaggtccggcggcggctgcctgtgtgccgggcgcggagcagtgccgctgagggcaggggaggagcgaggcaggcggccggctgcggcggcagagagtaggcgggtgctcctgctgtgagaagccccgcccggccgggctccgcgccttcccttccctcccttcctccaagcttctcggttccctcccccgagataccggcgccatgtccagcgctcggacccccctacccacgctgaacgagagggacacggagcagcccaccttgggacaccttgactccaagcccagcagtaagtccaacatgattcggggccgcaactcagccacctctgctgatgagcagccccacattggaaactaccggctcctcaagaccattggcaagggtaattttgccaaggtgaagttggcccgacacatcctgactgggaaagaggtagctgtgaagatcattgacaagactcaactgaactcctccagcctccagaaactattccgcgaagtaagaataatgaaggttttgaatcatcccaacatagttaaattatttgaagtgattgagactgagaaaacgctctaccttgtcatggagtacgctagtggcggagaggtatttgattacctagtggctcatggcaggatgaaagaaaaagaggctcgagccaaattccgccagatagtgtctgctgtgcagtactgtcaccagaagtttattgtccatagagacttaaaggcagaaaacctgctcttggatgctgatatgaacatcaagattgcagactttggcttcagcaatgaattcacctttgggaacaagctggacaccttctgtggcagtcccccttatgctgccccagaactcttccagggcaaaaaatatgatggacccgaggtggatgtgtggagcctaggagttatcctctatacactggtcagcggatccctgccttttgatggacagaacctcaaggagctgcgggaacgggtactgaggggaaaataccgtattccattctacatgtccacggactgtgaaaacctgcttaagaaatttctcattcttaatcccagcaagagaggcactttagagcaaatcatgaaagatcgatggatgaatgtgggtcacgaagatgatgaactaaagccttacgtggagccactccc

SEQ ID NO: 61954 - DNA, 558 bp, Artificial Sequence
  derived and/or modified sequence
agtttctcttcatggattacctgctcgcggcaggcaggcaggcagctccccacctggaagcctgcagactcgccgagctgagagaatcatgctgcagatctcatgcttcttttttactttgtgttggcaaaaaccccaggagaagatgggagattctgggaggagatgattatgctggcccaccttgggacaccttgactccaagcccagcagtaagtccaacatgattcggggccgcaactcagccacctctgctgatgagcagccccacattggaaactaccggctcctcaagaccattggcaagggtaattttgccaaggtgaagttggcccgacacatcctgactgggaaagaggtagctgtgaagatcattgacaagactcaactgaactcctccagcctccagaaactattccgcgaagtaagaataatgaaggttttgaatcatcccaacatagttaaattatttgaagtgattgagactgagaaaacgctctaccttgtcatggagtacgctagtggcggagaggtatttgattacctagtggctcatgg

SEQ ID NO: 61955 - DNA, 595 bp, Artificial Sequence
  derived and/or modified sequence
gatcattgtcattattgttccagttgaacaacacagtgaattttatctgagcaccacacaactctagcccaccttgggacaccttgactccaagcccagcagtaagtccaacatgattcggggccgcaactcagccacctctgctgatgagcagccccacattggaaactaccggctcctcaagaccattggcaagggtaattttgccaaggtgaagttggcccgacacatcctgactgggaaagaggtagctgtgaagatcattgacaagactcaactgaactcctccagcctccagaaactattccgcgaagtaagaataatgaaggttttgaatcatcccaacatagttaaattatttgaagtgattgagactgagaaaacgctctaccttgtcatggagtacgctagtggcggagaggtatttgattacctagtggctcatggcaggatgaaagaaaaagaggctcgagccaaattccgccagatagtgtctgctgtgcagtactgtcaccagaagtttattgtccatagagacttaaaggcagaaaacctgctcttggatgctgatatgaacatcaagattgcagacttt

SEQ ID NO: 61956 - DNA, 557 bp, Artificial Sequence
  derived and/or modified sequence
agtatcttaagtaggtgtggtaatgactacagagaagtgctttttcaggatgagaagatgagggagaaaatttacaccattgctggattgtgttaagaactcggagaggaaaccacagggaggatgcactgctgaggaaatcgtctggcttcctggagtggggaccagagccagagagccaagccctcctggctttgctgagttctgtccttgcccctgacaccaacgtgtctgcctgcgttgttgctcctggttacagtgggctcagtcttgcctcttttttgatgggtgggcagaggaacactagtgttgggaatattgtccagcgttggagagatcatgtggtctgtcagaaggctggagttatttatagtgggagaaaagcccaggagcatggcacgggaagaactgatttcacaccagctcagcgcctgatgatgcccaccttgggacaccttgactccaagcccagcagtaagtccaacatgattcggggccgcaactcagccacctctgctgatgagcagccccacattggaaactaccggctcctcaag

SEQ ID NO: 61957 - DNA, 2130 bp, Artificial Sequence
  derived and/or modified sequence
atgagcagcgcccggacccccctgcccaccctgaacgagcgggacactgagcaacctaccctgggccatctggatagtaagccttcatcaaagtctaatatgatccgaggcagaaactccgctacctctgcagacgaacagcctcatatcggaaattacaggctcttgaagacaatcgggaagggaaactttgctaaggtgaaactggcaaggcacatcctgaccggcaaggaggtggccgtgaagattatcgataaaacgcagctcaactccagcagtttgcagaagctgtttcgcgaggtgaggattatgaaagtgttaaaccatccaaacatcgtgaagctctttgaagtgattgaaacggagaaaacactgtatttggttatggaatatgcctccggtggagaggtattcgactacctggtggcgcacgggcggatgaaagagaaggaagctcgtgccaaatttcgccagatcgtgtcagcagtgcagtattgccaccagaagtttatagtgcatagagacctgaaagctgagaacctgcttcttgacgcggatatgaatatcaagattgccgatttcggattttcaaatgaattcacatttgggaacaaactcgatacattttgcggctctccaccatacgcagctccggaattattccagggtaagaaatacgatgggccagaggtggatgtatggagcctgggggtgattctatatacactcgtgtccggtagtcttccattcgacggccagaacttaaaggagcttcgtgaacgggtgctgcgtggcaagtataggatccccttttatatgtctaccgactgcgagaaccttctgaaaaaatttctgattctgaaccctagcaaacgcggaaccctggagcagattatgaaggaccggtggatgaacgtcggacatgaagacgacgaactgaagccgtacgtggagccgcttccagactacaaggatccacggaggaccgagctgatggtgagcatggggtatacccgggaggaaatccaggattctctcgtgggccagcgatacaatgaagtgatggctacctacctgttactcggatataagtccagcgagctcgagggcgatacaatcacactgaaaccaaggccttcagcagacctgaccaattcctcagccccttccccaagccacaaagttcagaggtccgtctctgctaaccctaagcagaggagattcagcgaccaggctggcccggcgatacctactagtaatagttattccaagaagacccaatcgaataacgccgagaacaagagaccagaagaagacagagagagcgggcgtaaggcctcgtcaacagctaaggtgcccgcatcacccctcccggggttggaacgaaaaaagacaacccccaccccctctacgaatagcgtcctaagcacatccactaatagatctagaaattcacccctgctggaacgcgcctctctcggccaggcctcaatccagaatggtaaggactctacagctcctcagcgcgtgcctgtggcaagcccgtcggctcacaatatttccagctctggcggcgcacccgatagaacaaatttcccaaggggcgtctcatcccgctcaacctttcacgccggacagctgaggcaggtccgcgatcaacagaacctaccctatggggtgaccccagcatctcctagcggtcattcacaaggaaggagaggggcttcagggtcaatcttttcaaagttcacctccaagttcgttcgacggcctcatgtggtcggcagtggcgggaacgacaaagagaaggaggagtttcgagaagctaaaccgcgttcactcagattcacctggagtatgaagacgacttccagcatggagcctaatgaaatgatgcgggaaatcagaaaagtgctggatgccaactcctgccaatccgagttgcatgaaaaatacatgctgctctgtatgcacggaaccccgggtcacgaggatttcgtccagtgggaaatggaggtgtgcaaactcccacgcttgtccctgaacggggttagattcaaacggatcagcgggacgtcaatggcattcaagaatatcgcttctaagattgccaacgagctcaaactctag

SEQ ID NO: 61958 - DNA, 339 bp, Artificial Sequence
  derived and/or modified sequence
atgatccggggccggaacagcgccaccagcgccgacgagcagccccatattgggaactatcgcctgctgaagacgatcggaaaaggcaatttcgcgaaggtcaagctcgcacgccatatcctcacggggaaagaggtcgctgtaaaaataatcgataaaacccagcttaactccagctcccttcaaaagctttttcgagaggtccgcatcatgaaagttctgaaccacccaaacattgtgaaactgttcgaggttatcgagactgaaaaaactttgtacctggtgatggagtatgcgtcaggaggggaggtctttgattatctggtcgcccacggctag

SEQ ID NO: 61959 - DNA, 486 bp, Artificial Sequence
  derived and/or modified sequence
atgatccggggccggaacagcgccaccagcgccgacgagcagccccacataggcaactaccggttgctcaaaaccattggaaagggcaatttcgccaaggtcaaactcgccaggcacatccttacgggtaaagaagtggccgttaagatcatcgacaaaacccaactcaactcctctagcctgcaaaaactgttccgggaggtgcggatcatgaaagtcctgaaccaccccaatatagtaaaactgttcgaagttattgagactgaaaaaacgttgtacctcgtgatggagtacgctagtgggggggaggtttttgattacctggtagctcatggacgaatgaaagaaaaggaggcaagggccaaatttcgccagatcgtctcagccgtgcagtactgccatcagaaatttattgtgcatagggatctgaaggcagaaaacctgctgctcgatgccgacatgaacataaagattgcggatttctag

SEQ ID NO: 61960 - DNA, 276 bp, Artificial Sequence
  derived and/or modified sequence
atgggcggccagcggaacaccagcgtgggcaacatcgtgcagcggtggcgcgaccatgtggtatgccagaaggcaggcgtgatttattccggccgcaaggcccaggaacatgggactgggcgaacagacttcactcctgcccagcggctcatgatgccaacactgggacacttagactctaagccaagctcaaagagcaacatgatcaggggccgcaacagcgctacgtcggccgatgaacaacctcatatcggcaactaccgactgctcaagtag

SEQ ID NO: 61961 - DNA, 2130 bp, Artificial Sequence
  derived and/or modified sequence
atgtctagcgcccgaactccactgccgactctgaatgagcgcgacacagagcagcccacgctgggacacctggatagcaagccgtcctccaagtctaacatgatccgcggacgcaatagcgctacgtcagctgacgagcagccccacattggtaactaccgcctgctcaagacaattggtaaaggaaactttgccaaggtcaaattggccaggcatatccttaccggtaaggaggttgccgttaaaatcatagacaagactcagctcaatagctctagtctgcagaagctctttagagaggtaagaatcatgaaggtgctcaatcacccaaacattgtcaagttgtttgaggtgattgagaccgagaaaacgctctacttggtgatggagtacgctagcgggggagaagtgttcgactaccttgttgcccatggaaggatgaaggagaaggaggccagagccaaattccgtcaaatcgtttctgctgtgcagtactgccaccagaagttcatcgtccatcgggacttaaaggcagaaaacctgctgttggacgccgatatgaacatcaagatcgccgacttcggtttcagtaatgagttcaccttcggcaacaagctggacaccttttgcggctcccccccatacgctgcacccgagcttttccaaggaaagaagtatgatggacctgaggttgatgtttggtctctgggcgtcatcctctacacactggtgagcggctccctacccttcgatggccaaaacttaaaggagctgagagagcgagtcctcagaggcaagtatcggatccccttctacatgtccaccgattgcgagaacctgctcaagaagtttttgattcttaatccttccaaaagaggaaccctcgagcagatcatgaaggacaggtggatgaatgtcggacatgaagacgacgagctgaaaccctatgttgagcccctcccggactacaaggaccctcgaagaaccgagttgatggttagtatgggctacaccagagaagagattcaggattctctggtcggccagagatataatgaagtgatggctacttacctattactgggttacaaaagttccgagctggaaggtgatacaattacgctgaaacctagacccagtgccgaccttacgaactcaagcgcaccctcaccatctcataaagtgcagcgcagcgtgtccgccaacccaaagcagcggagatttagtgaccaggccggtcctgcgatacccacctcaaactcgtacagcaaaaagactcagagcaataatgccgaaaacaagcggcctgaagaggatcgggagtccggaaggaaggcatcatctacagcaaaggtgccggcatcacctctgccaggacttgaaaggaagaagaccaccccaacgccatccacgaacagcgttctatctacctccactaataggtcgcgcaacagcccactgcttgaacgagcttctctcgggcaagcttctattcaaaacggcaaagacagcacagctcctcaaagggtgccggtggcttccccaagcgcacataacataagtagctccggtggcgctcccgaccgcaccaattttcccaggggagtatcgagcagatcaacatttcatgcgggacagcttcggcaagttagagatcagcagaaccttccatacggggtgactccggcatccccttcgggccatagccaggggcgtcgtggtgccagtggcagcatatttagcaagttcacctccaaattcgtgcgccgtccccacgtcgttggctccggtggaaacgataaggagaaggaggagttcagagaagccaagcctcgaagcctgcggttcacatggtcaatgaaaacaaccagcagcatggagcctaacgagatgatgcgggaaatccgcaaagtactggacgctaacagctgccaatctgaactgcacgaaaagtacatgttgctgtgcatgcatggcacacccggacacgaagacttcgtgcagtgggaaatggaagtctgtaagttgcctcggttgtctctgaatggagtacgctttaagaggatcagcggaacaagtatggctttcaaaaacatagcctccaaaatcgctaacgagctaaagttgtag

SEQ ID NO: 61962 - DNA, 339 bp, Artificial Sequence
  derived and/or modified sequence
atgatccgtggtcggaatagcgcgacgagtgcggatgagcagccgcatatcggcaattacagacttttaaagactatcgggaagggcaatttcgccaaggtaaagctagcacgacatatcctcactggaaaagaagtagccgtgaagattattgataagacccagctgaacagttccagcttgcagaagttgttcagggaggtcaggataatgaaggtgcttaatcacccaaatatagtgaagctgttcgaagtcatcgaaactgagaaaacactctacctggtcatggagtatgcgtccggcggtgaggtgttcgattacttggtggcccacgggtag

SEQ ID NO: 61963 - DNA, 486 bp, Artificial Sequence
  derived and/or modified sequence
atgataagaggcaggaacagcgccacaagtgcggatgagcagccccacattggcaactacagactattgaagacaattggtaaggggaatttcgcgaaggtcaagttggctagacatatcctgaccgggaaggaagtagccgtgaagattattgataaaactcaattaaactcctcgtctctccaaaaactgttcagggaggtgcggattatgaaagtgctgaaccatcccaacattgtaaaactcttcgaggttatcgagactgaaaagaccctgtacctggtcatggaatacgccagtgggggagaagtgttcgactatttggtcgcccatggcaggatgaaggagaaggaagcaagggccaagtttaggcagatcgtatcagcagtccagtactgtcaccagaagttcattgtccatagagacctcaaagcagagaacttactgctggacgccgatatgaatattaagatagccgatttttag

SEQ ID NO: 61964 - DNA, 276 bp, Artificial Sequence
  derived and/or modified sequence
atgggtggccagaggaacaccagcgtcggcaatattgtccagcgctggcgagatcatgttgtgtgccagaaagccggagtaatctattccggcagaaaggcccaggaacatggaactggcagaaccgatttcacacctgcgcagagactcatgatgcccaccttgggacatctggactctaagcccagttcaaagtcgaatatgatccgcggaagaaactccgccacgtcagccgacgaacagccccacataggcaactaccggcttctgaagtag

SEQ ID NO: 61965 - DNA, 2130 bp, Artificial Sequence
  derived and/or modified sequence
atgagcagcgccagaacccccctgcccaccctgaacgagagagacaccgagcagcccaccctgggccacctggacagcaagcccagcagcaagagcaacatgatcagaggcagaaacagcgccaccagcgccgacgagcagccccacatcggcaactacagactgctgaagaccatcggcaagggcaacttcgccaaggtgaagctggccagacacatcctgaccggcaaggaggtggccgtgaagatcatcgacaagacccagctgaacagcagcagcctgcagaagctgttcagagaggtgagaatcatgaaggtgctgaaccaccccaacatcgtgaagctgttcgaggtgatcgagaccgagaagaccctgtacctggtgatggagtacgccagcggcggcgaggtgttcgactacctggtggcccacggcagaatgaaggagaaggaggccagagccaagttcagacagatcgtgagcgccgtgcagtactgccaccagaagttcatcgtgcacagagacctgaaggccgagaacctgctgctggacgccgacatgaacatcaagatcgccgacttcggcttcagcaacgagttcaccttcggcaacaagctggacaccttctgcggcagccccccctacgccgcccccgagctgttccagggcaagaagtacgacggccccgaggtggacgtgtggagcctgggcgtgatcctgtacaccctggtgagcggcagcctgcccttcgacggccagaacctgaaggagctgagagagagagtgctgagaggcaagtacagaatccccttctacatgagcaccgactgcgagaacctgctgaagaagttcctgatcctgaaccccagcaagagaggcaccctggagcagatcatgaaggacagatggatgaacgtgggccacgaggacgacgagctgaagccctacgtggagcccctgcccgactacaaggaccccagaagaaccgagctgatggtgagcatgggctacaccagagaggagatccaggacagcctggtgggccagagatacaacgaggtgatggccacctacctgctgctgggctacaagagcagcgagctggagggcgacaccatcaccctgaagcccagacccagcgccgacctgaccaacagcagcgcccccagccccagccacaaggtgcagagaagcgtgagcgccaaccccaagcagagaagattcagcgaccaggccggccccgccatccccaccagcaacagctacagcaagaagacccagagcaacaacgccgagaacaagagacccgaggaggacagagagagcggcagaaaggccagcagcaccgccaaggtgcccgccagccccctgcccggcctggagagaaagaagaccacccccacccccagcaccaacagcgtgctgagcaccagcaccaacagaagcagaaacagccccctgctggagagagccagcctgggccaggccagcatccagaacggcaaggacagcaccgccccccagagagtgcccgtggccagccccagcgcccacaacatcagcagcagcggcggcgcccccgacagaaccaacttccccagaggcgtgagcagcagaagcaccttccacgccggccagctgagacaggtgagagaccagcagaacctgccctacggcgtgacccccgccagccccagcggccacagccagggcagaagaggcgccagcggcagcatcttcagcaagttcaccagcaagttcgtgagaagaccccacgtggtgggcagcggcggcaacgacaaggagaaggaggagttcagagaggccaagcccagaagcctgagattcacctggagcatgaagaccaccagcagcatggagcccaacgagatgatgagagagatcagaaaggtgctggacgccaacagctgccagagcgagctgcacgagaagtacatgctgctgtgcatgcacggcacccccggccacgaggacttcgtgcagtgggagatggaggtgtgcaagctgcccagactgagcctgaacggcgtgagattcaagagaatcagcggcaccagcatggccttcaagaacatcgccagcaagatcgccaacgagctgaagctgtag

SEQ ID NO: 61966 - DNA, 339 bp, Artificial Sequence
  derived and/or modified sequence
atgatcagaggcagaaacagcgccaccagcgccgacgagcagccccacatcggcaactacagactgctgaagaccatcggcaagggcaacttcgccaaggtgaagctggccagacacatcctgaccggcaaggaggtggccgtgaagatcatcgacaagacccagctgaacagcagcagcctgcagaagctgttcagagaggtgagaatcatgaaggtgctgaaccaccccaacatcgtgaagctgttcgaggtgatcgagaccgagaagaccctgtacctggtgatggagtacgccagcggcggcgaggtgttcgactacctggtggcccacggctag

SEQ ID NO: 61967 - DNA, 486 bp, Artificial Sequence
  derived and/or modified sequence
atgatcagaggcagaaacagcgccaccagcgccgacgagcagccccacatcggcaactacagactgctgaagaccatcggcaagggcaacttcgccaaggtgaagctggccagacacatcctgaccggcaaggaggtggccgtgaagatcatcgacaagacccagctgaacagcagcagcctgcagaagctgttcagagaggtgagaatcatgaaggtgctgaaccaccccaacatcgtgaagctgttcgaggtgatcgagaccgagaagaccctgtacctggtgatggagtacgccagcggcggcgaggtgttcgactacctggtggcccacggcagaatgaaggagaaggaggccagagccaagttcagacagatcgtgagcgccgtgcagtactgccaccagaagttcatcgtgcacagagacctgaaggccgagaacctgctgctggacgccgacatgaacatcaagatcgccgacttctag

SEQ ID NO: 61968 - DNA, 276 bp, Artificial Sequence
  derived and/or modified sequence
atgggcggccagagaaacaccagcgtgggcaacatcgtgcagagatggagagaccacgtggtgtgccagaaggccggcgtgatctacagcggcagaaaggcccaggagcacggcaccggcagaaccgacttcacccccgcccagagactgatgatgcccaccctgggccacctggacagcaagcccagcagcaagagcaacatgatcagaggcagaaacagcgccaccagcgccgacgagcagccccacatcggcaactacagactgctgaagtag

SEQ ID NO: 61969 - protein, 303 aa, Artificial Sequence
  derived and/or modified sequence
MSDNGVCVLAFKCPGLLRYTAYRCKQLSDTSIIAVASHCPLLQKVHVGNQDKLTDEGLKQLGSKCRELKDIHFGQCYKISDEGMIVIAKGCLKLQRIYMQENKLVTDQSVKAFAEHCPELQYVGFMGCSVTSKGVIHLTKLRNLSSLDLRHITELDNETVMEIVKRCKNLSSLNLCLNWIINDRCVEVIAKEGQNLKELYLVSCKITDYALIAIGRYSMTIETVDVGWCKEITDQGATLIAQSSKSLRYLGLMRCDKVNEVTVEQLVQQYPHITFSTVLQDCKRTLERAYQMGWTPNMSAASS

SEQ ID NO: 61970 - protein, 701 aa, Artificial Sequence
  derived and/or modified sequence
MGHLLSKEPRNRPSQKRPRCCSWCRRRRPLLRLPRRTPAKVPPQPAAPRSRDCFFRGPCMLCFIVHSPGAPAPAGPEEEPPLSPPPRDGAYAAASSSQHLARRYAALAAEDCAAAARRFLLSSAAAAAAAAASASSPASCCKELGLAAAAAWEQQGRSLFLASLGPVRFLGPPAAVQLFRGPTPSPAELPTPPEMVCKRKGAGVPACTPCKQPRCGGGGCGGGGGGGGGGGPAGGGASPPRPPDAGCCQAPEQPPQPLCPPPSSPTSEGAPTEAGGDAVRAGGTAPLSAQQQHECGDADCRESPENPCDCHREPPPETPDINQLPPSILLKIFSNLSLDERCLSASLVCKYWRDLCLDFQFWKQLDLSSRQQVTDELLEKIASRSQNIIEINISDCRSMSDNGVCVLAFKCPGLLRYTAYRCKQLSDTSIIAVASHCPLLQKVHVGNQDKLTDEGLKQLGSKCRELKDIHFGQCYKISDEGMIVIAKGCLKLQRIYMQENKLVTDQSVKAFAEHCPELQYVGFMGCSVTSKGVIHLTKLRNLSSLDLRHITELDNETVMEIVKRCKNLSSLNLCLNWIINDRCVEVIAKEGQNLKELYLVSCKITDYALIAIGRYSMTIETVDVGWCKEITDQGATLIAQSSKSLRYLGLMRCDKVNEVTVEQLVQQYPHITFSTVLQDCKRTLERAYQMGWTPNMSAASS

SEQ ID NO: 61971 - DNA, 4386 bp, Artificial Sequence
  derived and/or modified sequence
ctcctcctctcagcacctggcgcggcgctacgcggccctggccgccgaggactgcgccgctgctgcccgccgcttcctgctatcctcggccgccgccgccgccgccgctgccgcctcggcttcgtcgcccgcctcctgctgcaaagagttggggctggctgcggccgccgcctgggagcagcagggccgaagtctcttcctggccagcttggggccggtgcgcttcctggggccgcccgccgccgtgcagctcttccgggggccgacaccgtcaccggccgagctccctacgccccccgaaatggtgtgcaagcggaagggggccggggtccccgcctgcaccccctgcaagcagccccgcagccgctctgccctccgccctcttctcccacctccgaaggtgcccccaccgaagctggcggggacgctgtccgagccgggggcaccgcccccttgtccgcccagcagcagcatgaatgtggcgacgcggactgtcgggagtcccccgaaaacccctgcgactgtcacagggagccgccccccgaaaccccagacatcaaccagctgccgccgtccatcctgctcaagatattttccaatttgtcactggatgagcgttgcctttccgcatcattggtttgcaagtactggcgtgacctttgtttagacttccagttttggaagcagctggatcttagtagtcgtcagcaggtcactgatgaattgttggaaaaaattgcatcaagaagtcagaatataattgaaatcaacatttctgattgtcgcagtatgtctgataatggcgtatgtgttttagcatttaaatgtcctggacttcttaggtatacagcctacaggtgtaaacagctttctgacacctctattattgcggttgcctctcactgtcctttacttcagaaagtgcatgtaggcaaccaggacaaactcactgatgaaggactcaagcagctgggctcaaaatgcagagaactcaaagatattcatttcggccagtgttacaagatctcagatgaaggcatgatcgtcatagctaagggctgtctgaaattacaaaggatatacatgcaggaaaacaaattagtgacagatcagtcagtgaaagcatttgctgaacactgtcctgagcttcaatatgtaggcttcatgggttgttcagtcacttctaaaggagtcattcacctaaccaagctaagaaacctttccagcttggacctacgtcatatcactgaactggataatgaaaccgtgatggaaattgtcaagaggtgcaaaaatcttagctctctcaatctctgtctgaactggatcataaatgacaggtgtgtggaggtcattgcaaaggaaggacaaaacctgaaagagctatatttggtgtcctgtaaaatcacagattatgcactgatagccattgggcgatacagcatgacaatagagactgtggatgtcggatggtgtaaagaaatcacagaccaaggagccaccctgattgcacagagcagcaagtctctgagatatttggggctgatgagatgtgataaagtcaacgaagtgacggtggaacagctggtgcagcagtacccccacatcaccttcagcaccgtcctgcaggactgcaagaggaccttggagagagcctatcagatgggctggacccccaacatgtctgccgcctcctcctagcgctcctgcctcgcctagtccactgggatcattcagcagagcagaggagaattgtacatttggggagctgatctctcggaagggttttaactgtcacctgtctgtgtgtgttcaagtatgtgtatttgtgtcttgtttgcatactgcataccaaaagtgcagttgtcatttgttcccaagtgagctggctttttttcttagaaattaaagattatgaaagccacaaactttttagtttttaacttcaaaggcttctttctctttaaaaaaaaattatttttaatatagagtcaaaaaattggatgtattattttgagcttctaattgctgccacttggagatgtccaagtaagaaggccttctttttacatgggatgaattgtgcacttctactgatgatgactacagcagaagtgatgttatacgtacaggcacttacactctctcacatattcacacgtgtgcacatctacaccagggctctgatctactctagatcgtttcctgacagagaagccttcttccaggccactaaggtagcatgttatccactgtggcactgcctaactccgtgtatcctcgggtggccaacttgctatctggtgggtgacttggggactagaaagaataaagccttttctaaatttgttatatagaggcaacagtctgaactctcctggccagctcacgaaagttaattatacattattctacaaatgcattctgttgagcactaaatattttagttggttttatgttaacattgtgttagcttttatttcctggatagtaactggtcaggatatattttaatgatatttgaaactaatcttagcattgaagccaccaatgtaattaatggtgtgcagttattttaaaaactacagatcatttcattattttcttaattttggtaattattaaagtctatttctgagatacgagagggtagtcacattaatagaagattcatgagtgagatataagtagacaatctttctactgttgttgctctttttgctttgctttgggttcttgaacaggttttttggatatatgcatgttgtcattttggactagttctcatgctactgcaaagatctattgctagctaatatatgagttaagaaagaaaattagaaaatctgttcattgaaattctgtttacacttgtcagaaataagcatttctttgtttaattaaggattgccagcttcagttaagacaagacctatcagtaaatgaatatatgttttgatttaacacatctttacaattaattcataatagggactcaggctcaaataactgttcctgtgtctagatttataatgaggacatcagggagcctttttaagctaaagagtgattatctttcacagtagaactagaaacaaaaccctaacttgtgaagttgctatttatttttccctgagtgaatataactgttatttggtctttaacagatatactgaggtttgagtttcactttctttaagtctcacattgctaacatgacattagctgtaagaaacaagatagctttacatttgaatgccatttactgatttctaatgattctctttttttgtaaacaactgtttcctttgattatgtcaacatgtttctgatgtggcatttttgttttaatcccaatcggttaggaaaatctagtcagtaagcgccatgagtattcttcccataactaaatgggtttctaatttaatttgaagggaataaaatttgtgtaagaaaaaagctgtttaacattaataaactatatttcttcttacacattgaactgtatcattttcatatccacttccccaccactgaaatatcttatttcacaatattttaactgatttttaatccaaaactaatttataagacagtatgtatagtaatagtagcttgagtgaatatgcaaaagtttaatttttatatatgtcatactatattttaaatagttaaaaaagacaaaagaagggagagccatctatgatatagatggtaccatttcagttcaaagttgtaataacctttggagtgttacagtttggttgtcaaatggtttcagaatgtataattgatttttttaaatgttgcattgtttgaatctaaagtacagcactataacatgctttagcttgggggggtgggggtggggtggggacttgcacttattctctaaaatgttgactaatccagaaagcctgatgcaacataatctggaaaactgctttggtacatttgtagaaatccgtagaaataccatatccagcctcaaagcattaatctcaaaaaaaaaaaaaaaaaaaaaaaaaaacagccagaaaaaagcatcaccttgagtggtcctgtgatggttgttgaatgtgttctcattagatgctttgaaatgaggcttaaaataatttttctgggcaatatagagtttcttttttttgcttagaatgtcataaatacatgtgaacacgtttaatgcagggctttttattctctccaaaatgtcaacagtattttcagaataaagactatgaaatatattgctgtagtggaaaattctggtcctttgtctttaatgtctttttgagtggataaagaaaattcacccggtttgtagtttctatatttccgtgaatctttgaccttgcagtgggttgcaataaaagagaaacaaaa

SEQ ID NO: 61972 - DNA, 5188 bp, Artificial Sequence
  derived and/or modified sequence
agagtcgcgggtgcgcgcgccggcggcggatccgcagttaaaatggtccgagcgggacccggcctttccccggccgctccgctgactgactgagccggctggccgggcccggactggtcgcctagccggcaggctcgctcgctccctccctcgcgtccccaaagctcgcgcccatcgttctcccggcttccctgggcaaagcatgtagcccccgtcgggcactccggcggcccgcagctgacgcccaccccccaccgtcgcgtgtgtgcccgtgtgtgcgtgtgtgtgcgcaggaagggcgacccctccgggggccgagccagcgagcggcctgccccgctgccgggagcccgcctctctgggtctccctccctcccgtcccggtccccctcctcggggccttctatatgggccaccttctctcgaaggagccgcgtaaccgcccgagccagaagaggcctcgctgttgcagttggtgccgccgccggcgccctctcctcaggctgccccgccggaccccagccaaggtgccccctcagccggcggcgccccggagccgggactgcttcttccgcgggccctgcatgctctgcttcatcgtgcacagtcccggcgcgcccgcccccgccggcccagaggaggagccgccgctctcgccgccgccgcgggacggggcctacgctgccgcctcctcctctcagcacctggcgcggcgctacgcggccctggccgccgaggactgcgccgctgctgcccgccgcttcctgctatcctcggccgccgccgccgccgccgctgccgcctcggcttcgtcgcccgcctcctgctgcaaagagttggggctggctgcggccgccgcctgggagcagcagggccgaagtctcttcctggccagcttggggccggtgcgcttcctggggccgcccgccgccgtgcagctcttccgggggccgacaccgtcaccggccgagctccctacgccccccgaaatggtgtgcaagcggaagggggccggggtccccgcctgcaccccctgcaagcagccccgctgcggcggcgggggctgcggcggcggcggcggcggcggtggcgggggagggcctgcggggggaggcgcttcgccgccccggccccccgacgccggctgctgccaggccccggagcagcccccgcagccgctctgccctccgccctcttctcccacctccgaaggtgcccccaccgaagctggcggggacgctgtccgagccgggggcaccgcccccttgtccgcccagcagcagcatgaatgtggcgacgcggactgtcgggagtcccccgaaaacccctgcgactgtcacagggagccgccccccgaaaccccagacatcaaccagctgccgccgtccatcctgctcaagatattttccaatttgtcactggatgagcgttgcctttccgcatcattggtttgcaagtactggcgtgacctttgtttagacttccagttttggaagcagctggatcttagtagtcgtcagcaggtcactgatgaattgttggaaaaaattgcatcaagaagtcagaatataattgaaatcaacatttctgattgtcgcagtatgtctgataatggcgtatgtgttttagcatttaaatgtcctggacttcttaggtatacagcctacaggtgtaaacagctttctgacacctctattattgcggttgcctctcactgtcctttacttcagaaagtgcatgtaggcaaccaggacaaactcactgatgaaggactcaagcagctgggctcaaaatgcagagaactcaaagatattcatttcggccagtgttacaagatctcagatgaaggcatgatcgtcatagctaagggctgtctgaaattacaaaggatatacatgcaggaaaacaaattagtgacagatcagtcagtgaaagcatttgctgaacactgtcctgagcttcaatatgtaggcttcatgggttgttcagtcacttctaaaggagtcattcacctaaccaagctaagaaacctttccagcttggacctacgtcatatcactgaactggataatgaaaccgtgatggaaattgtcaagaggtgcaaaaatcttagctctctcaatctctgtctgaactggatcataaatgacaggtgtgtggaggtcattgcaaaggaaggacaaaacctgaaagagctatatttggtgtcctgtaaaatcacagattatgcactgatagccattgggcgatacagcatgacaatagagactgtggatgtcggatggtgtaaagaaatcacagaccaaggagccaccctgattgcacagagcagcaagtctctgagatatttggggctgatgagatgtgataaagtcaacgaagtgacggtggaacagctggtgcagcagtacccccacatcaccttcagcaccgtcctgcaggactgcaagaggaccttggagagagcctatcagatgggctggacccccaacatgtctgccgcctcctcctagcgctcctgcctcgcctagtccactgggatcattcagcagagcagaggagaattgtacatttggggagctgatctctcggaagggttttaactgtcacctgtctgtgtgtgttcaagtatgtgtatttgtgtcttgtttgcatactgcataccaaaagtgcagttgtcatttgttcccaagtgagctggctttttttcttagaaattaaagattatgaaagccacaaactttttagtttttaacttcaaaggcttctttctctttaaaaaaaaattatttttaatatagagtcaaaaaattggatgtattattttgagcttctaattgctgccacttggagatgtccaagtaagaaggccttctttttacatgggatgaattgtgcacttctactgatgatgactacagcagaagtgatgttatacgtacaggcacttacactctctcacatattcacacgtgtgcacatctacaccagggctctgatctactctagatcgtttcctgacagagaagccttcttccaggccactaaggtagcatgttatccactgtggcactgcctaactccgtgtatcctcgggtggccaacttgctatctggtgggtgacttggggactagaaagaataaagccttttctaaatttgttatatagaggcaacagtctgaactctcctggccagctcacgaaagttaattatacattattctacaaatgcattctgttgagcactaaatattttagttggttttatgttaacattgtgttagcttttatttcctggatagtaactggtcaggatatattttaatgatatttgaaactaatcttagcattgaagccaccaatgtaattaatggtgtgcagttattttaaaaactacagatcatttcattattttcttaattttggtaattattaaagtctatttctgagatacgagagggtagtcacattaatagaagattcatgagtgagatataagtagacaatctttctactgttgttgctctttttgctttgctttgggttcttgaacaggttttttggatatatgcatgttgtcattttggactagttctcatgctactgcaaagatctattgctagctaatatatgagttaagaaagaaaattagaaaatctgttcattgaaattctgtttacacttgtcagaaataagcatttctttgtttaattaaggattgccagcttcagttaagacaagacctatcagtaaatgaatatatgttttgatttaacacatctttacaattaattcataatagggactcaggctcaaataactgttcctgtgtctagatttataatgaggacatcagggagcctttttaagctaaagagtgattatctttcacagtagaactagaaacaaaaccctaacttgtgaagttgctatttatttttccctgagtgaatataactgttatttggtctttaacagatatactgaggtttgagtttcactttctttaagtctcacattgctaacatgacattagctgtaagaaacaagatagctttacatttgaatgccatttactgatttctaatgattctctttttttgtaaacaactgtttcctttgattatgtcaacatgtttctgatgtggcatttttgttttaatcccaatcggttaggaaaatctagtcagtaagcgccatgagtattcttcccataactaaatgggtttctaatttaatttgaagggaataaaatttgtgtaagaaaaaagctgtttaacattaataaactatatttcttcttacacattgaactgtatcattttcatatccacttccccaccactgaaatatcttatttcacaatattttaactgatttttaatccaaaactaatttataagacagtatgtatagtaatagtagcttgagtgaatatgcaaaagtttaatttttatatatgtcatactatattttaaatagttaaaaaagacaaaagaagggagagccatctatgatatagatggtaccatttcagttcaaagttgtaataacctttggagtgttacagtttggttgtcaaatggtttcagaatgtataattgatttttttaaatgttgcattgtttgaatctaaagtacagcactataacatgctttagcttgggggggtgggggtggggtggggacttgcacttattctctaaaatgttgactaatccagaaagcctgatgcaacataatctggaaaactgctttggtacatttgtagaaatccgtagaaataccatatccagcctcaaagcattaatctcaaaaaaaaaaaaaaaaaaaaaaaaaaacagccagaaaaaagcatcaccttgagtggtcctgtgatggttgttgaatgtgttctcattagatgctttgaaatgaggcttaaaataatttttctgggcaatatagagtttcttttttttgcttagaatgtcataaatacatgtgaacacgtttaatgcagggctttttattctctccaaaatgtcaacagtattttcagaataaagactatgaaatatattgctgtagtggaaaattctggtcctttgtctttaatgtctttttgagtggataaagaaaattcacccggtttgtagtttctatatttccgtgaatctttgaccttgcagtgggttgcaataaaag

SEQ ID NO: 61973 - DNA, 912 bp, Artificial Sequence
  derived and/or modified sequence
atgagtgacaatggcgtgtgtgttctggcatttaagtgtccaggtctgctgcgttatacagcatatcgatgtaagcagctgtcagatacgtcaataattgcggtagcctctcattgcccactgctgcagaaagtccacgtgggcaatcaggacaagctgaccgatgaaggcctgaagcagttaggctcaaaatgcagggagctgaaggatatacactttggacagtgctacaagatctccgatgaagggatgatcgtgatcgctaaaggttgcctgaagctccagcgcatctatatgcaggagaataagctcgtcaccgaccagagtgttaaggcttttgctgaacactgtcccgaactgcaatatgtaggttttatgggttgctctgttacttccaaaggcgtcattcatttgacaaaactgcgtaatttgtcctccctagacctgcgccacatcacagaactggataatgaaactgtcatggagatcgtgaaacggtgtaagaatctttcctcattaaatctctgcttgaactggattatcaatgacaggtgcgttgaggttattgccaaggagggacagaacttaaaggaactgtacctggtctcttgcaagatcaccgattatgcacttatcgccatcggccgatactccatgaccattgagaccgttgacgtcgggtggtgtaaagaaatcaccgaccagggtgccacactgatcgcccagagctccaagtcattgagatacctaggacttatgcgatgtgacaaagtgaatgaggtgacagtcgagcagctggtgcagcagtatccacacataacattcagtaccgtcctgcaggactgtaaaagaacgttggaacgagcttatcagatgggctggaccccgaatatgtctgccgccagttcatag

SEQ ID NO: 61974 - DNA, 2106 bp, Artificial Sequence
  derived and/or modified sequence
atgggccatttgctgagcaaggagccgagaaatagaccctcccagaagcgtccgagatgctgttcctggtgcaggcggaggcgccctctgcttaggttgccccgcagaactccagccaaggttccacctcagcccgccgcccctagatctagggactgcttttttcgaggcccgtgtatgctctgcttcatagtgcactctcccggcgcgcctgctcctgcaggccctgaagaagagcccccattgagtccacccccccgagatggcgcttacgccgctgcctcttccagccagcacctcgccaggcggtacgccgccctagccgcagaagattgcgcggctgctgcgcggaggttcctccttagtagcgcagcagccgccgctgccgctgcagctagtgccagctcccctgctagctgctgcaaggaactggggctcgccgctgccgcagcatgggaacagcagggtcgcagcctctttctcgcaagtctagggcctgtgcgatttctaggacctcctgcagccgtccagttatttagaggccccacaccttctcctgcggaactaccaaccccccctgagatggtgtgtaaaaggaaaggggctggggttccagcctgtactccctgcaaacagccccggtgcggtggcggcggttgcgggggcggaggaggaggaggaggtggtggcggcccagcggggggaggagcatctcctccaaggccgcccgacgctggctgttgccaggcgcctgaacagccacctcagcccctttgcccacccccatcatcccctactagtgagggggcccctactgaggctggcggcgatgcagtgcgggcaggcgggacagcaccactgagcgcccagcaacagcacgagtgcggagacgcagattgtagggaaagcccagagaatccttgcgattgccatcgggagcctccacctgagacccccgacatcaatcagctcccccccagtatactgttaaagatcttttccaacctgagtctggatgagcgctgcttgagtgcgtccctggtgtgtaaatactggcgggatctgtgtcttgattttcagttttggaagcaactcgatttgtcgtcaaggcaacaggtgaccgatgagcttctcgaaaaaatcgccagtcgctctcagaacataattgaaataaatatcagcgactgccgcagtatgtctgacaatggggtctgtgttttagcctttaagtgcccaggtctgcttaggtacactgcctaccgctgtaaacaactcagcgacactagcatcattgctgtcgctagtcattgtcccttgcttcaaaaggtacacgttgggaaccaggacaaattaaccgacgaaggcctcaagcagctgggcagcaaatgccgggaattaaaagacatccatttcggacagtgctataaaatcagtgatgaaggaatgatagtaattgcaaaaggctgcctgaagctccagcgtatctacatgcaggagaacaagcttgttacagaccagtctgtaaaggcattcgccgagcactgcccagagctgcagtatgtggggttcatgggatgctctgtcacctctaagggcgtgatccacctgaccaaactccgaaatctgagtagcctcgatctgagacatatcaccgagctcgacaacgagacagtgatggagatcgtgaaaagatgcaaaaatctgtcgtccctaaacttatgtctgaattggattataaatgatcggtgcgtcgaagttatcgcgaaggagggtcagaatctgaaggagctttaccttgttagctgcaagatcacagactacgccctgattgcaataggccggtactccatgacaatcgaaaccgtggatgtaggttggtgcaaggaaatcaccgaccagggtgcaaccttgatagcccagtcttctaaatcattacgctacctgggcctgatgcgttgcgacaaggtgaatgaagtgacggttgagcagctggttcagcagtatcctcacatcacattttctaccgtactacaggattgtaagcggacactcgaacgagcataccagatgggttggacacccaatatgtctgccgctagctcatag

SEQ ID NO: 61975 - DNA, 912 bp, Artificial Sequence
  derived and/or modified sequence
atgtctgacaacggggtgtgtgtgctggccttcaagtgccccggcctgctgcgctacacagcctaccgctgcaagcagctgagtgacaccagcatcatcgctgtggccagccactgccccctgctgcagaaggtgcacgtgggcaaccaggacaagctgacagatgagggcctgaagcagctgggcagcaagtgccgggagctgaaggacatccacttcggccagtgctacaagatcagtgatgagggcatgattgtgattgccaagggctgcctgaagctgcagaggatctacatgcaggagaacaagctggtgacagaccagagcgtgaaggcctttgctgagcactgcccagagctgcagtatgtgggcttcatgggctgcagcgtgaccagcaaaggagtcatccacctgaccaagctgaggaacctgagcagcctggacctgcggcacatcacagagctggacaatgaaacagtgatggagatcgtgaagcgctgcaagaacctgagcagcctgaacctgtgcctgaactggatcatcaatgacagatgtgtggaggtgattgccaaggagggccagaacctgaaggagctgtacctggtgtcctgcaagatcacagattatgccctgattgccatcggccgctacagcatgaccattgaaacagtggatgtgggctggtgcaaggagatcacagaccagggcgccaccctcatcgcccagagcagcaagagcctgcgctacctgggcctgatgagatgtgacaaggtgaatgaggtgacagtggagcagctggtgcagcagtacccccacatcaccttcagcacagtgctgcaggactgcaagaggaccctggagcgggcctaccagatgggctggacccccaacatgtctgctgccagcagctag

SEQ ID NO: 61976 - DNA, 2106 bp, Artificial Sequence
  derived and/or modified sequence
atgggccacctgctgagcaaggagcccaggaaccggcccagccagaagaggccccgctgctgctcctggtgcagaagaagaagacccctgctgcggctgcccaggaggaccccagccaaggtgcccccccagcctgctgcccccaggagccgggactgcttcttccggggcccctgcatgctgtgcttcatcgtgcacagccctggggccccagccccagctggccctgaggaggagccccccctgagccccccaccaagagatggagcctatgctgctgccagcagcagccagcacctggcccggcgctatgctgccctggccgctgaggactgtgccgctgctgcccggcgcttcctgctgagcagcgctgctgctgctgctgctgctgctgccagcgccagcagccctgccagctgctgcaaggagctgggcctggccgctgctgctgcctgggagcagcagggccgcagcctcttcctggccagcctgggccctgtgcgcttcctgggccccccagctgctgtgcagctgttccggggccccacccccagccctgctgagctgcccaccccacctgagatggtgtgcaagaggaagggggccggcgtgcctgcctgcaccccctgcaagcagccccgctgtggcggcggcggctgcggcggcggcggcggcggcggcggcggcggcggccctgctgggggcggggccagccccccccggcccccagatgctggctgctgccaggcccctgagcagcccccccagcccctgtgccccccacccagcagccccaccagcgagggcgcccccacagaggccggaggagatgctgtgcgggccggcggcacagcccccctgagcgcccagcagcagcatgaatgtggagatgctgactgccgggagagccctgagaacccctgtgactgccaccgggagcccccacctgagaccccagacatcaaccagctgcccccatccatcctgctgaagatcttcagcaacctgagcctggatgagcgctgcctgagcgccagcctggtgtgcaagtactggagggacctgtgcctggacttccagttctggaagcagctggacctgagcagccggcagcaggtgacagatgagctgctggagaagatcgccagccgcagccagaacatcatcgagatcaacatcagtgactgccgctccatgtctgacaacggggtgtgtgtgctggccttcaagtgccccggcctgctgcgctacacagcctaccgctgcaagcagctgagtgacaccagcatcatcgctgtggccagccactgccccctgctgcagaaggtgcacgtgggcaaccaggacaagctgacagatgagggcctgaagcagctgggcagcaagtgccgggagctgaaggacatccacttcggccagtgctacaagatcagtgatgagggcatgattgtgattgccaagggctgcctgaagctgcagaggatctacatgcaggagaacaagctggtgacagaccagagcgtgaaggcctttgctgagcactgcccagagctgcagtatgtgggcttcatgggctgcagcgtgaccagcaaaggagtcatccacctgaccaagctgaggaacctgagcagcctggacctgcggcacatcacagagctggacaatgaaacagtgatggagatcgtgaagcgctgcaagaacctgagcagcctgaacctgtgcctgaactggatcatcaatgacagatgtgtggaggtgattgccaaggagggccagaacctgaaggagctgtacctggtgtcctgcaagatcacagattatgccctgattgccatcggccgctacagcatgaccattgaaacagtggatgtgggctggtgcaaggagatcacagaccagggcgccaccctcatcgcccagagcagcaagagcctgcgctacctgggcctgatgagatgtgacaaggtgaatgaggtgacagtggagcagctggtgcagcagtacccccacatcaccttcagcacagtgctgcaggactgcaagaggaccctggagcgggcctaccagatgggctggacccccaacatgtctgctgccagcagctag

SEQ ID NO: 61977 - DNA, 912 bp, Artificial Sequence
  derived and/or modified sequence
atgagcgacaacggcgtgtgcgtgctggccttcaagtgccccggcctcctgcgctatactgcctatagatgtaagcagctgtcggatacatctataatcgcagttgcctcccactgtccgctgttacagaaggtgcacgtcggcaaccaggataaactgactgacgaaggtcttaagcagttgggtagtaagtgtagagaactgaaggatattcatttcggccagtgctacaagatctccgatgaagggatgatagtgatcgccaaaggctgtctaaagctacagcgtatctacatgcaggaaaataaactggtaactgatcagagtgtcaaagcctttgccgaacactgccccgaattgcaatacgtagggttcatgggatgttccgtgaccagcaagggcgtgatacacctgactaaactcagaaacctgtcatctcttgatctcaggcacatcacagagctggataatgagaccgtcatggaaatcgtgaaacggtgcaaaaacctgagcagcctcaacctgtgcctcaactggattatcaatgaccgatgcgttgaggtgattgcaaaggaagggcagaacttgaaggagctttacctggtgtcctgtaaaatcaccgactacgccctgatcgccattggtagatacagcatgaccatcgagactgtggacgtggggtggtgcaaagagatcactgatcagggagctaccttgatagcccagagcagcaaatccctccggtatttggggctcatgcggtgcgacaaagtcaacgaggtaaccgttgaacaacttgtacagcaatatcctcacattaccttttctaccgtcttgcaggactgcaaaaggacacttgagcgggcttaccaaatgggctggactcccaacatgtcagccgcaagcagctag

SEQ ID NO: 61978 - DNA, 2106 bp, Artificial Sequence
  derived and/or modified sequence
atgggccacctgctgagcaaggagccccggaaccggcccagccagaagaggccaagatgttgctcctggtgtcggcgccgaagacctttgttgagactcccccggagaacacccgcaaaggtgcccccccaaccggcggcccctagaagcagggactgcttttttagaggcccatgtatgctgtgctttatcgtccactccccaggggcgcccgccccggccggaccagaagaggagccacctctttcaccaccgcccagggatggcgcttatgccgccgctagtagctcgcaacaccttgcgcggaggtatgctgccctagctgccgaggactgtgcagccgccgccagaagattcctgctctcaagtgccgctgcagctgctgcggctgctgcttcagcatcgtctccagcgtcctgttgtaaggagttgggactggcggccgctgctgcatgggagcagcagggccgctccctcttcctcgcctcactgggacccgtgagattccttgggcccccagcagcagttcaattattccgcgggcctaccccttccccagcagaattgccaactccccccgaaatggtctgtaaacgtaagggggcaggagtcccggcttgcacaccttgcaagcaaccgcgctgcggcggcggcggttgcgggggaggtggcggcggcgggggggggggcggcccagccggtgggggggcttctccaccacgaccacctgatgcagggtgctgtcaggcccctgagcagcctccccaaccactgtgtccaccaccgtcatcacccacctctgagggagcccccactgaggccggaggcgacgcagtgcgggccgggggaacagcacctctttcagcccaacagcaacacgagtgtggtgatgctgattgccgagaatcacccgaaaatccatgtgactgtcacagggagccacctcccgagacccctgatataaatcaactccccccaagcattctgttgaaaatcttctcaaacttgtcactggatgaacgctgtctgtctgcttcccttgtgtgcaaatactggagagatctatgtttagactttcaattctggaagcaactcgacctgagttcccggcaacaagtgacagatgagttgctcgaaaagattgcctcacgctctcaaaacatcattgaaatcaacatttccgactgtcggagtatgtcagacaatggcgtgtgcgtgctggcttttaagtgccctggcctgctgcggtacaccgcgtatcgctgtaagcagctgtccgacacatccattatagcggtcgcctcccactgtcctcttcttcagaaagtgcatgttggtaaccaagacaaattaaccgacgaggggcttaaacagctcggttccaagtgtcgagagctgaaagatatccatttcgggcaatgctataagatcagtgacgagggcatgatcgtaattgccaagggttgtcttaagctccagagaatttacatgcaagaaaacaagctcgtaaccgatcagtccgtgaaggcttttgcagaacactgtcccgaattgcagtacgtgggctttatgggctgttctgtcacctccaagggagtgattcacctaaccaaactgcgcaatttgtccagcctggatctgaggcatataactgagctagataacgaaaccgtgatggagattgtgaagagatgcaagaatctctcaagtctaaacctctgcctgaattggatcattaatgaccggtgtgtggaagtcattgcaaaggaggggcagaatctaaaagagctgtacctggttagctgtaagatcaccgattatgcactgatagctattggcagatactccatgacaattgaaacagtggacgtaggttggtgcaaggagatcaccgaccaaggcgcaactttgatcgcccagtcatccaagagtctaaggtatctcggactgatgcgatgtgacaaagttaatgaagtgactgttgagcagttggtacagcagtaccctcacattaccttcagcacagtgttgcaagattgtaagcgcactttggagcgagcctaccagatgggctggactccaaacatgtctgcggcgtccagctag

SEQ ID NO: 61979 - DNA, 912 bp, Artificial Sequence
  derived and/or modified sequence
atgtcagataatggtgtgtgtgtgctggcatttaaatgtcctggcctgttaagatatacagcctatcgctgcaagcagctttccgacacatccatcatagcggtagcaagccattgccctctgctccagaaggtacacgtggggaatcaggacaagctgaccgacgagggcctcaaacagctcgggagcaagtgccgcgagttaaaggatatacactttgggcagtgctataagattagtgacgagggcatgattgtgatcgctaagggctgcctcaagctccagcggatatatatgcaggagaacaagctcgtaactgatcagtccgtgaaagcttttgcagagcattgccctgagctgcagtacgtgggctttatgggatgttctgtcacgagcaagggagtaattcatttaacaaaactgcgcaatctgtccagtctggatctgcgccacattactgaactggacaacgaaactgtgatggagatcgttaagcgatgcaagaatctatccagccttaacctgtgtttaaattggatcataaatgataggtgtgtggaggtcatcgccaaggaggggcagaacctgaaagaactgtacctcgtgtcctgcaagattactgattacgcgctgattgcaattggcaggtacagcatgaccattgaaaccgtggatgttggatggtgcaaggagatcacagaccagggcgctacacttatagcccagtcatcaaaaagccttcgatatctggggttgatgagatgcgataaggtgaatgaggttaccgttgaacagctcgtgcagcagtatccacacattactttctcaacagttttgcaggattgcaaaaggacacttgaaagagcataccagatgggctggacccccaacatgagtgcggcttcaagctag

SEQ ID NO: 61980 - DNA, 2106 bp, Artificial Sequence
  derived and/or modified sequence
atggggcacctactgagcaaggaaccgaggaataggccttcccagaagagacctcggtgctgctcttggtgtcggcgtagaaggcccctcctcaggctacctaggcgcacccccgctaaggtgccaccccagccagcagctccgagatcacgagattgtttttttagaggaccatgcatgctatgtttcattgtacacagtccgggagctcctgcacccgcaggcccagaagaagagcctccactttccccaccgccaagagacggcgcatatgccgctgcttcctcttcacaacatctggccagacgatatgctgcgctggccgcagaggattgcgcggcagctgccagacgctttctgctttcctctgccgctgccgctgcggctgcagccgcatccgctagctctccagcgagctgttgtaaggagctgggcttggccgcagcggcagcttgggaacagcagggccgaagtctctttctggcaagcttggggccagtcaggtttttgggaccacccgcagcggtccagttgttcaggggaccgaccccatctccggctgagctgcctacccctccggagatggtgtgcaaaaggaaaggggctggagtgcccgcatgtactccatgcaagcagccaaggtgtgggggtggcggatgtgggggagggggtggcggaggagggggaggcggaccggctggcggtggggcatccccacctaggcctcctgatgcaggttgctgccaggcccctgaacagccgccacagccgctgtgcccgccacctagcagtccgacttcggagggggcaccaactgaggccggaggcgacgcagttagagccggaggcaccgccccattgagcgcgcagcaacagcacgagtgtggcgatgcagattgcagggagtctcctgaaaatccttgcgactgccatcgcgagcccccaccggagactcctgatattaaccagcttcctcccagtatccttctcaagatattctcaaatcttagcttggacgagagatgtctgtcagcctcattggtatgtaagtattggcgcgatctgtgtctcgattttcagttctggaagcaactggatttaagctcaaggcagcaagtgacagacgagcttttggagaaaatagcgagtagaagtcagaatattattgagattaatatttctgactgtcggagtatgagcgataacggagtttgtgtgctggcttttaagtgtccagggttgctgagatatactgcctacaggtgcaagcaactaagcgatacttctataattgctgtggcttcacactgtccactcctgcagaaggtgcatgtagggaatcaggataaactcacagatgaaggtcttaaacagctcgggtcaaagtgcagggaactgaaagatatccatttcggacagtgctacaaaatttccgacgaaggcatgattgtgattgcgaaaggctgcctgaaactgcagaggatttacatgcaggaaaataagctggtgaccgatcagagcgttaaagcctttgcggaacactgtccagaactacagtatgtgggattcatgggatgttcagtgacctctaaaggagttatccatctgaccaagttgagaaatttgtccagcctcgacttacggcacattacagaactcgataacgagaccgtaatggagatagtgaagagatgcaagaacctgtcctcccttaatctgtgtctgaattggattatcaacgaccgttgcgttgaagttatagctaaggagggccagaacctgaaagagctctatctggtgtcttgtaagataaccgattacgctctgattgctatcggcaggtactcgatgacgatcgagacggtggacgtgggttggtgtaaggaaatcaccgatcaaggagcgacattgatcgcacagtcgtccaagagcctcagatacttgggactgatgcgttgtgacaaggtaaatgaggtgacagttgagcagctcgtccaacagtaccctcatatcaccttctcgaccgttctccaggactgcaaacgcactctcgaacgagcataccagatgggctggacacctaacatgagtgccgctagtagttag

SEQ ID NO: 61981 - DNA, 912 bp, Artificial Sequence
  derived and/or modified sequence
atgagcgacaacggcgtgtgcgtgctggccttcaagtgccccggcctgctgagatacaccgcctacagatgcaagcagctgagcgacaccagcatcatcgccgtggccagccactgccccctgctgcagaaggtgcacgtgggcaaccaggacaagctgaccgacgagggcctgaagcagctgggcagcaagtgcagagagctgaaggacatccacttcggccagtgctacaagatcagcgacgagggcatgatcgtgatcgccaagggctgcctgaagctgcagagaatctacatgcaggagaacaagctggtgaccgaccagagcgtgaaggccttcgccgagcactgccccgagctgcagtacgtgggcttcatgggctgcagcgtgaccagcaagggcgtgatccacctgaccaagctgagaaacctgagcagcctggacctgagacacatcaccgagctggacaacgagaccgtgatggagatcgtgaagagatgcaagaacctgagcagcctgaacctgtgcctgaactggatcatcaacgacagatgcgtggaggtgatcgccaaggagggccagaacctgaaggagctgtacctggtgagctgcaagatcaccgactacgccctgatcgccatcggcagatacagcatgaccatcgagaccgtggacgtgggctggtgcaaggagatcaccgaccagggcgccaccctgatcgcccagagcagcaagagcctgagatacctgggcctgatgagatgcgacaaggtgaacgaggtgaccgtggagcagctggtgcagcagtacccccacatcaccttcagcaccgtgctgcaggactgcaagagaaccctggagagagcctaccagatgggctggacccccaacatgagcgccgccagcagctag

SEQ ID NO: 61982 - DNA, 2106 bp, Artificial Sequence
  derived and/or modified sequence
atgggccacctgctgagcaaggagcccagaaacagacccagccagaagagacccagatgctgcagctggtgcagaagaagaagacccctgctgagactgcccagaagaacccccgccaaggtgcccccccagcccgccgcccccagaagcagagactgcttcttcagaggcccctgcatgctgtgcttcatcgtgcacagccccggcgcccccgcccccgccggccccgaggaggagccccccctgagccccccccccagagacggcgcctacgccgccgccagcagcagccagcacctggccagaagatacgccgccctggccgccgaggactgcgccgccgccgccagaagattcctgctgagcagcgccgccgccgccgccgccgccgccgccagcgccagcagccccgccagctgctgcaaggagctgggcctggccgccgccgccgcctgggagcagcagggcagaagcctgttcctggccagcctgggccccgtgagattcctgggcccccccgccgccgtgcagctgttcagaggccccacccccagccccgccgagctgcccaccccccccgagatggtgtgcaagagaaagggcgccggcgtgcccgcctgcaccccctgcaagcagcccagatgcggcggcggcggctgcggcggcggcggcggcggcggcggcggcggcggccccgccggcggcggcgccagcccccccagaccccccgacgccggctgctgccaggcccccgagcagcccccccagcccctgtgccccccccccagcagccccaccagcgagggcgcccccaccgaggccggcggcgacgccgtgagagccggcggcaccgcccccctgagcgcccagcagcagcacgagtgcggcgacgccgactgcagagagagccccgagaacccctgcgactgccacagagagcccccccccgagacccccgacatcaaccagctgccccccagcatcctgctgaagatcttcagcaacctgagcctggacgagagatgcctgagcgccagcctggtgtgcaagtactggagagacctgtgcctggacttccagttctggaagcagctggacctgagcagcagacagcaggtgaccgacgagctgctggagaagatcgccagcagaagccagaacatcatcgagatcaacatcagcgactgcagaagcatgagcgacaacggcgtgtgcgtgctggccttcaagtgccccggcctgctgagatacaccgcctacagatgcaagcagctgagcgacaccagcatcatcgccgtggccagccactgccccctgctgcagaaggtgcacgtgggcaaccaggacaagctgaccgacgagggcctgaagcagctgggcagcaagtgcagagagctgaaggacatccacttcggccagtgctacaagatcagcgacgagggcatgatcgtgatcgccaagggctgcctgaagctgcagagaatctacatgcaggagaacaagctggtgaccgaccagagcgtgaaggccttcgccgagcactgccccgagctgcagtacgtgggcttcatgggctgcagcgtgaccagcaagggcgtgatccacctgaccaagctgagaaacctgagcagcctggacctgagacacatcaccgagctggacaacgagaccgtgatggagatcgtgaagagatgcaagaacctgagcagcctgaacctgtgcctgaactggatcatcaacgacagatgcgtggaggtgatcgccaaggagggccagaacctgaaggagctgtacctggtgagctgcaagatcaccgactacgccctgatcgccatcggcagatacagcatgaccatcgagaccgtggacgtgggctggtgcaaggagatcaccgaccagggcgccaccctgatcgcccagagcagcaagagcctgagatacctgggcctgatgagatgcgacaaggtgaacgaggtgaccgtggagcagctggtgcagcagtacccccacatcaccttcagcaccgtgctgcaggactgcaagagaaccctggagagagcctaccagatgggctggacccccaacatgagcgccgccagcagctag

SEQ ID NO: 61983 - protein, 752 aa, Artificial Sequence
  derived and/or modified sequence
MSKNSEFINLSFLLDHEKEMILGVLKRDEYLKKVEDKRIRKLKNELLEAKRRSGKTQQEASRVCVHCHRNLGLIFDRGDPCQACSLRVCRECRVAGPNGSWKCTVCDKIAQLRIITGEWFFEEKAKRFKQVNVLGTDVVRQSILRRSPGAEEVQSQEQTRQDAEKSDTSPVAGKKASHDGPKRKGFLLSKFRSATRGEIITPKTDTGRSYSLDLDGQHFRSLKSPPGSDRGSTGSSDLNDQEPGPRTPKSSRSNGVTPGTQSSPAPSTRTVTSVISREYGFENSMDLAAIEGTSQELTKSHRRNTSGTPSIAVSGTSLSSDQSRSELDLSESFTEDSEDTVSIRSKSVPGALDKDSLEETEESIDALVSSQLSTNTHRLASGLSTSSQAGSDRKWTYLNVPDADSDTTSLNSMMSVYSETGDYGNVKVSGEILLHISYCYKTGGLYIFVKNCRNLAIGDEKKQRTDAYVKSYLLPDKSRNNKRKTKIRTGTNPEFNETLKYTISHTQLETRTLQLSVWHYDRFGRNSFLGEVEIPFDSWNFENPTDEWFVLQPKVEFAPDIGLQYKGELTVVLRYIPPEENLMLPPEQLQGNKTFKKGKKKESPVISGGILEVFIKEAKNLTAVKSGGTSDSFVKGYLLPDDSKATKHKTLVIKKSVNPQWNHTFMFSGIHPQDIKNVCLELTIWDKEAFSSNIFLGGVRLNSGSGVSHGKNVDWMDSQGEEQRLWQKMANNPGTPFEGVLMLRSSMGKCRL

SEQ ID NO: 61984 - DNA, 2259 bp, Artificial Sequence
  derived and/or modified sequence
atgagcaagaacagcgagttcatcaacctgagcttcctgctggaccacgagaaggagatgatcctgggcgtgctgaagagagacgagtacctgaagaaggtggaggacaagagaatcagaaagctgaagaacgagctgctggaggccaagagaagaagcggcaagacccagcaggaggccagcagagtgtgcgtgcactgccacagaaacctgggcctgatcttcgacagaggcgacccctgccaggcctgcagcctgagagtgtgcagagagtgcagagtggccggccccaacggcagctggaagtgcaccgtgtgcgacaagatcgcccagctgagaatcatcaccggcgagtggttcttcgaggagaaggccaagagattcaagcaggtgaacgtgctgggcaccgacgtggtgagacagagcatcctgagaagaagccccggcgccgaggaggtgcagagccaggagcagaccagacaggacgccgagaagagcgacaccagccccgtggccggcaagaaggccagccacgacggccccaagagaaagggcttcctgctgagcaagttcagaagcgccaccagaggcgagatcatcacccccaagaccgacaccggcagaagctacagcctggacctggacggccagcacttcagaagcctgaagagcccccccggcagcgacagaggcagcaccggcagcagcgacctgaacgaccaggagcccggccccagaacccccaagagcagcagaagcaacggcgtgacccccggcacccagagcagccccgcccccagcaccagaaccgtgaccagcgtgatcagcagagagtacggcttcgagaacagcatggacctggccgccatcgagggcaccagccaggagctgaccaagagccacagaagaaacaccagcggcacccccagcatcgccgtgagcggcaccagcctgagcagcgaccagagcagaagcgagctggacctgagcgagagcttcaccgaggacagcgaggacaccgtgagcatcagaagcaagagcgtgcccggcgccctggacaaggacagcctggaggagaccgaggagagcatcgacgccctggtgagcagccagctgagcaccaacacccacagactggccagcggcctgagcaccagcagccaggccggcagcgacagaaagtggacctacctgaacgtgcccgacgccgacagcgacaccaccagcctgaacagcatgatgagcgtgtacagcgagaccggcgactacggcaacgtgaaggtgagcggcgagatcctgctgcacatcagctactgctacaagaccggcggcctgtacatcttcgtgaagaactgcagaaacctggccatcggcgacgagaagaagcagagaaccgacgcctacgtgaagagctacctgctgcccgacaagagcagaaacaacaagagaaagaccaagatcagaaccggcaccaaccccgagttcaacgagaccctgaagtacaccatcagccacacccagctggagaccagaaccctgcagctgagcgtgtggcactacgacagattcggcagaaacagcttcctgggcgaggtggagatccccttcgacagctggaacttcgagaaccccaccgacgagtggttcgtgctgcagcccaaggtggagttcgcccccgacatcggcctgcagtacaagggcgagctgaccgtggtgctgagatacatcccccccgaggagaacctgatgctgccccccgagcagctgcagggcaacaagaccttcaagaagggcaagaagaaggagagccccgtgatcagcggcggcatcctggaggtgttcatcaaggaggccaagaacctgaccgccgtgaagagcggcggcaccagcgacagcttcgtgaagggctacctgctgcccgacgacagcaaggccaccaagcacaagaccctggtgatcaagaagagcgtgaacccccagtggaaccacaccttcatgttcagcggcatccacccccaggacatcaagaacgtgtgcctggagctgaccatctgggacaaggaggccttcagcagcaacatcttcctgggcggcgtgagactgaacagcggcagcggcgtgagccacggcaagaacgtggactggatggacagccagggcgaggagcagagactgtggcagaagatggccaacaaccccggcacccccttcgagggcgtgctgatgctgagaagcagcatgggcaagtgcagactgtag

SEQ ID NO: 61985 - DNA, 2259 bp, Artificial Sequence
  derived and/or modified sequence
atgtctaagaacagtgagttcattaacctgagcttcctcctggatcacgagaaagaaatgattcttggcgtgctgaagagggacgaataccttaaaaaggtcgaggataagcggatcagaaaactcaagaatgaactgttggaggctaagaggcgcagcggaaagacgcagcaggaagccagtcgggtgtgtgttcattgtcatagaaatttgggcctgatctttgacaggggggacccatgccaagcttgcagtctccgggtctgtcgggagtgtcgcgtggcggggcctaatggatcctggaagtgcaccgtctgtgacaaaatagcccagctgagaattatcacaggcgagtggttctttgaggagaaggccaagaggttcaagcaggtgaacgttttgggcaccgacgtggtgaggcagagcatcctccggaggtcccctggggccgaggaggttcagagtcaggagcagacacgccaagatgcggagaagtccgataccagccctgtggccgggaagaaagcttcacatgatggccccaaaagaaaggggttcttgctgagtaaatttaggtcagctacccggggagagataattacaccaaagactgacactggaagaagctatagccttgaccttgatggccagcacttcaggtcacttaagtcccccccgggcagtgatcggggttctaccggatcaagcgatctcaacgaccaggagccgggacctagaacgcccaagagcagtcgctctaatggtgttacacctggtacacagtctagccccgccccctctacacgtactgtcacgtctgttatctcgcgagagtatggatttgaaaactctatggacctggccgccattgaaggtacatctcaagaactgacgaaaagccatcgccggaacacatctggcacaccttcaatcgccgtttccggaacaagcctttcgtccgatcaatcacggtctgagctggacctgagcgagtcctttaccgaggactccgaggatacagtttctatccgaagcaaaagtgtgcctggtgccttggataaagattccctcgaagagaccgaggaaagtatcgacgccctggtgtcctctcaactcagtacaaacactcacagattagcctcaggactaagcacctctagccaggctgggagcgataggaagtggacatatcttaatgtgcccgatgccgattcagataccaccagcctcaattccatgatgagcgtatacagtgagacgggcgactacggaaatgttaaggtcagtggagagatcctgttacacatttcctactgttacaaaactggtggcctctatatatttgtcaaaaattgtaggaatctggcgatcggtgacgagaagaagcagagaacggacgcatatgtcaagtcctacctgctaccagataagtcaaggaacaacaaaaggaagacaaagatcaggacagggacaaatcccgaatttaacgaaactctgaagtatacaatctcacatacccagctggagacgaggaccctgcaactctccgtgtggcactacgataggtttggcagaaattcatttctgggcgaggtggaaatccccttcgatagctggaactttgaaaacccaactgatgaatggtttgtgctgcagccaaaggtagagtttgcgccggacatcgggttgcaatataaaggagaactgactgtggtgcttcgatatatcccacctgaagagaatctgatgctcccaccagagcagctgcagggcaataagacgttcaagaagggcaaaaagaaagagtcccctgttattagcggtgggattctcgaagtcttcataaaggaggccaaaaacttgactgccgtgaagagcggggggaccagcgacagcttcgttaagggatatctcctgcctgatgattcaaaggccactaaacacaaaaccttagtcatcaaaaagagtgtgaatccgcagtggaaccacacattcatgttttccggcattcacccccaggacatcaaaaacgtctgccttgagctcactatctgggacaaggaagccttcagtagtaacattttccttggcggggttaggcttaatagtggctccggagtgtcacacggaaagaacgtggattggatggattctcagggggaggagcaacgtctgtggcaaaagatggcgaataatcctggcacaccattcgaaggcgtcttaatgctgcgcagttctatggggaaatgccgactgtag

SEQ ID NO: 61986 - DNA, 2259 bp, Artificial Sequence
  derived and/or modified sequence
atgagcaagaacagcgagttcatcaacctgtccttcctgctggaccacgagaaggagatgatcctgggcgtgctgaagagagatgagtacctgaagaaggtggaggacaagaggatcaggaagctgaagaatgagctgctggaggccaagagaagaagtggcaagacccagcaggaggccagccgggtgtgtgtgcactgccacaggaacctgggcctcatctttgacagaggagacccctgccaggcctgcagcctgcgggtgtgcagagaatgtcgggtggccggccccaacggctcctggaagtgcaccgtgtgtgacaagatcgcccagctgcgcatcatcaccggggagtggttctttgaggagaaggccaagcgcttcaagcaggtgaatgtgctgggcacagatgtggtgcggcagagcatcctgcggcgcagccctggagctgaggaggtgcagagccaggagcagacccggcaggatgctgagaagagtgacaccagccctgtggccggcaagaaggccagccatgatggccccaagaggaagggcttcctgctgagcaagttccgcagcgccaccagaggagagatcatcacccccaagacagacaccggccgcagctacagcctggacctggatggccagcacttccgcagcctgaagagccccccaggcagtgaccggggcagcacaggcagcagtgacctgaatgaccaggagcccggccccaggacccccaagagcagccgcagcaatggagtgaccccaggcacccagagcagccctgcccccagcaccaggacagtgaccagcgtcatcagccgggagtatggctttgagaacagcatggacctggccgccatcgagggcaccagccaggagctgaccaagagccacagaagaaacaccagcggcacccccagcattgctgtgtctggcaccagcctgagcagtgaccagagccgctctgagctggacctgtctgagagcttcacagaagattctgaggacacagtgtccatccgcagcaagtctgtgcctggggccctggacaaggacagcctggaggagacagaggagagcattgatgccctggtgagcagccagctgagcaccaacacccaccggctggccagcggcctgagcaccagcagccaggccggcagtgacaggaagtggacctacctgaatgtgcctgatgctgacagcgacaccaccagcctgaacagcatgatgtctgtgtacagcgagaccggggactatggaaatgtgaaggtgtctggagagatcctgctgcacatctcctactgctacaagacaggaggcctgtacatctttgtgaagaactgcaggaacctggccatcggagatgagaagaagcagaggacagatgcctacgtgaagagctacctgctgcctgacaagagcaggaacaacaagaggaagaccaagatcagaacaggcaccaaccctgagttcaatgagaccctgaagtacaccatcagccacacccagctggagaccaggaccctgcagctgtctgtgtggcactatgacagatttggaagaaattccttcctgggggaggtggagatcccctttgacagctggaactttgagaaccccacagatgagtggtttgtgctgcagcccaaggtggagtttgccccagacatcggcctgcagtacaagggggagctgactgtggtgctgcgctacatccccccagaggagaacctgatgctgcccccagagcagctgcagggcaacaagaccttcaagaagggcaagaagaaggagagccctgtgatcagcggcggcatcctggaggtgttcatcaaggaggccaagaacctgacagctgtgaagagcggcggcaccagtgacagctttgtgaagggctacctgctgcctgatgacagcaaggccaccaagcacaagaccctggtgatcaagaagtctgtgaacccccagtggaaccacaccttcatgttcagcggcatccacccccaggacatcaagaatgtgtgcctggagctgaccatctgggacaaggaggccttcagcagcaacatcttcctgggcggcgtgcggctgaacagcggcagcggcgtgagccacggcaagaatgtggactggatggacagccagggcgaggagcagaggctgtggcagaagatggccaacaaccctggcaccccatttgaaggagtgctgatgctgcggagctccatgggcaaatgtcggctgtag

SEQ ID NO: 61987 - DNA, 2259 bp, Artificial Sequence
  derived and/or modified sequence
atgagcaagaacagcgagttcatcaacctgagcttcctgctggaccatgaaaaggaaatgatccttggggtgctcaaaagggatgagtatcttaaaaaggtggaggacaagcgtattcgtaagctgaagaacgagctgttggaggcaaaacggcggagcgggaaaactcagcaggaggcctctagggtatgcgtccactgtcatcggaatctgggattgatctttgaccgtggagacccttgccaagcatgctctctaagagtgtgccgtgagtgtagggtcgccggtccaaatggcagttggaagtgtactgtttgtgacaaaatcgctcagcttcgaatcattacaggcgagtggttcttcgaggagaaagccaaacgtttcaagcaggtcaatgtcctcggaaccgatgtggtgcggcagagcatacttaggcggagtccaggagcagaggaagttcagtctcaggagcaaaccaggcaggacgccgagaagagtgatacttctcctgtggcggggaagaaagcctcccacgacggtcctaagaggaagggtttcttactgagtaagtttagatcagctactagaggagaaatcatcaccccaaaaacagatactgggcggagctatagtctcgatttggacggacagcatttccgaagtctcaaatccccccctggatctgaccgtggatcaacaggaagttccgacctcaacgatcaggagccgggtcctagaacccctaaatcttcgcggtctaacggcgtaactcctgggacacagtccagcccagctccttccactcgcaccgtgacgtctgtcatttcaagagaatacggtttcgaaaattccatggatctggcagccatcgaggggacgtcccaagagctgacgaagagtcatcgacgcaacacgagcggcactccgtccattgcagtgagcggcacgagtttgagctcagaccaaagccgaagcgaactcgatctgtccgaatcgttcacagaagactccgaagataccgtgtccatccgcagcaagagcgtaccaggagccctcgataaagacagccttgaagagaccgaagaatccatcgatgccctcgtatcgagtcagctcagcacgaatactcacagactcgcttctggcctctcaacatccagtcaggccggctcagacaggaagtggacttacctgaacgtgcctgacgcagattcagatacaaccagccttaactcaatgatgtcagtgtacagcgagactggtgactacggcaatgtgaaggtctcaggggagatcctgttgcacattagctactgctacaaaactggtgggctctatatcttcgtgaagaactgccggaatctggctataggagacgagaagaagcagcggacagacgcttatgtcaaatcctacctgctgcctgacaaatcccgcaacaataaaagaaagaccaagatcaggaccggcacaaacccagagttcaacgagactctgaaatacacaatcagccacacacagctggagacgcgtaccctccagcttagcgtgtggcattacgatcgtttcggacggaacagttttctgggagaagttgagatcccgttcgactcttggaacttcgaaaatcctacagacgaatggtttgtgctgcagccaaaggtggaatttgccccagacatcgggctgcaatacaagggtgaactgaccgtggttctgagatacattcctcctgaagagaatctcatgttgccgcctgagcagctccaggggaacaagacgttcaaaaagggcaaaaaaaaggagtctccagtcatatccggtggcatcctggaagtgttcattaaggaagccaagaatctaaccgccgttaagagcggaggtacctccgactcgtttgtcaagggctaccttcttccggatgactccaaggccactaaacataagacattggtaattaaaaaatctgtgaacccacagtggaatcacacattcatgttcagcggcattcatccacaggacattaagaacgtgtgcttggagctgacaatctgggacaaggaggccttctcctccaatatcttcctcggcggggtgaggctgaatagcggatcaggggtgagccacgggaaaaatgtggattggatggattcccagggagaagagcaaaggctgtggcaaaagatggccaataacccaggaacaccttttgagggggttctgatgctccggtctagcatgggtaagtgcaggctctag

SEQ ID NO: 61988 - DNA, 2259 bp, Artificial Sequence
  derived and/or modified sequence
atgagcaagaattcagagttcatcaatctgagctttctgctagaccacgaaaaggagatgattctgggagtcctgaaaagagatgagtacctgaagaaagtcgaagataagagaatcaggaaactgaagaatgaactgcttgaggccaagcgcaggagtggaaaaacgcagcaggaggcttctagggtctgcgttcactgccatcgcaacctcgggctgatcttcgatcggggtgacccctgtcaggcctgtagccttcgggtttgccgtgagtgccgggtcgcgggacccaacggttcctggaaatgtaccgtttgcgacaaaatcgcacagctgcggatcataacaggagaatggttctttgaggagaaggccaagagattcaagcaggttaatgttttgggaaccgatgtcgtccgacaatccatcctcaggagatccccaggtgccgaggaggtccagtctcaggagcaaacaagacaggatgcagagaaatccgacacaagccctgtggcaggtaagaaagcttcacacgacggtccgaagcgaaaggggttcttactctccaaatttaggtcagccacacgcggtgaaatcatcacacccaaaaccgatacagggagaagttactctctggacctggacggccaacatttcagatccttaaaatcacctcccggtagcgatcgaggctctacgggctccagtgacctcaatgatcaggaaccagggcctaggacgccaaaatcctcacgttctaatggcgtcacaccgggaacccagtcgagccccgcaccaagcacccggacagtgactagcgttataagccgcgagtatggctttgagaatagtatggaccttgcggcaattgaggggacgtctcaagagctgaccaaatctcatcgacgcaatacttcaggaacaccatcgattgctgtttcaggaacctcactgtccagtgatcagtcccgaagcgagctggatctgagtgaatctttcacagaggattctgaagacacagtgagcatccggtccaaatccgttcccggtgctttagacaaagacagcctagaagagactgaggaatctattgacgctcttgtgagctcacagctgtcaacaaatacacacagactggcctcagggttatccacatcctcacaagctgggagcgaccgcaaatggacctatcttaacgtgcccgacgcggatagtgatacgacatccctcaatagtatgatgtcagtgtacagcgagaccggggattatggcaacgtgaaggtctctggggagatccttctgcacatatcttattgttataagaccggagggttatacatcttcgtgaaaaattgcagaaacctggcaatcggggacgaaaaaaagcagaggaccgatgcttatgtgaaatcctatctgttaccagacaaaagcagaaacaacaaacggaagaccaagatccgcacaggaaccaatcccgaatttaacgaaaccctaaagtataccatctcccacactcagctggagacccggacactccagctgtccgtgtggcactatgatcggtttggcagaaatagtttcctgggtgaggtcgaaataccctttgattcatggaactttgagaatcccaccgatgaatggttcgtattacagccaaaggtagaatttgctcctgatattggactgcagtataagggtgaactcactgtggtgcttcggtacattccaccagaggaaaacttgatgctgcctcccgagcagcttcaagggaacaaaaccttcaagaagggcaaaaaaaaggaatctcccgtcatctccgggggtattttggaggtgtttattaaggaggcaaagaatctaactgccgtcaagtctggaggcactagcgacagttttgtgaagggctatctgctcccggacgacagtaaagccacaaagcacaaaactctggtgataaagaagtccgtgaatccccagtggaatcatactttcatgttttcaggcattcatccacaagatatcaaaaacgtgtgcttggagctcacaatctgggacaaggaggctttttccagtaacatcttcctgggcggtgtgcggctaaacagtggtagtggcgtgagccacggtaaaaatgttgattggatggattcccaaggtgaagaacaacggttgtggcagaaaatggcgaacaaccctggaaccccattcgaaggagtgctgatgctaaggtcctcgatgggtaaatgtcgcctgtag

SEQ ID NO: 61989 - DNA, 4704 bp, Artificial Sequence
  derived and/or modified sequence
tgttttctgcattctctcccagcggatctgattcctgttctgaagaattgaagttgagcatcgttagttaaattcagctgctgcctgactgtataccacagcaaaggctttggaaacatttttcagttaaaacaataatgactttcttggagtgtaatcccagtggaggctgttctacgtatagcctgaaagaatacttaactaccatacgcaattctgcagagaccttgtaaaaatcacactttacaccaaacaactgagtgattctgaattggttgggggaatcttagttgtagatatcaattcaccttcttgaagattcaaccactgctactcagagctgctgctgaaataccatgtctaagaactcagagttcatcaatctgtcatttttattagatcatgagaaggaaatgatcctgggcgtcctaaagagagatgaatatttgaaaaaagtggaggacaagagaataaggaagctgaaaaatgaactcttagaagcaaaacgtagaagtgggaaaactcaacaagaggccagcagagtttgtgttcactgtcacagaaacctgggcctaatctttgaccggggagacccttgtcaggcttgctcactgagggtatgcagggagtgtcgagttgcaggccccaatggcagctggaagtgcactgtctgtgacaaaatcgcgcagctaaggattataactggtgagtggttttttgaagaaaaggcaaaacgtttcaagcaagtcaatgttctcggcactgatgttgtccgacagtccattttaagaagaagtccaggagctgaagaagtacagagccaagagcaaacccgccaggatgcagaaaagtcagacacttcacctgttgctgggaagaaggccagccatgatgggcccaagagaaagggatttcttcttagcaagttcagatcggcaaccagaggagaaatcataactcccaaaactgacactgggcggagctatagcttggacttagacggtcaacattttcggagtttaaaatcacctcctggttcagacaggggaagcactggctcatcagatctcaatgaccaggaacctggtcctaggaccccgaagagcagtcggagcaatggtgtgaccccaggcactcagagttcaccagccccaagcacacgaactgtgacctcagtcatcagtagagagtatggttttgaaaattccatggatttggctgctattgaaggtacctctcaggagctcacaaagagtcaccgcagaaacacttctggcacaccttccatagcagtgtctggaacctctctctcctcagatcagagtcgatctgagttagatttgagtgagtcatttacagaagactcagaggatactgtaagcataagaagcaagtctgtccctggggctttagacaaggactccttggaagagactgaagaaagcattgatgccttagtgtcctcgcagttatctacaaacactcaccgtctggcaagtggcctatcaactagttctcaagcaggttctgacaggaagtggacctacctaaatgtgcctgatgctgactcagacactaccagccttaacagcatgatgagcgtttacagtgaaacgggagactatggcaacgtgaaagtcagtggtgaaatccttctccatatcagctactgctacaaaactggtgggctgtacatttttgtcaagaattgcagaaatctggccataggagatgaaaagaaacagaggacagatgcttatgtcaagtcatatcttcttcctgacaagtcccggaacaacaagcgtaagaccaaaatcagaacaggcaccaatccagaattcaatgaaacactaaagtacactatcagccatacccagctggaaacaagaactctgcagctctcagtctggcactatgatcgatttggacgtaatagcttcctcggggaagtagagattccttttgactcatggaactttgaaaatccaactgatgagtggtttgtgcttcaacccaaggtggagtttgctcctgatattggccttcaatacaaaggagagctgacagttgttttacgttacattcccccagaagagaacctgatgcttccaccagaacaactccaaggaaataagacttttaaaaagggaaagaagaaggagtcacctgtaatctctggaggaatactagaagtgttcatcaaagaggcaaagaatttgacagcagtgaagtcaggaggcacttctgatagctttgtgaagggctacctgctccctgatgatagcaaagccaccaagcacaaaactctggtaataaaaaagagtgttaaccctcagtggaatcatacattcatgttcagtggcatccatccccaggatataaagaatgtttgcctagaacttactatctgggacaaggaggccttttccagcaacatctttctgggaggagttcgtttgaattctggaagtggtgtgagccatgggaagaacgtggattggatggactctcagggggaagagcagcgcctttggcagaagatggccaacaaccctggaactccctttgagggtgtactcatgcttcgttccagcatgggaaaatgtaggctctaaagggaccagttctccaagaatgaggccaccaggacctatctggctgtcttttcctaccattagcaaactgagacctgggattctgcttccctgccatttctcacctgacagtgttgggacatgaggggagagatgtcagtagtatgaacatttagggtcttgctgagtgcctaaaaaacatatatttccatccaatcaaggccttcttgattggatgatagaaagtgtactacttgtcctgtcaacaagcaaattgtgcaaaggcttatagggtttatgccataaaagaaatggcacaagcctccatttgctaattataagttactttagatttcctcaaatcctttgaagagaaagaggaccactgagaaggtagatcacttgaaaagtcagaagaaaggatactggccaacttttactcaccctaggaatccacatgatctcaagaaggcatggtggagatggttgcttgagcaaggggattgtcctgttattgcagcaaacttgtggattaaccaagtagtatttcaagatggattgacagggctttctatgattactatagaatttatcatctaaatcagtttactttttagaacaaagagagctaaataactacatcagaacgattgatgttgattagaattgacctgggaaaattgggatgtagggtcaccctactgatgacctaagagagctctgttttaaacatttattttataaaatgttctaagccattaactaaaaggaaatgagatataatggtcaattgatataccttttcacattgtgttcactgacgagactagtttaatgaaaaaggaggtactctacctgctattttacttctgttcctcttctgccctgttatgggagagaatcaaagactccatctgctctcttcccccttgttttctccttcactgagtttttcttatctccttttgcagtggttaactattgtcacaataatgctgaatgaaaaaacacaccaaatgtcagtggcttaaaatgaccatcctttttctcacagttatgaagattggctatggcacctctgcttcctgctataggcctgaggttctagggcttcttatgcctcatcctctttaagccaaagggatagccagagcatcttgatggcagaagtgcaataagatgagccccactgctcgggtacattttcagcccctggttgtgtcatgtctactgatatctcattggtcaaaggaagtcagagggccaagatgaagaggcagggaaatatgcactgcccacagtgaagccatgacaagagtgaggatgcaggaaggcatgaagaattggggccaacagttcaatctaccataccttctctcacctggaattccagatgcttgagctacgaaacttagatgcaaagaaagttaaagctagaaggaacctcaggcccagttgctcattttgcagattccaaatgtgaatttcagagagctgagataacttgcccaaggccatatagaggctgtgactaaatctggacttaaatccagactatcaatcttaggccagtgttcttttttcaatatagtccttggcataatgctatgcttattaggtagataaaagggcttatgtcaagaaatttggagcagagtctgattacttgagcatgaacatacccgaccaaggtatgttctggagtcatattctagcctctgagctcattttttcatgcgagttcatataaaatcctcgaaagtttagaaactaggttttagtagtaacggagctagaatcatcttcgggcttattcctgctagttgttccatatttctagatttcatcttgaattttgaaaactgatttaagaatatatttagtattattattagtaagggaatacgcaatccagtttcaattttattcagaagtaggtcacctaattctagaaaatggttattagtctagtgtcgcttagcaaggtacttaaaagaaaatctgcacatatccttgtgctgcccttcttaaaaacagaaaacaaaaagtgtaagatcatcattgcttcccacataggaaaaataaaatgtcttcagacttgatgtgactc

SEQ ID NO: 61990 - protein, 730 aa, Artificial Sequence
  derived and/or modified sequence
MSKNSEFINLSFLLDHEKEMILGVLKRDEYLKKVEDKRIRKLKNELLEAKRRSGKTQQEASRVCVHCHRNLGLIFDRGDPCQACSLRVCRECRVAGPNGSWKCTVCDKIAQLRIITGEWFFEEKAKRFKQVNVLGTDVVRQSILRRSPGAEEVQSQEQTRQDAEKSDTSPVAGKKASHDGPKRKGFLLSKFRSATRGEIITPKTDTGRSYSLDLDGQHFRSLKSPPGSDRGSTGSSDLNDQEPGPRTPKSSRSNGVTPGTQSSPAPSTRTVTSVISREYGFENSMDLAAIEGTSQELTKSHRRNTSGTPSIAVSGTSLSSDQSRSELDLSESFTEDSEDTVSIRSKSVPGALDKDSLEETEESIDALVSSQLSTNTHRLASGLSTTSLNSMMSVYSETGDYGNVKVSGEILLHISYCYKTGGLYIFVKNCRNLAIGDEKKQRTDAYVKSYLLPDKSRNNKRKTKIRTGTNPEFNETLKYTISHTQLETRTLQLSVWHYDRFGRNSFLGEVEIPFDSWNFENPTDEWFVLQPKVEFAPDIGLQYKGELTVVLRYIPPEENLMLPPEQLQGNKTFKKGKKKESPVISGGILEVFIKEAKNLTAVKSGGTSDSFVKGYLLPDDSKATKHKTLVIKKSVNPQWNHTFMFSGIHPQDIKNVCLELTIWDKEAFSSNIFLGGVRLNSGSGVSHGKNVDWMDSQGEEQRLWQKMANNPGTPFEGVLMLRSSMGKCRL

SEQ ID NO: 61991 - DNA, 2193 bp, Artificial Sequence
  derived and/or modified sequence
atgagcaagaacagcgagttcatcaacctgagcttcctgctggaccacgagaaggagatgatcctgggcgtgctgaagagagacgagtacctgaagaaggtggaggacaagagaatcagaaagctgaagaacgagctgctggaggccaagagaagaagcggcaagacccagcaggaggccagcagagtgtgcgtgcactgccacagaaacctgggcctgatcttcgacagaggcgacccctgccaggcctgcagcctgagagtgtgcagagagtgcagagtggccggccccaacggcagctggaagtgcaccgtgtgcgacaagatcgcccagctgagaatcatcaccggcgagtggttcttcgaggagaaggccaagagattcaagcaggtgaacgtgctgggcaccgacgtggtgagacagagcatcctgagaagaagccccggcgccgaggaggtgcagagccaggagcagaccagacaggacgccgagaagagcgacaccagccccgtggccggcaagaaggccagccacgacggccccaagagaaagggcttcctgctgagcaagttcagaagcgccaccagaggcgagatcatcacccccaagaccgacaccggcagaagctacagcctggacctggacggccagcacttcagaagcctgaagagcccccccggcagcgacagaggcagcaccggcagcagcgacctgaacgaccaggagcccggccccagaacccccaagagcagcagaagcaacggcgtgacccccggcacccagagcagccccgcccccagcaccagaaccgtgaccagcgtgatcagcagagagtacggcttcgagaacagcatggacctggccgccatcgagggcaccagccaggagctgaccaagagccacagaagaaacaccagcggcacccccagcatcgccgtgagcggcaccagcctgagcagcgaccagagcagaagcgagctggacctgagcgagagcttcaccgaggacagcgaggacaccgtgagcatcagaagcaagagcgtgcccggcgccctggacaaggacagcctggaggagaccgaggagagcatcgacgccctggtgagcagccagctgagcaccaacacccacagactggccagcggcctgagcaccaccagcctgaacagcatgatgagcgtgtacagcgagaccggcgactacggcaacgtgaaggtgagcggcgagatcctgctgcacatcagctactgctacaagaccggcggcctgtacatcttcgtgaagaactgcagaaacctggccatcggcgacgagaagaagcagagaaccgacgcctacgtgaagagctacctgctgcccgacaagagcagaaacaacaagagaaagaccaagatcagaaccggcaccaaccccgagttcaacgagaccctgaagtacaccatcagccacacccagctggagaccagaaccctgcagctgagcgtgtggcactacgacagattcggcagaaacagcttcctgggcgaggtggagatccccttcgacagctggaacttcgagaaccccaccgacgagtggttcgtgctgcagcccaaggtggagttcgcccccgacatcggcctgcagtacaagggcgagctgaccgtggtgctgagatacatcccccccgaggagaacctgatgctgccccccgagcagctgcagggcaacaagaccttcaagaagggcaagaagaaggagagccccgtgatcagcggcggcatcctggaggtgttcatcaaggaggccaagaacctgaccgccgtgaagagcggcggcaccagcgacagcttcgtgaagggctacctgctgcccgacgacagcaaggccaccaagcacaagaccctggtgatcaagaagagcgtgaacccccagtggaaccacaccttcatgttcagcggcatccacccccaggacatcaagaacgtgtgcctggagctgaccatctgggacaaggaggccttcagcagcaacatcttcctgggcggcgtgagactgaacagcggcagcggcgtgagccacggcaagaacgtggactggatggacagccagggcgaggagcagagactgtggcagaagatggccaacaaccccggcacccccttcgagggcgtgctgatgctgagaagcagcatgggcaagtgcagactgtag

SEQ ID NO: 61992 - DNA, 2193 bp, Artificial Sequence
  derived and/or modified sequence
atgagcaaaaattccgaatttatcaacctctctttcctcctagaccacgagaaagagatgatactcggtgtgttgaaacgcgacgagtatttgaaaaaggtagaagataaaagaatacgaaagctgaagaacgagctgttagaggccaaacggaggtctgggaaaacccagcaggaggcttccagagtgtgtgtccactgccaccgcaaccttgggctgatattcgatagaggagatccatgtcaggcttgttcacttagggtgtgtagggaatgccgagttgcagggccaaacggaagctggaaatgtaccgtctgtgacaagattgcacagctgcgcattatcactggagagtggttctttgaggaaaaggctaagcggttcaagcaagtgaatgtcctggggaccgatgtggttcgacagtcaatcctgcggcggagtcccggggctgaggaagtacagtcccaagagcaaacgagacaagacgctgagaaatctgacaccagccctgtagcggggaaaaaagcgagccacgatggtcctaagcgaaaagggttccttctgagcaaattccgctccgcgactagaggcgagattattactcccaagacagatactggccgaagttattcgctggacttggacggccagcatttcaggtctttgaagagtcctccaggatcggatcggggttcaacaggatccagtgacttgaacgaccaggaacccgggccgagaacccctaaatcttccaggagtaacggtgtgacacccggcacacaatcctctccagctccaagtaccaggaccgtgacctcagtgatctctcgagaatatggattcgaaaattccatggacctggccgctatcgaggggacttctcaggaactgaccaagtcgcataggagaaatacatctggcactccaagcatagctgtgtcgggtacaagcctcagcagcgatcagtctcgaagtgagctggatctgagcgagagtttcactgaagacagtgaggacactgtgtcaattcgaagtaagagcgtgccaggagctttagataaggattcccttgaggaaacggaggagtccattgacgccctggtgagtagtcagttaagtactaacacacaccgcctcgcttccggtctgtccactacgagcctgaactcaatgatgtctgtatacagcgaaaccggtgactatggaaatgtgaaggtgtccggcgagatcctgctccatatatcatattgttacaagaccggggggctgtacatcttcgtcaagaactgtagaaatttagcgataggagacgaaaaaaaacagaggactgacgcatacgtaaaaagctatctgcttcctgacaagtctcgaaacaataagaggaagactaagattcgcacaggaacgaaccctgagtttaacgagaccctgaagtacacaatttcccacacccagctggagaccaggaccctccagctctccgtctggcattacgacaggtttgggcgaaatagctttctgggtgaggtggagatcccgtttgactcctggaactttgaaaatcctaccgatgagtggtttgttcttcagcccaaagtggagttcgcccctgatatcggcctgcagtataagggcgaattgactgtcgttctgagatatattcctcctgaggagaacctcatgctgcctccggagcagctgcaaggcaacaaaacgtttaaaaaaggcaagaaaaaggaaagccctgtcatcagtggaggtatcctcgaagttttcatcaaagaggcaaagaacctaaccgctgtgaagtccggaggcactagcgatagctttgtgaaaggctatttactccccgatgatagcaaggccaccaagcacaagaccctcgtgatcaaaaaatcagtgaatcctcagtggaatcatacattcatgttttccggaatccaccctcaggacatcaaaaacgtgtgcctggagttgacgatttgggacaaggaagctttctcatccaatatcttcttgggcggagttcggctgaactctggctccggggtgtcacacggcaagaatgtggactggatggacagtcaaggggaagaacagcgactgtggcaaaagatggctaacaatcctggtacccccttcgaaggcgtgttgatgctgaggtcgagcatgggcaagtgcaggctttag

SEQ ID NO: 61993 - DNA, 2193 bp, Artificial Sequence
  derived and/or modified sequence
atgagcaagaattccgagttcattaatttgtctttcctgcttgatcatgaaaaggagatgattctaggtgtcttaaaacgggacgagtacttaaagaaagttgaagacaagcggatcagaaagcttaaaaacgaattgctagaggcaaaaaggcgcagcgggaaaacccagcaagaagcctcacgagtgtgcgtgcactgccatcgcaacctgggtctgatcttcgatcgcggcgacccctgccaggcatgctctctcagggtttgccgcgaatgcagagtggccgggcccaatggttcatggaagtgcaccgtgtgtgacaagatcgcgcagctcaggattataacgggtgagtggttcttcgaggagaaggctaagcggtttaaacaggttaacgttctgggcactgatgttgtccggcagagcatcctccgtaggtctcctggggctgaggaggtccagtcacaggagcaaacccgccaagacgccgagaaaagcgacaccagtcccgttgccggcaaaaaggcctcccatgacggccctaagaggaaaggttttctgttatcaaagttccggagtgcaacgcgaggtgagataattacccccaaaaccgacaccggtagatcctactcactcgatttggatggccagcactttagaagcctaaagagtcctccagggagtgatagaggcagtacagggtcctctgatctgaatgaccaagaaccgggcccgcggacccccaaatcaagtcggtccaatggagtaacgcccggaacccagtcttcgccagcacccagcacaagaaccgtaacatccgttatttcccgagaatatggctttgagaacagtatggatctggccgctatagagggaacctctcaagagctaaccaaatctcaccgtaggaacacttccggcaccccatctatcgctgtgagtgggacctccctctctagtgaccagagccgttctgagttggatctgagcgagagctttacagaagacagtgaagacacggtgtccatccgatctaagagcgtgcccggcgcattagataaagacagtctcgaagagacggaagaatcgatcgatgcactggttagcagtcaacttagtaccaatacgcatcgcctagcgagtgggctctccactacctccctgaattcaatgatgtccgtttactctgaaaccggggattatggaaacgttaaagtttcaggcgaaatcctgttgcacattagctactgctacaaaaccggcgggttgtatatctttgtcaaaaactgtcgtaacctggcaattggagacgagaagaagcagagaactgatgcatacgtgaagtcttacctgctacccgataaatcccgaaataataagagaaagactaagatccgcaccggtactaaccctgagtttaacgagacccttaaatacacaatatctcatacacagctggaaacacggacgctccagttgtccgtgtggcattacgaccgtttcggcagaaactcattcctgggtgaggtggaaattcctttcgatagctggaatttcgagaaccccacggacgagtggtttgttcttcaacctaaggtggagttcgcccctgacattggcctgcagtataagggggaattgactgttgtgctcagatacattccgccagaggagaacctcatgttaccccctgaacagttgcaggggaacaaaacgttcaagaaagggaagaaaaaggagagtcccgtgatttccggaggcatcctggaagttttcattaaagaagcaaagaacctcacagccgttaaatccggtgggaccagcgattcctttgtgaagggctatcttctgcctgatgattccaaggccacaaaacacaagaccctcgtgataaagaaaagcgtgaacccccagtggaaccacactttcatgttctctgggatccatccccaggacattaaaaacgtttgtctggagttgaccatatgggacaaggaagccttcagttccaatatttttctgggcggagtccggttgaactccgggagtggcgttagccacgggaagaatgtagattggatggacagccaaggggaggagcagcgcttgtggcagaagatggcaaacaaccctggaacaccttttgaaggcgtcttgatgctgaggtccagcatgggaaaatgtcgtttatag

SEQ ID NO: 61994 - DNA, 2193 bp, Artificial Sequence
  derived and/or modified sequence
atgagcaagaacagcgagttcatcaacctgtccttcctgctggaccacgagaaggagatgatcctgggcgtgctgaagagagatgagtacctgaagaaggtggaggacaagaggatcaggaagctgaagaatgagctgctggaggccaagagaagaagtggcaagacccagcaggaggccagccgggtgtgtgtgcactgccacaggaacctgggcctcatctttgacagaggagacccctgccaggcctgcagcctgcgggtgtgcagagaatgtcgggtggccggccccaacggctcctggaagtgcaccgtgtgtgacaagatcgcccagctgcgcatcatcaccggggagtggttctttgaggagaaggccaagcgcttcaagcaggtgaatgtgctgggcacagatgtggtgcggcagagcatcctgcggcgcagccctggagctgaggaggtgcagagccaggagcagacccggcaggatgctgagaagagtgacaccagccctgtggccggcaagaaggccagccatgatggccccaagaggaagggcttcctgctgagcaagttccgcagcgccaccagaggagagatcatcacccccaagacagacaccggccgcagctacagcctggacctggatggccagcacttccgcagcctgaagagccccccaggcagtgaccggggcagcacaggcagcagtgacctgaatgaccaggagcccggccccaggacccccaagagcagccgcagcaatggagtgaccccaggcacccagagcagccctgcccccagcaccaggacagtgaccagcgtcatcagccgggagtatggctttgagaacagcatggacctggccgccatcgagggcaccagccaggagctgaccaagagccacagaagaaacaccagcggcacccccagcattgctgtgtctggcaccagcctgagcagtgaccagagccgctctgagctggacctgtctgagagcttcacagaagattctgaggacacagtgtccatccgcagcaagtctgtgcctggggccctggacaaggacagcctggaggagacagaggagagcattgatgccctggtgagcagccagctgagcaccaacacccaccggctggccagcggcctgagcaccaccagcctgaacagcatgatgtctgtgtacagcgagaccggggactatggaaatgtgaaggtgtctggagagatcctgctgcacatctcctactgctacaagacaggaggcctgtacatctttgtgaagaactgcaggaacctggccatcggagatgagaagaagcagaggacagatgcctacgtgaagagctacctgctgcctgacaagagcaggaacaacaagaggaagaccaagatcagaacaggcaccaaccctgagttcaatgagaccctgaagtacaccatcagccacacccagctggagaccaggaccctgcagctgtctgtgtggcactatgacagatttggaagaaattccttcctgggggaggtggagatcccctttgacagctggaactttgagaaccccacagatgagtggtttgtgctgcagcccaaggtggagtttgccccagacatcggcctgcagtacaagggggagctgactgtggtgctgcgctacatccccccagaggagaacctgatgctgcccccagagcagctgcagggcaacaagaccttcaagaagggcaagaagaaggagagccctgtgatcagcggcggcatcctggaggtgttcatcaaggaggccaagaacctgacagctgtgaagagcggcggcaccagtgacagctttgtgaagggctacctgctgcctgatgacagcaaggccaccaagcacaagaccctggtgatcaagaagtctgtgaacccccagtggaaccacaccttcatgttcagcggcatccacccccaggacatcaagaatgtgtgcctggagctgaccatctgggacaaggaggccttcagcagcaacatcttcctgggcggcgtgcggctgaacagcggcagcggcgtgagccacggcaagaatgtggactggatggacagccagggcgaggagcagaggctgtggcagaagatggccaacaaccctggcaccccatttgaaggagtgctgatgctgcggagctccatgggcaaatgtcggctgtag

SEQ ID NO: 61995 - DNA, 2193 bp, Artificial Sequence
  derived and/or modified sequence
atgagcaagaacagcgagttcatcaacctgagcttcctgctggaccacgagaaggagatgatcctgggcgtactcaagagagacgagtatctgaaaaaggttgaagataaaagaattagaaaactgaagaatgagctactggaggcaaaacgccggagcggaaagacacaacaagaggcctctcgtgtgtgtgtgcattgtcaccgtaacttgggcctgattttcgataggggcgatccatgtcaggcatgttccctgagagtgtgcagggaatgtagagttgcaggaccaaacggctcctggaaatgcactgtgtgtgacaaaattgcccaactgagaatcatcaccggcgaatggttctttgaagagaaggcaaaaagattcaaacaggtcaacgtcttggggaccgacgtggtgcgccagtcaatcctgagacgctcccccggcgctgaggaagtgcagtcccaggagcaaacacgtcaagacgccgagaaatctgatacaagtccagtggctggcaagaaagccagccatgacggccccaagcgcaagggctttctcctttctaagttccggtcagctacccgcggagagatcattacgcctaagactgatacaggaaggtcctactccttggacctcgacgggcaacattttcggtctctgaagtcaccacccggctctgaccggggcagtacagggagcagtgacctcaatgatcaagagcccggacctaggactcctaagtcctcccgaagcaatggtgttacccctggcacccaaagctcacccgcgccatccactcgcacagttacttcagtgatctcaagggagtatggcttcgaaaattctatggacctcgctgcaatcgaagggacctcacaggaacttacgaagagccaccgcaggaacacctctggtactcccagtatagccgtgtccggcacatccttgtcgtccgatcaaagcagatcagagttggatctgagcgaatcctttacggaggactccgaggataccgttagtattagaagtaagtcagtgcctggcgccctcgataaggattctctggaagaaaccgaggagtcaatagatgctctggtttcaagccagctatcaacaaatacccaccgattagcgagcgggctttctacaacaagcctgaatagtatgatgagtgtttactctgagaccggagactatggaaatgtgaaggtcagtggcgagattcttctgcatattagctattgttataagacgggagggctgtacatcttcgttaaaaattgcaggaacctggccattggggacgagaagaagcaaagaaccgatgcttatgtgaagagctacctgctgcctgataaatcaagaaataataaaagaaagaccaagatccgcacgggcaccaatccggaattcaacgagacacttaagtatactatctcccacacccaactggagactcggactttacagctgtcagtatggcactacgataggttcggacgcaatagttttttgggcgaggtcgagataccctttgactcctggaatttcgagaaccctaccgatgagtggtttgtgttacagccaaaagtggagtttgcccctgatatcggtctgcaatacaagggggaactgacagtggtcctgagatatattccgccagaggagaacttaatgctgcctccggaacagctgcagggaaataagaccttcaaaaaggggaagaaaaaagagtctcccgttatctccggtggaatcctcgaagttttcatcaaggaggcaaaaaacctcaccgccgtgaagtctggaggaaccagtgactcttttgtgaaagggtatctgctacctgacgactccaaagccactaagcataaaacgttagttatcaagaaaagcgtcaatccccagtggaatcacacatttatgttttcaggcatccatcctcaggatatcaagaacgtttgcctggaactgacaatatgggacaaagaggcttttagctcaaatatcttcttaggaggcgtgagattgaactccggatccggcgtttcccatgggaagaacgttgactggatggactcacagggtgaagaacagaggctatggcagaagatggctaataacccgggcacaccattcgagggcgtcctgatgctgagaagcagtatgggcaagtgcagactttag

SEQ ID NO: 61996 - DNA, 2193 bp, Artificial Sequence
  derived and/or modified sequence
atgagcaagaacagcgagttcatcaacctgagcttcctgctggaccatgaaaaagagatgatcctgggcgtcttaaaacgtgatgagtatctaaaaaaagtggaagacaaaaggattcggaaactaaagaatgagttgctggaggcaaaaagaaggtccggaaaaacccagcaggaagcttccagggtctgtgtgcactgtcatcggaatctggggctgatattcgatcgcggcgacccgtgtcaggcttgcagcctacgggtgtgcagggagtgcagagtcgccggacccaatggatcatggaagtgcaccgtgtgcgataagatcgcgcagttgcgcataatcactggcgagtggttttttgaagagaaagccaagcggtttaagcaggttaacgtgctagggacagatgttgtgcgccaaagcattttacggagaagccccggcgctgaagaagtgcaaagccaggaacagactcggcaggatgcggaaaagagtgacacatcccccgtggccggtaagaaagcctctcatgatggtcctaaacgtaagggttttctgctgtccaagtttagaagcgctacaaggggagaaatcatcacaccaaagacagataccggacgctcttatagtctagacctggacggacagcactttcggagcttaaagtctccaccaggatcggatcgcggaagtacaggttcatccgacctgaacgatcaagagcccggtccaaggactcccaaatcaagtcggtccaatggggtcaccccggggacacagtcatcccctgcaccatcgacacgcactgtgacaagtgtcatttcacgcgaatatggctttgagaactccatggacctcgctgccattgagggtactagccaggagctgacaaaatcccataggcgcaacacctcggggactcctagtattgccgtgagcggcacaagtctctcatctgatcagagccgaagcgagctggatctgtcagagagcttcaccgaagattcagaggacacagtgagcattagatctaagagtgtccctggcgcactggacaaagactctttggaggagactgaggagagtatcgatgctttagtgtccagtcaattatcaacaaacacccatcgtttggccagcgggctgagcacaacttccctgaattccatgatgtctgtatactctgagacaggtgattacggcaatgtaaaggtttccggtgagatacttctccatattagctattgttataagaccggaggtttgtatatctttgttaagaattgtagaaatctggctataggcgacgaaaaaaagcaacggaccgacgcttacgttaaaagctacttgctcccggataaatcccgaaacaataagcgcaagaccaagatcaggaccggcactaacccagagttcaatgagacactgaagtataccataagtcatacccagttggagactaggactctgcagctgtctgtgtggcactacgacaggtttgggcgaaattcctttctcggtgaagtggagatcccttttgacagctggaattttgagaatcccacagatgagtggtttgtgctccagcctaaagtcgagttcgcaccagacattgggctgcagtataagggagaattgaccgtggtgctgagatatatcccccccgaagaaaatctgatgttgccacctgagcagctgcaggggaacaagacgtttaaaaaagggaaaaaaaaggagtcaccagttatatcggggggcatactggaagtctttatcaaagaagcgaaaaatctgaccgccgtcaagagcggtggtacttctgattcctttgtaaaggggtaccttttgcctgatgacagtaaagccacgaaacacaaaaccctggttataaaaaagtccgtgaacccccagtggaaccacaccttcatgtttagcgggatccatcctcaggacattaagaatgtgtgtctggaacttacgatttgggacaaagaggctttctcatcaaatattttcctggggggcgtccgacttaactctggctcaggcgtgtcccacggcaaaaacgtcgattggatggattcacaaggcgaggaacaacgcctgtggcagaaaatggccaataatcccggaacccccttcgaaggagtactgatgttacgctcatctatgggcaaatgtcgactgtag

SEQ ID NO: 61997 - DNA, 2193 bp, Artificial Sequence
  derived and/or modified sequence
atgtctaagaattccgaatttatcaatctgtcattcctgcttgaccatgaaaaggaaatgattctgggggtgctgaaacgcgacgaatatctgaagaaggtggaggataaacggatcagaaaactcaaaaacgagttgctggaagctaagagaagaagcggaaagacccaacaggaggcttcccgggtgtgtgtgcattgccatagaaatctgggattgattttcgatcggggtgatccctgccaggcttgttctctgcgggtgtgccgggagtgccgcgtagccggaccaaatggttcttggaagtgtaccgtttgtgacaaaatagcccagctccggattattacaggagaatggtttttcgaggagaaggctaaacgcttcaagcaggtcaacgtcctgggtaccgacgtggtgcgccagtccattctgcggagatcgcccggagcagaagaggtgcaatcccaggagcagacgcggcaagatgccgagaagagcgataccagtccagttgcagggaaaaaggccagtcacgacggacccaaacgtaaaggctttctgctgagcaagttccggtcagctactaggggtgagattattacacccaaaactgacaccgggagatcatacagcctggatctggacggccagcattttcgatcgttgaagtctcccccaggctctgatcggggaagcacaggctcaagcgacttgaatgaccaggagccaggacctcggaccccaaaatcctcgcgatcgaatggtgtgacacctggaacacagtcctccccagcaccttctacccgcacagtgactagtgtgatatcacgagagtacggctttgaaaacagcatggatctggcagccattgaggggactagtcaagagctcacaaagagccaccggagaaatacttcgggaacccctagtatcgccgtttctggcacctctttaagtagtgatcaatctcgatctgagctggacttgtcggaatcctttacggaggactcagaagacaccgtaagcatacggagtaaatcagtccccggtgccctagacaaggattcactcgaggagaccgaagagagtattgacgctcttgtatcctcacagctcagtacaaacacacaccgacttgcatctgggctcagcacaacatctctgaacagcatgatgagcgtgtatagtgaaacgggagactacgggaacgtgaaagtctccggagaaatccttttgcatatctcttactgttataagactggaggtctctatatatttgtgaagaactgtcgcaatttggccattggggatgaaaagaagcaacgaacagatgcctatgtgaagagctacctgcttccagataaatcgcggaataacaaacgcaaaactaagatccggactggtacaaacccagagtttaacgagactctaaagtataccatttcacacacgcagctagagacacgaacactacaattgagcgtatggcattacgatcgcttcgggcgaaattccttcctgggggaagtggagatcccgttcgactcctggaattttgagaaccctactgatgagtggtttgtcctccagccgaaggtcgagtttgcacccgatatcggtctgcagtataaaggcgaactcacagttgtgttgcgttatatcccccctgaggaaaacctgatgctcccacctgaacagttgcaggggaacaagacatttaagaaagggaaaaaaaaggagtcacccgttatctcaggcggtattctggaagtcttcattaaggaggctaagaacctgacagcggtcaagagcggcggtacaagtgattcgttcgttaaaggatatctgttgccggatgacagcaaggctacgaaacacaaaaccttggtgatcaaaaagtcagtgaatccccagtggaaccacactttcatgtttagtggcattcatccacaggacatcaagaatgtttgcctggaactgaccatctgggataaggaggcatttagctccaatatcttcctgggcggagttcgcttgaacagtggatcaggtgtgtcccacgggaaaaacgtcgattggatggactctcagggagaggagcagaggctgtggcaaaaaatggctaataaccccggtactccgttcgagggcgtattgatgctgcgcagttcaatgggcaagtgtcgactctag

SEQ ID NO: 61998 - DNA, 2193 bp, Artificial Sequence
  derived and/or modified sequence
atgagtaaaaacagcgagttcatcaacctgagcttcctcctcgaccatgagaaagaaatgattttgggcgtgctgaagcgcgacgaatacctgaagaaggtggaggataaaagaattaggaaactgaaaaacgagctcctggaggccaagagaaggagtggcaaaacacagcaggaggcatcccgggtctgtgtgcattgccaccgtaacctaggtcttatattcgaccgaggcgacccctgccaagcttgttccctgcgggtgtgtagagagtgcagggtggcgggacctaatggatcatggaaatgcacagtctgtgataaaattgcccagctgagaatcattaccggtgagtggttcttcgaggaaaaagctaagcgtttcaaacaagttaatgttctagggaccgacgtggttcgccagagcatcctgcggcgatctccaggcgcagaagaagttcagagtcaggagcagacgcgtcaggacgcagaaaaaagcgacacatccccagtggcaggaaagaaagcctcccatgatgggccaaagcgcaagggatttttgctgagcaaatttaggtcagcgacaaggggggaaattattacacccaaaacagataccggacggagctattcgctggatctggatgggcagcacttccgcagtctgaagtctcctccaggctctgatcgcggatctacaggcagcagcgacctcaatgaccaggaaccgggacctagaacccccaaaagctcccggtccaatggtgtcacccccggtactcagagttcccccgctccaagtacccggacagttacatccgttatcagtagagaatatggcttcgagaatagcatggacctggcagccattgagggtacgtctcaggagttgacaaaaagccacagacgcaacaccagcggaaccccgtcaattgccgtgagcggtaccagcctctcctccgaccaaagtcggtctgaactcgacttatcagagtctttcaccgaggacagcgaagatactgtgtccattcggtccaaatcagtgcccggtgcactcgacaaagacagcctcgaagagacggaagagtcgatcgatgcactggtgagctctcagctgagcacgaacactcatcgactggcctcagggctgtctaccacctctcttaactccatgatgtccgtgtactcagaaacaggagattacggcaacgtgaaggtctccggagagattttgctgcacatatcttattgttacaagacgggtggcctctacatttttgttaagaactgcagaaatctggcaattggtgacgagaagaagcagaggactgatgcatatgttaaatcttatttactccccgacaagagcaggaataataaacgcaaaacaaagatccgcaccggaacaaatccagaattcaacgagacacttaagtatacgatatctcacactcaattggaaacccggacactccagctgtcagtgtggcactatgatagattcggccgtaactcctttctgggcgaggtggagattccgttcgacagctggaacttcgagaaccccacagatgaatggttcgtactgcagcctaaggtagaattcgcacccgatatcggcctgcagtacaaaggcgagctgactgtggtcttgcggtacattccccctgaagagaacctgatgctgcccccagagcagttacagggtaacaaaactttcaagaaaggaaagaaaaaggagtcaccagtgatcagtggcggtatcttggaggtattcatcaaagaggcgaagaatctcactgctgtgaaaagtgggggaacgtctgactcctttgtaaaaggctacctgctgccggacgactcaaaggcaacaaaacacaagacgcttgtgatcaagaaaagcgtgaacccccagtggaatcacacctttatgttctctggaatccacccacaagatattaaaaacgtgtgcctggagcttactatatgggataaggaggcattcagctccaatattttcctgggaggcgtacgtttgaactctggttctggcgtgtcacacggtaaaaacgttgattggatggactcccagggcgaggagcagaggctgtggcagaaaatggctaacaatcctggtaccccttttgaaggggtgctaatgttacgatcgagtatggggaagtgtaggctatag

SEQ ID NO: 61999 - DNA, 4722 bp, Artificial Sequence
  derived and/or modified sequence
cacaagggtcaagtagtccagcattctacagtttgtgtgtttgagagaaaaataagcccataaaaacattctaaccttcagattaagtgttttctgcattctctcccagcggatctgattcctgttctgaagaattgaagttgagcatcgttagttaaattcagctgctgcctgactgtataccacagcaaaggctttggaaacatttttcagttaaaacaataatgactttcttggagtgtaatcccagtggaggctgttctacgtatagcctgaaagaatacttaactaccatacgcaattctgcagagaccttgtaaaaatcacactttacaccaaacaactgagtgattctgaattggttgggggaatcttagttgtagatatcaattcaccttcttgaagattcaaccactgctactcagagctgctgctgaaataccatgtctaagaactcagagttcatcaatctgtcatttttattagatcatgagaaggaaatgatcctgggcgtcctaaagagagatgaatatttgaaaaaagtggaggacaagagaataaggaagctgaaaaatgaactcttagaagcaaaacgtagaagtgggaaaactcaacaagaggccagcagagtttgtgttcactgtcacagaaacctgggcctaatctttgaccggggagacccttgtcaggcttgctcactgagggtatgcagggagtgtcgagttgcaggccccaatggcagctggaagtgcactgtctgtgacaaaatcgcgcagctaaggattataactggtgagtggttttttgaagaaaaggcaaaacgtttcaagcaagtcaatgttctcggcactgatgttgtccgacagtccattttaagaagaagtccaggagctgaagaagtacagagccaagagcaaacccgccaggatgcagaaaagtcagacacttcacctgttgctgggaagaaggccagccatgatgggcccaagagaaagggatttcttcttagcaagttcagatcggcaaccagaggagaaatcataactcccaaaactgacactgggcggagctatagcttggacttagacggtcaacattttcggagtttaaaatcacctcctggttcagacaggggaagcactggctcatcagatctcaatgaccaggaacctggtcctaggaccccgaagagcagtcggagcaatggtgtgaccccaggcactcagagttcaccagccccaagcacacgaactgtgacctcagtcatcagtagagagtatggttttgaaaattccatggatttggctgctattgaaggtacctctcaggagctcacaaagagtcaccgcagaaacacttctggcacaccttccatagcagtgtctggaacctctctctcctcagatcagagtcgatctgagttagatttgagtgagtcatttacagaagactcagaggatactgtaagcataagaagcaagtctgtccctggggctttagacaaggactccttggaagagactgaagaaagcattgatgccttagtgtcctcgcagttatctacaaacactcaccgtctggcaagtggcctatcaactaccagccttaacagcatgatgagcgtttacagtgaaacgggagactatggcaacgtgaaagtcagtggtgaaatccttctccatatcagctactgctacaaaactggtgggctgtacatttttgtcaagaattgcagaaatctggccataggagatgaaaagaaacagaggacagatgcttatgtcaagtcatatcttcttcctgacaagtcccggaacaacaagcgtaagaccaaaatcagaacaggcaccaatccagaattcaatgaaacactaaagtacactatcagccatacccagctggaaacaagaactctgcagctctcagtctggcactatgatcgatttggacgtaatagcttcctcggggaagtagagattccttttgactcatggaactttgaaaatccaactgatgagtggtttgtgcttcaacccaaggtggagtttgctcctgatattggccttcaatacaaaggagagctgacagttgttttacgttacattcccccagaagagaacctgatgcttccaccagaacaactccaaggaaataagacttttaaaaagggaaagaagaaggagtcacctgtaatctctggaggaatactagaagtgttcatcaaagaggcaaagaatttgacagcagtgaagtcaggaggcacttctgatagctttgtgaagggctacctgctccctgatgatagcaaagccaccaagcacaaaactctggtaataaaaaagagtgttaaccctcagtggaatcatacattcatgttcagtggcatccatccccaggatataaagaatgtttgcctagaacttactatctgggacaaggaggccttttccagcaacatctttctgggaggagttcgtttgaattctggaagtggtgtgagccatgggaagaacgtggattggatggactctcagggggaagagcagcgcctttggcagaagatggccaacaaccctggaactccctttgagggtgtactcatgcttcgttccagcatgggaaaatgtaggctctaaagggaccagttctccaagaatgaggccaccaggacctatctggctgtcttttcctaccattagcaaactgagacctgggattctgcttccctgccatttctcacctgacagtgttgggacatgaggggagagatgtcagtagtatgaacatttagggtcttgctgagtgcctaaaaaacatatatttccatccaatcaaggccttcttgattggatgatagaaagtgtactacttgtcctgtcaacaagcaaattgtgcaaaggcttatagggtttatgccataaaagaaatggcacaagcctccatttgctaattataagttactttagatttcctcaaatcctttgaagagaaagaggaccactgagaaggtagatcacttgaaaagtcagaagaaaggatactggccaacttttactcaccctaggaatccacatgatctcaagaaggcatggtggagatggttgcttgagcaaggggattgtcctgttattgcagcaaacttgtggattaaccaagtagtatttcaagatggattgacagggctttctatgattactatagaatttatcatctaaatcagtttactttttagaacaaagagagctaaataactacatcagaacgattgatgttgattagaattgacctgggaaaattgggatgtagggtcaccctactgatgacctaagagagctctgttttaaacatttattttataaaatgttctaagccattaactaaaaggaaatgagatataatggtcaattgatataccttttcacattgtgttcactgacgagactagtttaatgaaaaaggaggtactctacctgctattttacttctgttcctcttctgccctgttatgggagagaatcaaagactccatctgctctcttcccccttgttttctccttcactgagtttttcttatctccttttgcagtggttaactattgtcacaataatgctgaatgaaaaaacacaccaaatgtcagtggcttaaaatgaccatcctttttctcacagttatgaagattggctatggcacctctgcttcctgctataggcctgaggttctagggcttcttatgcctcatcctctttaagccaaagggatagccagagcatcttgatggcagaagtgcaataagatgagccccactgctcgggtacattttcagcccctggttgtgtcatgtctactgatatctcattggtcaaaggaagtcagagggccaagatgaagaggcagggaaatatgcactgcccacagtgaagccatgacaagagtgaggatgcaggaaggcatgaagaattggggccaacagttcaatctaccataccttctctcacctggaattccagatgcttgagctacgaaacttagatgcaaagaaagttaaagctagaaggaacctcaggcccagttgctcattttgcagattccaaatgtgaatttcagagagctgagataacttgcccaaggccatatagaggctgtgactaaatctggacttaaatccagactatcaatcttaggccagtgttcttttttcaatatagtccttggcataatgctatgcttattaggtagataaaagggcttatgtcaagaaatttggagcagagtctgattacttgagcatgaacatacccgaccaaggtatgttctggagtcatattctagcctctgagctcattttttcatgcgagttcatataaaatcctcgaaagtttagaaactaggttttagtagtaacggagctagaatcatcttcgggcttattcctgctagttgttccatatttctagatttcatcttgaattttgaaaactgatttaagaatatatttagtattattattagtaagggaatacgcaatccagtttcaattttattcagaagtaggtcacctaattctagaaaatggttattagtctagtgtcgcttagcaaggtacttaaaagaaaatctgcacatatccttgtgctgcccttcttaaaaacagaaaacaaaaagtgtaagatcatcattgcttcccacataggaaaaataaaatgtcttcagacttgatgtga

SEQ ID NO: 62000 - DNA, 4828 bp, Artificial Sequence
  derived and/or modified sequence
cacaagggtcaagtagtccagcattctacagtttgtgtgtttgagagaaaaataagcccataaaaacattctaaccttcagattaagttagatacaacaaaatttcaaaaattaggcagttttacaagtgctatgggaaaaatagcctaattaaatttttctctcctcttttttttctccaccgtcttagtgttttctgcattctctcccagcggatctgattcctgttctgaagaattgaagttgagcatcgttagttaaattcagctgctgcctgactgtataccacagcaaaggctttggaaacatttttcagttaaaacaataatgactttcttggagtgtaatcccagtggaggctgttctacgtatagcctgaaagaatacttaactaccatacgcaattctgcagagaccttgtaaaaatcacactttacaccaaacaactgagtgattctgaattggttgggggaatcttagttgtagatatcaattcaccttcttgaagattcaaccactgctactcagagctgctgctgaaataccatgtctaagaactcagagttcatcaatctgtcatttttattagatcatgagaaggaaatgatcctgggcgtcctaaagagagatgaatatttgaaaaaagtggaggacaagagaataaggaagctgaaaaatgaactcttagaagcaaaacgtagaagtgggaaaactcaacaagaggccagcagagtttgtgttcactgtcacagaaacctgggcctaatctttgaccggggagacccttgtcaggcttgctcactgagggtatgcagggagtgtcgagttgcaggccccaatggcagctggaagtgcactgtctgtgacaaaatcgcgcagctaaggattataactggtgagtggttttttgaagaaaaggcaaaacgtttcaagcaagtcaatgttctcggcactgatgttgtccgacagtccattttaagaagaagtccaggagctgaagaagtacagagccaagagcaaacccgccaggatgcagaaaagtcagacacttcacctgttgctgggaagaaggccagccatgatgggcccaagagaaagggatttcttcttagcaagttcagatcggcaaccagaggagaaatcataactcccaaaactgacactgggcggagctatagcttggacttagacggtcaacattttcggagtttaaaatcacctcctggttcagacaggggaagcactggctcatcagatctcaatgaccaggaacctggtcctaggaccccgaagagcagtcggagcaatggtgtgaccccaggcactcagagttcaccagccccaagcacacgaactgtgacctcagtcatcagtagagagtatggttttgaaaattccatggatttggctgctattgaaggtacctctcaggagctcacaaagagtcaccgcagaaacacttctggcacaccttccatagcagtgtctggaacctctctctcctcagatcagagtcgatctgagttagatttgagtgagtcatttacagaagactcagaggatactgtaagcataagaagcaagtctgtccctggggctttagacaaggactccttggaagagactgaagaaagcattgatgccttagtgtcctcgcagttatctacaaacactcaccgtctggcaagtggcctatcaactaccagccttaacagcatgatgagcgtttacagtgaaacgggagactatggcaacgtgaaagtcagtggtgaaatccttctccatatcagctactgctacaaaactggtgggctgtacatttttgtcaagaattgcagaaatctggccataggagatgaaaagaaacagaggacagatgcttatgtcaagtcatatcttcttcctgacaagtcccggaacaacaagcgtaagaccaaaatcagaacaggcaccaatccagaattcaatgaaacactaaagtacactatcagccatacccagctggaaacaagaactctgcagctctcagtctggcactatgatcgatttggacgtaatagcttcctcggggaagtagagattccttttgactcatggaactttgaaaatccaactgatgagtggtttgtgcttcaacccaaggtggagtttgctcctgatattggccttcaatacaaaggagagctgacagttgttttacgttacattcccccagaagagaacctgatgcttccaccagaacaactccaaggaaataagacttttaaaaagggaaagaagaaggagtcacctgtaatctctggaggaatactagaagtgttcatcaaagaggcaaagaatttgacagcagtgaagtcaggaggcacttctgatagctttgtgaagggctacctgctccctgatgatagcaaagccaccaagcacaaaactctggtaataaaaaagagtgttaaccctcagtggaatcatacattcatgttcagtggcatccatccccaggatataaagaatgtttgcctagaacttactatctgggacaaggaggccttttccagcaacatctttctgggaggagttcgtttgaattctggaagtggtgtgagccatgggaagaacgtggattggatggactctcagggggaagagcagcgcctttggcagaagatggccaacaaccctggaactccctttgagggtgtactcatgcttcgttccagcatgggaaaatgtaggctctaaagggaccagttctccaagaatgaggccaccaggacctatctggctgtcttttcctaccattagcaaactgagacctgggattctgcttccctgccatttctcacctgacagtgttgggacatgaggggagagatgtcagtagtatgaacatttagggtcttgctgagtgcctaaaaaacatatatttccatccaatcaaggccttcttgattggatgatagaaagtgtactacttgtcctgtcaacaagcaaattgtgcaaaggcttatagggtttatgccataaaagaaatggcacaagcctccatttgctaattataagttactttagatttcctcaaatcctttgaagagaaagaggaccactgagaaggtagatcacttgaaaagtcagaagaaaggatactggccaacttttactcaccctaggaatccacatgatctcaagaaggcatggtggagatggttgcttgagcaaggggattgtcctgttattgcagcaaacttgtggattaaccaagtagtatttcaagatggattgacagggctttctatgattactatagaatttatcatctaaatcagtttactttttagaacaaagagagctaaataactacatcagaacgattgatgttgattagaattgacctgggaaaattgggatgtagggtcaccctactgatgacctaagagagctctgttttaaacatttattttataaaatgttctaagccattaactaaaaggaaatgagatataatggtcaattgatataccttttcacattgtgttcactgacgagactagtttaatgaaaaaggaggtactctacctgctattttacttctgttcctcttctgccctgttatgggagagaatcaaagactccatctgctctcttcccccttgttttctccttcactgagtttttcttatctccttttgcagtggttaactattgtcacaataatgctgaatgaaaaaacacaccaaatgtcagtggcttaaaatgaccatcctttttctcacagttatgaagattggctatggcacctctgcttcctgctataggcctgaggttctagggcttcttatgcctcatcctctttaagccaaagggatagccagagcatcttgatggcagaagtgcaataagatgagccccactgctcgggtacattttcagcccctggttgtgtcatgtctactgatatctcattggtcaaaggaagtcagagggccaagatgaagaggcagggaaatatgcactgcccacagtgaagccatgacaagagtgaggatgcaggaaggcatgaagaattggggccaacagttcaatctaccataccttctctcacctggaattccagatgcttgagctacgaaacttagatgcaaagaaagttaaagctagaaggaacctcaggcccagttgctcattttgcagattccaaatgtgaatttcagagagctgagataacttgcccaaggccatatagaggctgtgactaaatctggacttaaatccagactatcaatcttaggccagtgttcttttttcaatatagtccttggcataatgctatgcttattaggtagataaaagggcttatgtcaagaaatttggagcagagtctgattacttgagcatgaacatacccgaccaaggtatgttctggagtcatattctagcctctgagctcattttttcatgcgagttcatataaaatcctcgaaagtttagaaactaggttttagtagtaacggagctagaatcatcttcgggcttattcctgctagttgttccatatttctagatttcatcttgaattttgaaaactgatttaagaatatatttagtattattattagtaagggaatacgcaatccagtttcaattttattcagaagtaggtcacctaattctagaaaatggttattagtctagtgtcgcttagcaaggtacttaaaagaaaatctgcacatatccttgtgctgcccttcttaaaaacagaaaacaaaaagtgtaagatcatcattgcttcccacataggaaaaataaaatgtcttcagacttgatgtgactc

SEQ ID NO: 62001 - protein, 288 aa, Artificial Sequence
  derived and/or modified sequence
MRSGGRGRPRLRLGERGLMEPLLPPKRRLLPRVRLLPLLLALAVGSAFYTIWSGWHRRTEELPLGRELRVPLIGSLPEARLRRVVGQLDPQRLWSTYLRPLLVVRTPGSPGNLQVRKAAPVTLQLLFLDGEEALKEWGPKDSLYGSRHLAQLMESIPHSPGPTRIQAIELFMLLDLLGAPNPTFYSHFPRTVRWFHRLRSIEKRLHRLNLLQSHPQEVMYFQPGEPFGSVEDDHIPFLRRGVPVLHLISTPFPAVWHTPADTEVNLHPPTVHNLCRILAVFLAEYLGL

SEQ ID NO: 62002 - DNA, 867 bp, Artificial Sequence
  derived and/or modified sequence
atgagaagcggcggcagaggcagacccagactgagactgggcgagagaggcctgatggagcccctgctgccccccaagagaagactgctgcccagagtgagactgctgcccctgctgctggccctggccgtgggcagcgccttctacaccatctggagcggctggcacagaagaaccgaggagctgcccctgggcagagagctgagagtgcccctgatcggcagcctgcccgaggccagactgagaagagtggtgggccagctggacccccagagactgtggagcacctacctgagacccctgctggtggtgagaacccccggcagccccggcaacctgcaggtgagaaaggccgcccccgtgaccctgcagctgctgttcctggacggcgaggaggccctgaaggagtggggccccaaggacagcctgtacggcagcagacacctggcccagctgatggagagcatcccccacagccccggccccaccagaatccaggccatcgagctgttcatgctgctggacctgctgggcgcccccaaccccaccttctacagccacttccccagaaccgtgagatggttccacagactgagaagcatcgagaagagactgcacagactgaacctgctgcagagccacccccaggaggtgatgtacttccagcccggcgagcccttcggcagcgtggaggacgaccacatccccttcctgagaagaggcgtgcccgtgctgcacctgatcagcacccccttccccgccgtgtggcacacccccgccgacaccgaggtgaacctgcacccccccaccgtgcacaacctgtgcagaatcctggccgtgttcctggccgagtacctgggcctgtag

SEQ ID NO: 62003 - DNA, 2021 bp, Artificial Sequence
  derived and/or modified sequence
catttgggtcgtgccattctcaggggaaccaaccccaatacctaagggaggctgggaggcgtgtcctcaggaccgtagttcttattggtttcgctgctcgctgtggggtgggctggtgcagccgcagctgttgcttattggcccaccgattccatggggaggaacttggctgggcctaaactcaatccgtggtctggtacaggtttcagggcaaagcggccatgcgttccgggggccgcgggcgaccccgcctgcggctgggggaacgtggcctcatggagccactcttgccgccgaagcgccgcctgctaccgcgggttcggctcttgcctctgttgctggcgctggccgtgggctcggcgttctacaccatttggagcggctggcaccgcaggactgaggagctgccgctgggccgggagctgcgggtcccattgatcggaagcctccccgaagcccggctgcggagggtggtgggacaactggatccacagcgtctctggagcacttatctgcgccccctgctggttgtgcgaaccccgggcagcccgggaaatctccaagtcagaaaggcagccccggtgaccctgcaactgctcttcttggatggtgaagaggcgctgaaggagtggggacccaaggactccctttacggttcccggcacctggcccagctcatggagtctatacctcacagccccggccccaccaggatccaggctattgagctctttatgcttcttgatctcctgggagcccccaatcccaccttctacagccacttccctcgcacggtccgctggttccatcggctgaggagcattgagaagcgtctgcaccgtttgaacctgctgcagtctcatccccaggaagtgatgtacttccaacccggggagccctttggctctgtggaagacgaccacatccccttcctccgcagaggggtacccgtgctccatctcatctccacgcccttccctgctgtctggcacacccctgcggacaccgaggtcaatctccacccacccacggtacacaacttgtgccgcattctcgctgtgttcctggctgaatacctggggctctagcgtgcttggccaatgactgtggagaggactgtgagagagaaggtcccagcgggggccagtgaagctcaggcaggatctgcctagggtgtgctggtttgtccttttcatacctttgtctcctaattgtgctacaattggaagaccttctttcttttgattgtctcaagctgccacccttcaaggacagggaagagaccactgtgggatgacagccagaggaataagaacttgctccctccccagaggtaaacacttggtccaaaggtttgcagggaccaaatactgttctttttttttttgagacggagtctcactgtgttgcccaggctggagtgcagtggtgcgatctcggctcactgcaaactccgcctcctgggttcacgccattctcctgcctcagcctcccaagtagctgggactacaggtgcccgccaccacgctggctaattttttgtatttttagtagagacggggtttcaccgtgttagccaggatggtctcgatctcctgaccttgtaatccgccagcctcggcctcccaaagtgctgggattacaggtgtgagccaccgcacctggcaaaatgctgttctttaagtcagcgaactgaaaaagtaaaagactgctgggtgtggtggctcacacctgtaatcccaacactttgagaggctgagggggaaggatcacccgaggtcaggagtttgagaccagcctggtcaacatggcgaaaccctgtctctactaaaaatacaataattagctgggcatggtggtgggcgcctgtaatctcagctgcttgggaggctgaggcaggagaatcacttgtacgcaggaggcggaggttgcagtgagccaagatcacaccactgcactccagcctgggcaacagagcgagactccatctcaataaataaataaataaataaatatttttt

SEQ ID NO: 62004 - DNA, 867 bp, Artificial Sequence
  derived and/or modified sequence
atgaggtccggagggagggggagacccagattgcgcctgggagagaggggtctgatggagccgctgctcccgcctaagagacgactgctcccacgggttaggttgctgcctctgctactagctctcgccgttggttccgcattctacaccatttggtctggctggcacaggcgaaccgaagagttacccctgggccgggaactccgggtgcccttgattggttctctgccagaagcacggttgaggcgagtggtgggacaactcgaccctcaacgcctgtggtcgacatacctgcggccactgctagtggtcagaacacctggaagcccagggaaccttcaggtaaggaaggccgccccggttacactacagttgctgtttcttgacggagaagaggctctaaaagaatggggaccaaaggactcgctgtatggctcacggcacctggcccaactcatggagtccattccccatagcccaggccccactcgtattcaagcgatcgaactgttcatgctgctcgatctgctcggcgctcccaaccctacattctattctcacttcccaaggacagtaagatggttccatcgtcttcgatctatagaaaaacggctgcatcgtctgaatttgcttcagagtcaccctcaagaagtcatgtacttccagcccggcgaaccatttggcagcgtagaggacgatcacatcccctttctgcgaagaggggtgccagttctgcacctgatcagtacaccttttcccgccgtgtggcacacacctgctgatactgaggtaaatttgcatccgcccaccgttcataatctctgccgaattctggcagtctttctggctgaatacctcggcctctag

SEQ ID NO: 62005 - DNA, 867 bp, Artificial Sequence
  derived and/or modified sequence
atgaggtctgggggccggggccggccccggctgcggctgggggagcggggcctgatggagcccctgctgccccccaagaggcggctgctgccccgggtgcggctgctgcccctgctgctggccctggccgtgggcagcgccttctacaccatctggagcggctggcacagaagaacagaggagctgcccctgggccgggagctgcgggtgcccctgattggcagcctgcctgaggcccggctgcggcgggtggtgggccagctggacccccagaggctgtggagcacctacctgcggcccctgctggtggtgaggaccccaggcagccctggcaacctgcaggtgaggaaggccgcccctgtgaccctgcagctgctcttcctggatggagaggaggccctgaaggagtggggccccaaggacagcctgtatggcagccgccacctggcccagctgatggagagcatcccccacagccctggccccacccgcatccaggccatcgagctgttcatgctgctggacctgctgggcgcccccaaccccaccttctacagccacttccccaggacagtgcgctggttccaccggctgcggagcattgagaagaggctgcaccggctgaacctgctgcagagccacccccaggaggtgatgtacttccagcctggagagccctttggatctgtggaggatgaccacatccccttcctgcggcggggcgtgcctgtgctgcacctgatcagcacccccttccctgctgtgtggcacaccccagctgacacagaggtgaacctgcacccccccaccgtgcacaacctgtgccgcatcctggccgtgttcctggccgagtacctgggcctgtag

SEQ ID NO: 62006 - DNA, 867 bp, Artificial Sequence
  derived and/or modified sequence
atgcggagcggcggccggggccggccccggctgcggctgggcgagcgaggcttaatggaacctctgctccctccaaaacggagactcctgccacgcgtccgcctcttgcctttgcttctggccctggcagttggctccgccttctataccatctggtctggatggcacaggaggacggaagaactgcccctggggcgtgaactgcgggtgcctctaattggatcactgcccgaagctagactgagacgcgtcgtggggcagcttgaccctcaacggctttggtcaacgtacctccggcctttgctcgtagtgcggacccccggctcaccaggtaacctgcaggtgcgcaaggccgcccccgtcactcttcagctgcttttcctggacggcgaggaggctctgaaggaatggggccctaaggacagtctctacgggtctagacatctcgcccagcttatggagagcatcccccattctcccggtccgacaagaattcaagcaattgaattattcatgctactcgatcttctgggggctccgaaccctacattctactctcacttccccaggacagttcgttggttccaccgcctccgcagcattgagaagaggctgcaccggttgaacctcttgcaatcccatcctcaggaggtgatgtatttccagcccggtgagccattcggctcagtggaagacgaccacatccctttccttaggcgaggagtgcctgttctccatctgatctcgacaccattccctgcagtgtggcacactcctgccgatacggaagtcaatttgcaccccccaacggtgcacaacttgtgtcggatcctggccgtgttcttggcagaatacctaggcctgtag

SEQ ID NO: 62007 - DNA, 867 bp, Artificial Sequence
  derived and/or modified sequence
atgcgcagtggcggtcgcggtcgaccaaggctgcgtctgggagaacgcggattgatggagccactgctgcccccaaaaaggcggcttcttccgagggttcggttactgcctctgctgctggccctggccgtcggtagcgctttctatacaatctggtcagggtggcaccgacgcacggaggagctccctctcggtcgtgaactccgtgtgccactgatcggctcactgccagaagctcgtttgcgcagggtggtgggacaactcgatccccaaagactgtggtcaacttatctaaggccacttctggtggtgaggacacctggcagtcccggtaacctgcaggtacggaaggcggctcctgtaaccctccagcttctgtttcttgatggcgaagaagcacttaaggagtgggggccaaaggatagtctgtacggcagccgccatttagcacaactcatggaatctataccccatagtcccggtcctacccgcattcaggctattgaactgttcatgctgttagatttgctcggagccccaaatcccaccttttacagccacttcccgcgaaccgtgagatggttccatcgcttgcggagtatcgagaagcggttacatcggctgaacctcctgcagtctcaccctcaagaagtgatgtactttcagcccggagaaccgtttggctcagtggaggacgaccacataccatttctcagacgaggggtgcctgtgttgcacctcatcagtacgccctttcccgcagtgtggcacactccagctgacactgaagtgaacctgcaccccccaactgtgcacaatctgtgccgtatattggcagtgtttttggctgaatacttggggctttag

SEQ ID NO: 62008 - DNA, 1113 bp, Artificial Sequence
  derived and/or modified sequence
atgaagaaggacgagcccccactagacttccccgataccctagagggcttcgagtatgcctttaatgaaaagggtcagctgcggcatatcaaaaccggagagcctttcgtcttcaactacagggaggacttgcaccgttggaaccagaaacgctatgaagccctcggcgaaatcatcaccaagtacgtgtacgaactgctggagaaggactgtaacctcaaaaaagtgtccattcctgtggacgccaccgagagcgaaccaaaaagtttcatctttatgtcagaagacgctctgacaaatccacagaaattaatggtactaattcacggcagtggtgtggtccgcgctggccagtgggcaagacgtttgattataaacgaggacttggattccggtacgcaaatccctttcatcaaacgggctgtagctgagggctacggggtcattgtgcttaatcccaacgagaattatatagaggtggagaaacctaaaatccatgtccagagtagcagcgactccagtgacgagcctgccgagaaaagggaacgtaaagacaaagtctccaaggaaaccaaaaagcggcgagatttttatgagaaatataggaacccccagcgtgaaaaagagatgatgcaactgtacatccgcgagaatggctctccagaggaacacgcaatctatgtttgggaccatttcatcgcccaggctgctgcagagaatgtattctttgttgcacattcatatgggggtctggcattcgttgagctcatgatccagcgcgaagctgatgttaaaaacaaggtgacagctgttgctctgaccgacagtgtgcataacgtgtggcaccaggaggctggcaagaccattagagaatggatgagggagaattgttgtaattgggtttcatccagtgagccactagacactagcgtggaaagcatgctccctgactgtccaagggtctctgcaggcacggatcggcacgaactgacgagttggaagagttttccctctatcttcaaattttttacagaagcgtcagaagcaaaaacctcctcactcaagcccgctgtaacacggagatctcatcgtataaaacatgaagagttatag

SEQ ID NO: 62009 - DNA, 1113 bp, Artificial Sequence
  derived and/or modified sequence
atgaaaaaagacgaaccaccgttagattttcctgataccttggaagggtttgagtacgctttcaacgaaaaaggccagttgcgccacatcaagacaggtgagccattcgtctttaactatagggaggacctccatagatggaaccagaagcgctatgaagctcttggagagatcattacaaagtatgtctacgagctcctggagaaagattgtaacctcaaaaaagtatcaatccctgtcgacgcaacagaatcagaacccaagtcgttcatctttatgagtgaagatgcattaaccaatccccagaagctgatggtgttaattcacggctcaggggtggttcgggccggccagtgggctcgacgtttgatcatcaatgaagatctggactccgggacgcagattccctttattaagcgcgcagtggccgagggatacggagtgatagtgctgaatccaaatgagaactatatagaggtcgaaaagcccaagatccacgtccagtcttcatcggatagtagcgatgaacctgctgagaagcgcgagcgcaaggacaaagtctccaaggaaactaagaagagaagggacttctatgaaaagtacagaaatccccaacgtgaaaaagagatgatgcagctatacatcagggaaaatggtagtcctgaggagcatgccatctacgtctgggaccacttcatcgcacaagccgccgccgagaatgtattcttcgtggcacatagttatggaggcctagccttcgtggaattaatgatacaaagagaggctgatgtcaaaaacaaagtgacggctgtggcactgactgattcagtacataacgtttggcaccaagaggcaggcaagactatccgagagtggatgagagaaaattgttgcaattgggtatcctccagcgaacccctcgatacttcagttgaatctatgttacctgactgccctagagtctctgctgggaccgaccgacatgagctgacttcttggaaaagctttccctccatttttaaattctttaccgaagcgagtgaagccaagaccagttccttgaaaccagccgtcacccggaggtcacacaggatcaagcatgaggagctgtag

SEQ ID NO: 62010 - DNA, 1113 bp, Artificial Sequence
  derived and/or modified sequence
atgaagaaagacgagcctcccctggactttcccgacactttagaaggatttgagtacgccttcaacgagaaaggacaactgagacatattaaaaccggagagccgttcgtgtttaactatcgcgaagacctgcaccgttggaaccagaaaagatacgaggccctgggcgaaattatcacaaaatacgtatatgagctactcgaaaaggattgcaatctcaagaaggtttccatcccagtagatgccaccgagtccgaaccaaagagtttcattttcatgagtgaagatgccctgactaaccctcagaagcttatggtgcttatccacggttctggggttgtaagggcgggacaatgggccaggcgtctgattatcaatgaggaccttgattccggcacacagattcccttcataaaacgcgccgtcgcggaaggatacggggtgatcgtgctgaatccaaacgaaaattatattgaggtggaaaaacctaaaattcacgtccagtcaagcagtgatagtagcgacgaaccagcagagaagagagagaggaaagacaaagttagtaaagaaaccaagaaacgaagagatttttacgagaagtatcggaatccgcaaagagagaaagaaatgatgcagctgtacattagggaaaacggaagtcctgaggaacacgctatctacgtgtgggatcatttcatcgcccaggcagccgcagaaaacgtgttcttcgtcgctcactcatacggcggacttgcatttgtagaattaatgatccagagggaggccgacgtcaagaataaagtgaccgccgtggccctcaccgatagtgtgcacaacgtttggcatcaagaagcaggaaaaacaataagagaatggatgagagaaaactgttgcaattgggtgagctcctctgagccacttgatacctctgttgagtccatgttgcccgattgccctagggtatcagcaggaactgaccggcacgaactgacctcatggaagtctttccctagcatattcaaattctttacggaagcttcagaggccaaaacctctagtcttaaacctgcagtaacccgccgaagccaccgcattaaacacgaagagttgtag

SEQ ID NO: 62011 - DNA, 1113 bp, Artificial Sequence
  derived and/or modified sequence
atgaagaaggacgagccccccctggacttccccgacaccctggagggcttcgagtacgccttcaacgagaagggccagctgagacacatcaagaccggcgagcccttcgtgttcaactacagagaggacctgcacagatggaaccagaagagatacgaggccctgggcgagatcatcaccaagtacgtgtacgagctgctggagaaggactgcaacctgaagaaggtgagcatccccgtggacgccaccgagagcgagcccaagagcttcatcttcatgagcgaggacgccctgaccaacccccagaagctgatggtgctgatccacggcagcggcgtggtgagagccggccagtgggccagaagactgatcatcaacgaggacctggacagcggcacccagatccccttcatcaagagagccgtggccgagggctacggcgtgatcgtgctgaaccccaacgagaactacatcgaggtggagaagcccaagatccacgtgcagagcagcagcgacagcagcgacgagcccgccgagaagagagagagaaaggacaaggtgagcaaggagaccaagaagagaagagacttctacgagaagtacagaaacccccagagagagaaggagatgatgcagctgtacatcagagagaacggcagccccgaggagcacgccatctacgtgtgggaccacttcatcgcccaggccgccgccgagaacgtgttcttcgtggcccacagctacggcggcctggccttcgtggagctgatgatccagagagaggccgacgtgaagaacaaggtgaccgccgtggccctgaccgacagcgtgcacaacgtgtggcaccaggaggccggcaagaccatcagagagtggatgagagagaactgctgcaactgggtgagcagcagcgagcccctggacaccagcgtggagagcatgctgcccgactgccccagagtgagcgccggcaccgacagacacgagctgaccagctggaagagcttccccagcatcttcaagttcttcaccgaggccagcgaggccaagaccagcagcctgaagcccgccgtgaccagaagaagccacagaatcaagcacgaggagctgtag

SEQ ID NO: 62012 - DNA, 1113 bp, Artificial Sequence
  derived and/or modified sequence
atgaagaaggacgaaccccctttagactttcccgacaccctggaaggctttgagtacgctttcaacgaaaaggggcagctacgccatataaagacaggtgagccgttcgttttcaattacagggaagatctacataggtggaatcagaagcggtacgaggccctgggtgagatcattactaagtatgtgtacgagctgctagaaaaagactgcaatctgaagaaagtctcaattccagtggacgcaactgaatctgagccaaaatcttttatattcatgagcgaagacgctctaaccaaccctcaaaagcttatggtgctcattcacgggtctggcgtggtacgcgctggacaatgggccaggcgcttgatcattaacgaagatctcgactctggcacccagatcccattcataaaacgagcagtggccgaaggatacggagtaattgtgcttaatcctaatgagaattatatcgaagttgagaaaccgaagattcacgtccagtctagctcagacagctccgatgagcccgccgagaaaagagagcgaaaggacaaggttagcaaggagaccaaaaaacgccgtgatttctacgagaagtacagaaatcctcagagggaaaaggaaatgatgcagttatatattcgcgaaaatggatcccctgaggagcatgctatatacgtgtgggatcactttattgcccaggcagctgctgagaatgtatttttcgtggctcacagttatggggggctcgcatttgtggagctgatgatccagcgcgaagccgatgtcaaaaacaaagtcacagcagtcgctctgactgactccgttcataatgtctggcatcaagaagcaggcaaaaccatccgcgagtggatgagagagaactgctgtaactgggtgtcctccagcgaacccctggacacgtcagtggagtccatgttacctgactgtcctagagtctcagcgggcaccgatcgccatgaactgacctcctggaaatcctttccctcaatttttaaattttttactgaggctagtgaggcaaagacatcctctctgaagcctgccgtcactagacgaagtcacagaatcaagcatgaagagctgtag

SEQ ID NO: 62013 - DNA, 1113 bp, Artificial Sequence
  derived and/or modified sequence
atgaagaaggatgagccccccctggacttcccagacaccctggagggctttgaatatgccttcaatgagaagggccagctgcggcacatcaagacaggagagccctttgtgttcaactaccgggaggacctgcaccgctggaaccagaagagatatgaggccctgggggagatcatcaccaagtatgtgtatgagctgctggagaaggactgcaacctgaagaaggtgtccatccctgtggatgccacagaaagtgagcccaagagcttcatcttcatgtctgaagatgccctgaccaacccccagaagctgatggtgctgattcatggcagcggcgtggtgcgggccggccagtgggcccggcggctcatcatcaatgaagacctggacagcggcacccagatccccttcatcaagagagctgtggccgagggctacggcgtgattgtgctgaaccccaatgaaaactacatcgaggtggagaagcccaagatccacgtgcagagcagcagtgacagcagtgatgagcctgctgagaagcgggagaggaaggacaaggtgtccaaggagaccaagaagaggcgggacttctatgagaagtacagaaacccccagcgggagaaggagatgatgcagctgtacatcagagaaaatggcagccctgaggagcacgccatctacgtgtgggaccacttcatcgcccaggccgctgctgaaaatgtgttctttgtggcccacagctatggaggcctggcctttgtggagctgatgatccagcgggaggctgatgtgaagaacaaggtgacagctgtggccctgacagacagcgtgcacaacgtgtggcaccaggaggccggcaagaccatccgggagtggatgagggagaactgctgcaactgggtgagcagcagcgagcccctggacacctctgtggagagcatgctgcctgactgcccccgggtgtctgctggaacagacagacatgagctgacctcctggaagagcttccccagcatcttcaagttcttcacagaggccagcgaggccaagaccagcagcctgaagccagctgtgacccggcgcagccaccgcatcaagcatgaggagctgtag

SEQ ID NO: 62014 - DNA, 1113 bp, Artificial Sequence
  derived and/or modified sequence
atgaagaaggacgagccccccctggacttccccgacaccctggagggctttgaatatgctttcaatgagaaagggcagcttagacatatcaaaactggagaacctttcgttttcaactatcgtgaggatctccaccggtggaatcagaagaggtatgaggccttgggggagataattactaagtatgtctacgagctgctggagaaagattgtaatctgaagaaggtgtctatcccagtagatgcaacagagtctgagccgaagagctttatattcatgtctgaggacgccctcaccaatccccagaagctcatggtgctcatccacgggagtggtgtcgtcagagctggtcagtgggccagaagactgattatcaacgaggaccttgattctggcactcaaatcccatttatcaaacgcgctgttgctgaaggatacggagtgattgtactgaacccaaatgagaactatattgaagtggaaaaaccaaaaattcatgtgcaaagctcatccgatagctctgacgaaccggccgagaagcgtgagagaaaggacaaagtctccaaggaaacaaaaaaaagaagggatttctatgaaaaataccggaatcctcagcgggagaaggaaatgatgcaactgtatattagggaaaacggatcccccgaagaacatgctatctacgtgtgggaccatttcatcgcccaggccgctgctgagaacgtgttcttcgtggcccattcatacgggggtctggcttttgtggagcttatgatccagagggaagccgatgtcaagaataaagtaacagcagtggcgcttactgactccgtccacaatgtttggcaccaagaggcgggaaagactatacgtgagtggatgcgagaaaactgttgcaactgggtcagcagcagcgagcctctcgacacaagcgtcgagtcaatgcttcccgactgtcctagagtgagcgctgggacagacagacacgaactgacttcctggaagtcattcccctctatctttaagttctttacagaggctagcgaggcaaaaacgtcctctctgaagcctgcagttaccaggcgctcccaccggattaaacatgaagagctgtag

SEQ ID NO: 62015 - RNA, 1113 nt, Artificial Sequence
  derived and/or modified sequence
augaaaaaagacgaaccaccguuagauuuuccugauaccuuggaaggguuugaguacgcuuucaacgaaaaaggccaguugcgccacaucaagacaggugagccauucgucuuuaacuauagggaggaccuccauagauggaaccagaagcgcuaugaagcucuuggagagaucauuacaaaguaugucuacgagcuccuggagaaagauuguaaccucaaaaaaguaucaaucccugucgacgcaacagaaucagaacccaagucguucaucuuuaugagugaagaugcauuaaccaauccccagaagcugaugguguuaauucacggcucaggggugguucgggccggccagugggcucgacguuugaucaucaaugaagaucuggacuccgggacgcagauucccuuuauuaagcgcgcaguggccgagggauacggagugauagugcugaauccaaaugagaacuauauagaggucgaaaagcccaagauccacguccagucuucaucggauaguagcgaugaaccugcugagaagcgcgagcgcaaggacaaagucuccaaggaaacuaagaagagaagggacuucuaugaaaaguacagaaauccccaacgugaaaaagagaugaugcagcuauacaucagggaaaaugguaguccugaggagcaugccaucuacgucugggaccacuucaucgcacaagccgccgccgagaauguauucuucguggcacauaguuauggaggccuagccuucguggaauuaaugauacaaagagaggcugaugucaaaaacaaagugacggcuguggcacugacugauucaguacauaacguuuggcaccaagaggcaggcaagacuauccgagaguggaugagagaaaauuguugcaauuggguauccuccagcgaaccccucgauacuucaguugaaucuauguuaccugacugcccuagagucucugcugggaccgaccgacaugagcugacuucuuggaaaagcuuucccuccauuuuuaaauucuuuaccgaagcgagugaagccaagaccaguuccuugaaaccagccgucacccggaggucacacaggaucaagcaugaggagcuguag

SEQ ID NO: 62016 - RNA, 1113 nt, Artificial Sequence
  derived and/or modified sequence
augaagaaagacgagccuccccuggacuuucccgacacuuuagaaggauuugaguacgccuucaacgagaaaggacaacugagacauauuaaaaccggagagccguucguguuuaacuaucgcgaagaccugcaccguuggaaccagaaaagauacgaggcccugggcgaaauuaucacaaaauacguauaugagcuacucgaaaaggauugcaaucucaagaagguuuccaucccaguagaugccaccgaguccgaaccaaagaguuucauuuucaugagugaagaugcccugacuaacccucagaagcuuauggugcuuauccacgguucugggguuguaagggcgggacaaugggccaggcgucugauuaucaaugaggaccuugauuccggcacacagauucccuucauaaaacgcgccgucgcggaaggauacggggugaucgugcugaauccaaacgaaaauuauauugagguggaaaaaccuaaaauucacguccagucaagcagugauaguagcgacgaaccagcagagaagagagagaggaaagacaaaguuaguaaagaaaccaagaaacgaagagauuuuuacgagaaguaucggaauccgcaaagagagaaagaaaugaugcagcuguacauuagggaaaacggaaguccugaggaacacgcuaucuacgugugggaucauuucaucgcccaggcagccgcagaaaacguguucuucgucgcucacucauacggcggacuugcauuuguagaauuaaugauccagagggaggccgacgucaagaauaaagugaccgccguggcccucaccgauagugugcacaacguuuggcaucaagaagcaggaaaaacaauaagagaauggaugagagaaaacuguugcaauugggugagcuccucugagccacuugauaccucuguugaguccauguugcccgauugcccuaggguaucagcaggaacugaccggcacgaacugaccucauggaagucuuucccuagcauauucaaauucuuuacggaagcuucagaggccaaaaccucuagucuuaaaccugcaguaacccgccgaagccaccgcauuaaacacgaagaguuguag

SEQ ID NO: 62017 - DNA, 921 bp, Artificial Sequence
  derived and/or modified sequence
atgaaaaaggatgagccacctctagacttcccagatacactcgagggtttcgaatacgcatttaacgagaagggtcagctacgccacatcaagactggcgaaccattcgtattcaattacagggaggatctgcacagatggaatcaaaaaaggtatgaagcgttaggagagatcattaccaagtacgtgtatgagctcctggagaaagactgcaacctcaagaaggtgtcaatccccgaaggctatggtgtcatcgtactcaaccccaacgaaaactacatcgaagtggaaaaacccaaaatccacgtgcagtctagttcagacagcagcgacgaaccagctgagaaacgggaacggaaggataaagtgtctaaggaaactaaaaagagaagggacttttatgaaaagtatcgaaatccacagcgggagaaggagatgatgcagctgtacattagagaaaatggatctcctgaggaacatgccatctatgtatgggaccatttcatcgcacaagcagccgctgagaacgtctttttcgttgctcatagctatggaggtctggcatttgtcgaactaatgattcagagagaagcagatgtgaagaataaggtcaccgccgtggccctgactgattccgtgcacaacgtgtggcaccaggaggcagggaaaaccattagggaatggatgcgcgaaaactgctgcaactgggtgagtagctcagaaccccttgacacatctgttgaatctatgttgcctgactgtcctcgggtatccgcgggaactgatagacatgagctgaccagctggaaatccttcccatcaattttcaaattcttcacggaagcatctgaggcgaagacgtcttctctcaagcctgctgtaacgcgtcgttcccacaggatcaaacatgaagagttgtag

SEQ ID NO: 62018 - DNA, 921 bp, Artificial Sequence
  derived and/or modified sequence
atgaagaaggacgagccacccctggactttcccgataccctggaaggctttgagtacgccttcaacgagaagggccaactcagacacataaagacaggcgagccattcgtgttcaactatagggaagatctgcatagatggaaccaaaagagatatgaggcactcggtgagattatcacgaaatacgtgtacgagctgctagagaaagactgcaacctaaagaaagtgtccattcctgaaggttatggagtgatagtcctcaaccccaacgaaaactatattgaagtcgagaagccaaagatccacgtacagagttcctctgattcaagcgacgaacccgccgaaaagagggaacggaaagacaaggtaagtaaagaaacaaagaagagacgcgatttttacgaaaaatatcggaacccacaacgcgagaaagagatgatgcaattatacatccgtgaaaacggctctccggaggagcatgccatttacgtgtgggaccactttatagctcaagccgccgcggagaatgtatttttcgtagcccacagttacggaggcctggcatttgtcgagctgatgatacagcgagaagctgacgtgaagaacaaagttactgcagtcgccttgaccgactctgtccataatgtctggcaccaggaagccggcaaaacaattagggaatggatgcgcgagaactgctgtaattgggttagttcctccgagcctcttgacacctccgttgagagcatgctgccagactgccccagggtttccgctggcacagatagacatgaactgacgtcctggaagagttttccttcaattttcaagttctttacagaggccagtgaggcgaagacaagcagtttaaaacccgccgtgacccgacgttctcatcgtattaagcatgaagaattgtag

SEQ ID NO: 62019 - DNA, 921 bp, Artificial Sequence
  derived and/or modified sequence
atgaagaaagatgaaccaccacttgacttccccgacaccctagaaggcttcgagtacgcttttaatgaaaaaggccaactacgccacataaagacgggtgaaccattcgtgttcaattatcgagaggatctgcaccgttggaaccaaaaaagatatgaggcgctgggcgagataattacaaaatacgtgtatgaactgctggagaaggactgcaacctgaagaaagtctcaatccctgaaggttacggggttatcgtgctcaatccgaatgagaattatatagaggttgaaaaacctaagattcacgtccagtcatcgtcagactcatctgatgaaccagcggagaaaagggaaagaaaagataaagtgagtaaggagactaaaaaacggcgagacttctatgaaaagtaccggaacccccagagagagaaggagatgatgcagttgtatattagagagaatgggtcccccgaagaacacgctatttatgtctgggaccacttcatcgctcaggccgccgccgagaatgttttttttgtagcacacagttatggtggattagccttcgtggagctcatgattcagagagaggccgatgtaaagaacaaggtcaccgccgttgcactcaccgattccgtgcataatgtttggcaccaggaagcagggaaaaccatcagggagtggatgcgagagaattgttgcaattgggtatcaagctctgaacctctcgacacatccgtggagtctatgttgcccgactgcccaagagtgtcagctgggactgatcgacacgagctcactagctggaagagctttccttcaattttcaagttctttaccgaggcctcagaagcaaaaacctcctcactcaaacctgccgttacaagaaggtcacatcgaattaaacacgaagaactttag

SEQ ID NO: 62020 - DNA, 921 bp, Artificial Sequence
  derived and/or modified sequence
atgaagaaggacgagccccccctggacttccccgacaccctggagggcttcgagtacgccttcaacgagaagggccagctgagacacatcaagaccggcgagcccttcgtgttcaactacagagaggacctgcacagatggaaccagaagagatacgaggccctgggcgagatcatcaccaagtacgtgtacgagctgctggagaaggactgcaacctgaagaaggtgagcatccccgagggctacggcgtgatcgtgctgaaccccaacgagaactacatcgaggtggagaagcccaagatccacgtgcagagcagcagcgacagcagcgacgagcccgccgagaagagagagagaaaggacaaggtgagcaaggagaccaagaagagaagagacttctacgagaagtacagaaacccccagagagagaaggagatgatgcagctgtacatcagagagaacggcagccccgaggagcacgccatctacgtgtgggaccacttcatcgcccaggccgccgccgagaacgtgttcttcgtggcccacagctacggcggcctggccttcgtggagctgatgatccagagagaggccgacgtgaagaacaaggtgaccgccgtggccctgaccgacagcgtgcacaacgtgtggcaccaggaggccggcaagaccatcagagagtggatgagagagaactgctgcaactgggtgagcagcagcgagcccctggacaccagcgtggagagcatgctgcccgactgccccagagtgagcgccggcaccgacagacacgagctgaccagctggaagagcttccccagcatcttcaagttcttcaccgaggccagcgaggccaagaccagcagcctgaagcccgccgtgaccagaagaagccacagaatcaagcacgaggagctgtag

SEQ ID NO: 62021 - DNA, 921 bp, Artificial Sequence
  derived and/or modified sequence
atgaaaaaggatgaacctcccttggattttcctgatacgcttgaaggtttcgaatacgcttttaatgaaaaagggcagcttcgtcacataaagaccggggagccctttgtgtttaactaccgggaagatctacaccgatggaaccagaaaaggtacgaggccctcggtgaaattataaccaagtacgtatatgagctcctcgagaaggactgtaacctgaagaaggtgagtattcccgagggatatggcgtaattgtgcttaaccctaatgagaactacattgaagttgaaaaacccaagatacatgttcagtcctcaagtgacagctcggacgaaccagccgagaagcgagagcgaaaagataaggtctcaaaagaaacgaagaagagaagggatttctatgaaaaataccgcaatccacaacgggaaaaggaaatgatgcaactgtatatcagggaaaacggttccccagaggaacacgctatttacgtctgggatcactttattgcgcaggccgccgctgagaacgtgttcttcgtggctcatagttacgggggcctggcatttgtcgaactgatgattcagcgagaggctgatgtaaagaataaagtcacagccgttgccctgaccgacagtgtgcacaatgtctggcatcaagaagccggcaaaactattcgagaatggatgagagagaactgttgcaactgggtgagcagctctgaaccccttgacactagtgtagagagtatgctgccagactgcccacgtgtcagcgctggaacagatagacacgaactgacgtcgtggaaatcgtttccatctatctttaagttttttaccgaagccagtgaagctaaaaccagctctctgaagcctgcagtgactcgccgctcccacagaatcaaacacgaagaactctag

SEQ ID NO: 62022 - DNA, 921 bp, Artificial Sequence
  derived and/or modified sequence
atgaagaaggatgagccccccctggacttcccagacaccctggagggctttgaatatgccttcaatgagaagggccagctgcggcacatcaagacaggagagccctttgtgttcaactaccgggaggacctgcaccgctggaaccagaagagatatgaggccctgggggagatcatcaccaagtatgtgtatgagctgctggagaaggactgcaacctgaagaaggtgtccatccctgagggctacggcgtgattgtgctgaaccccaatgaaaactacatcgaggtggagaagcccaagatccacgtgcagagcagcagtgacagcagtgatgagcctgctgagaagcgggagaggaaggacaaggtgtccaaggagaccaagaagaggcgggacttctatgagaagtacagaaacccccagcgggagaaggagatgatgcagctgtacatcagagaaaatggcagccctgaggagcacgccatctacgtgtgggaccacttcatcgcccaggccgctgctgaaaatgtgttctttgtggcccacagctatggaggcctggcctttgtggagctgatgatccagcgggaggctgatgtgaagaacaaggtgacagctgtggccctgacagacagcgtgcacaacgtgtggcaccaggaggccggcaagaccatccgggagtggatgagggagaactgctgcaactgggtgagcagcagcgagcccctggacacctctgtggagagcatgctgcctgactgcccccgggtgtctgctggaacagacagacatgagctgacctcctggaagagcttccccagcatcttcaagttcttcacagaggccagcgaggccaagaccagcagcctgaagccagctgtgacccggcgcagccaccgcatcaagcatgaggagctgtag

SEQ ID NO: 62023 - DNA, 921 bp, Artificial Sequence
  derived and/or modified sequence
atgaagaaggacgagccccccctggacttccccgacaccctggagggctttgaatacgcttttaacgagaaggggcagctcaggcacattaaaactggcgaaccttttgtgttcaattacagggaggacctgcaccggtggaaccagaagcggtacgaagccctgggcgagatcatcactaaatatgtttatgagctcctggaaaaagactgcaacctgaagaaggtatcaattcctgagggttacggagttatagtcctgaacccaaacgagaattacatcgaggtcgagaagcccaagattcatgttcagagctcctcggactcgtctgatgagcccgcagaaaaacgagaaaggaaagataaggttagcaaggaaaccaagaaacgtagggatttctatgaaaagtacaggaacccccaacgggaaaaggagatgatgcagctctacataagagagaacggcagtcccgaggagcacgctatttacgtgtgggaccatttcattgcccaggctgccgccgagaacgttttttttgttgcacattcatacggaggtttggccttcgtggagctgatgatacagagagaagccgacgttaagaataaggtgaccgcagtggcccttacggatagtgtgcataacgtgtggcaccaggaggccgggaagacgatcagggaatggatgcgggaaaattgctgcaactgggtgtcttcctccgagcctctcgatacttccgtagagtccatgctgccagactgtccgagagtaagtgccgggaccgataggcacgaactgacgtcatggaagtctttcccatcaattttcaagttctttaccgaagcctcagaggcgaaaactagctctctgaaaccggccgttacgagaaggtcacatagaatcaagcacgaggagctttag

SEQ ID NO: 62024 - RNA, 921 nt, Artificial Sequence
  derived and/or modified sequence
augaagaaggacgagccaccccuggacuuucccgauacccuggaaggcuuugaguacgccuucaacgagaagggccaacucagacacauaaagacaggcgagccauucguguucaacuauagggaagaucugcauagauggaaccaaaagagauaugaggcacucggugagauuaucacgaaauacguguacgagcugcuagagaaagacugcaaccuaaagaaaguguccauuccugaagguuauggagugauaguccucaaccccaacgaaaacuauauugaagucgagaagccaaagauccacguacagaguuccucugauucaagcgacgaacccgccgaaaagagggaacggaaagacaagguaaguaaagaaacaaagaagagacgcgauuuuuacgaaaaauaucggaacccacaacgcgagaaagagaugaugcaauuauacauccgugaaaacggcucuccggaggagcaugccauuuacgugugggaccacuuuauagcucaagccgccgcggagaauguauuuuucguagcccacaguuacggaggccuggcauuugucgagcugaugauacagcgagaagcugacgugaagaacaaaguuacugcagucgccuugaccgacucuguccauaaugucuggcaccaggaagccggcaaaacaauuagggaauggaugcgcgagaacugcuguaauuggguuaguuccuccgagccucuugacaccuccguugagagcaugcugccagacugccccaggguuuccgcuggcacagauagacaugaacugacguccuggaagaguuuuccuucaauuuucaaguucuuuacagaggccagugaggcgaagacaagcaguuuaaaacccgccgugacccgacguucucaucguauuaagcaugaagaauuguag

SEQ ID NO: 62025 - RNA, 921 nt, Artificial Sequence
  derived and/or modified sequence
augaagaaagaugaaccaccacuugacuuccccgacacccuagaaggcuucgaguacgcuuuuaaugaaaaaggccaacuacgccacauaaagacgggugaaccauucguguucaauuaucgagaggaucugcaccguuggaaccaaaaaagauaugaggcgcugggcgagauaauuacaaaauacguguaugaacugcuggagaaggacugcaaccugaagaaagucucaaucccugaagguuacgggguuaucgugcucaauccgaaugagaauuauauagagguugaaaaaccuaagauucacguccagucaucgucagacucaucugaugaaccagcggagaaaagggaaagaaaagauaaagugaguaaggagacuaaaaaacggcgagacuucuaugaaaaguaccggaacccccagagagagaaggagaugaugcaguuguauauuagagagaaugggucccccgaagaacacgcuauuuaugucugggaccacuucaucgcucaggccgccgccgagaauguuuuuuuuguagcacacaguuaugguggauuagccuucguggagcucaugauucagagagaggccgauguaaagaacaaggucaccgccguugcacucaccgauuccgugcauaauguuuggcaccaggaagcagggaaaaccaucagggaguggaugcgagagaauuguugcaauuggguaucaagcucugaaccucucgacacauccguggagucuauguugcccgacugcccaagagugucagcugggacugaucgacacgagcucacuagcuggaagagcuuuccuucaauuuucaaguucuuuaccgaggccucagaagcaaaaaccuccucacucaaaccugccguuacaagaaggucacaucgaauuaaacacgaagaacuuuag

SEQ ID NO: 62026 - protein, 388 aa, Artificial Sequence
  derived and/or modified sequence
MRWILFIGALIGSSICGQEKFFGDQVLRINVRNGDEISKLSQLVNSNNLKLNFWKSPSSFNRPVDVLVPSVSLQAFKSFLRSQGLEYAVTIEDLQIYHEMDNIAADFPDLARRVKIGHSFENRPMYVLKFSTGKGVRRPAVWLNAGIHSREWISQATAIWTARKIVSDYQRDPAITSILEKMDIFLLPVANPDGYVYTQTQNRLWRKTRSRNPGSSCIGADPNRNWNASFAGKGASDNPCSEVYHGPHANSEVEVKSVVDFIQKHGNFKGFIDLHSYSQLLMYPYGYSVKKAPDAEELDKVARLAAKALASVSGTEYQVGPTCTTVYPASGSSIDWAYDNGIKFAFTFELRDTGTYGFLLPANQIIPTAEETWLGLKTIMEHVRDNLY

SEQ ID NO: 62027 - protein, 226 aa, Artificial Sequence
  derived and/or modified sequence
MKIVSDYQRDPAITSILEKMDIFLLPVANPDGYVYTQTQNRLWRKTRSRNPGSSCIGADPNRNWNASFAGKGASDNPCSEVYHGPHANSEVEVKSVVDFIQKHGNFKGFIDLHSYSQLLMYPYGYSVKKAPDAEELDKVARLAAKALASVSGTEYQVGPTCTTVYPASGSSIDWAYDNGIKFAFTFELRDTGTYGFLLPANQIIPTAEETWLGLKTIMEHVRDNLY

SEQ ID NO: 62028 - DNA, 1167 bp, Artificial Sequence
  derived and/or modified sequence
atgaggtggattttgttcatcggagcccttattggatcttccatttgcggccaggagaagtttttcggcgaccaggttcttaggatcaatgtccgtaatggagatgaaatttccaaactttctcaactcgtgaattccaataatctcaagctgaatttctggaaatccccctcatcttttaaccgccccgttgacgttttagttccgtcagtttccttgcaggcattcaaatcctttctgaggtcccaagggctcgaatacgctgtcaccatcgaggacctccaaatttaccacgagatggataatatcgccgccgacttccccgatctggcccgccgcgtgaagattggccattcctttgagaatagaccaatgtacgtcctgaaattttccacagggaaaggtgtaagacgcccagccgtgtggctgaatgccgggatccattccagggagtggatctctcaagcgacagcaatctggacggctaggaagatagtcagtgattatcagagggatcctgcaataactagtattcttgagaagatggacatctttctccttcctgtcgctaaccctgacggatacgtctacacacagacccaaaatcgtctgtggcgcaagactaggtctcggaaccccggttcttcttgtataggtgccgacccaaaccgcaactggaatgcctccttcgccggcaagggcgcctcagacaacccatgcagcgaagtataccacggcccccatgcaaacagcgaggtcgaggtcaaatctgtggtggacttcattcagaagcacggcaacttcaagggtttcatagacctccactcctatagccagctgttgatgtatccgtacggttatagtgtgaagaaagcgccagatgccgaagaattggataaggtcgccaggcttgccgccaaggctctcgcatcggtcagtgggacagagtaccaggtgggtccaacttgtaccactgtatacccggccagtggaagctccatcgactgggcgtatgataatggtattaaattcgcattcactttcgagctgagagacaccggcacttacggctttctcctgccggcaaatcagatcattcccaccgcagaggaaacatggctcgggcttaaaacaatcatggagcatgttagggacaacttatactag

SEQ ID NO: 62029 - DNA, 681 bp, Artificial Sequence
  derived and/or modified sequence
atgaagatcgtgtccgattaccagcgggaccctgcaattactagtattcttgagaaaatggacatcttcttactcccagtggcaaaccccgatggctatgtttacacccagacacaaaaccgcctctggagaaaaacacggtctcgaaatcctggctcctcctgcatcggtgccgacccaaatcggaactggaatgcctcttttgccggaaagggagcaagtgacaacccctgtagtgaggtgtaccacggtcctcacgcaaatagtgaagtggaagtcaagtcagttgttgatttcattcagaaacacggtaactttaaagggtttatagacttgcatagttatagccaactgctgatgtatccctacggatatagcgttaagaaggccccagatgccgaggagctcgataaggttgcgcgcctcgccgcaaaggcactcgcttcagtttctgggaccgagtatcaggtaggaccaacatgtactaccgtataccccgcctcaggtagctctatagattgggcatacgacaacggcatcaagttcgcttttactttcgaacttagggatacagggacctacggattccttctccccgctaaccaaattatccctacagccgaggaaacttggcttggtctcaaaactattatggaacatgtgcgggataatctatactag

SEQ ID NO: 62030 - DNA, 1167 bp, Artificial Sequence
  derived and/or modified sequence
atgcgctggatcctcttcatcggggccctgattggcagcagcatctgtggccaggagaagttcttcggggaccaggtgctgcgcatcaacgtgagaaatggagatgagatcagcaagctgagccagctggtgaacagcaacaacctgaagctgaacttctggaagagccccagcagcttcaacagacctgtggatgtgctggtgcccagcgtgtccctgcaggccttcaagagcttcctgcggagccagggcctggagtatgctgtgaccatcgaggacctgcagatctaccacgagatggacaacattgctgctgacttcccagacctggcccggcgggtgaagattggccacagctttgaaaatcggcccatgtatgtgctgaagttcagcacaggcaagggcgtgagaagacctgctgtgtggctgaatgccggcatccacagccgggagtggatcagccaggccacagccatctggacagccaggaagatcgtgtctgactaccagagggaccctgccatcaccagcatcctggagaagatggacatcttcctgctgcctgtggccaacccagatggctacgtgtacacccagacccagaaccggctgtggaggaagaccaggagcagaaatcctggcagcagctgcatcggggctgaccccaacagaaactggaatgccagctttgctggaaaaggagccagtgacaacccctgcagcgaggtgtaccacggcccccacgccaacagcgaggtggaggtgaagtctgtggtggacttcatccagaagcacggcaacttcaagggcttcatcgacctgcacagctacagccagctgctgatgtacccctacggctacagcgtgaagaaggccccagatgctgaggagctggacaaggtggcccggctggccgccaaggccctggcctctgtgtctggaacagagtaccaggtgggccccacctgcaccaccgtgtacccagccagcggcagcagcattgactgggcctatgacaatggcatcaagtttgccttcacctttgagctgcgggacaccggcacctacggcttcctgctgcctgccaaccagatcatccccacagctgaggagacctggctgggcctgaagaccatcatggagcacgtgcgggacaacctgtactag

SEQ ID NO: 62031 - DNA, 681 bp, Artificial Sequence
  derived and/or modified sequence
atgaagatcgtgtctgactaccagagggaccctgccatcaccagcatcctggagaagatggacatcttcctgctgcctgtggccaacccagatggctacgtgtacacccagacccagaaccggctgtggaggaagaccaggagcagaaatcctggcagcagctgcatcggggctgaccccaacagaaactggaatgccagctttgctggaaaaggagccagtgacaacccctgcagcgaggtgtaccacggcccccacgccaacagcgaggtggaggtgaagtctgtggtggacttcatccagaagcacggcaacttcaagggcttcatcgacctgcacagctacagccagctgctgatgtacccctacggctacagcgtgaagaaggccccagatgctgaggagctggacaaggtggcccggctggccgccaaggccctggcctctgtgtctggaacagagtaccaggtgggccccacctgcaccaccgtgtacccagccagcggcagcagcattgactgggcctatgacaatggcatcaagtttgccttcacctttgagctgcgggacaccggcacctacggcttcctgctgcctgccaaccagatcatccccacagctgaggagacctggctgggcctgaagaccatcatggagcacgtgcgggacaacctgtactag

SEQ ID NO: 62032 - DNA, 1167 bp, Artificial Sequence
  derived and/or modified sequence
atgcggtggatcctgttcatcggcgccctgatcggcagcagcatctgcggtcaggagaaattttttggtgaccaagtgttaaggattaacgttcggaatggagacgagatcagtaaactgagccaactagtaaactctaataacttgaaactaaacttctggaagtccccttcttcatttaacagacctgtggatgttcttgttccttccgtgagtctgcaagccttcaaatccttcttgcgatcccaagggcttgagtatgccgtaacaatcgaagatctccaaatttatcacgaaatggataacattgctgccgacttcccagatctcgcacgtagagtgaagattggacactcctttgaaaaccgtccaatgtacgtgctgaagttctctaccggcaaaggggtcagacggcctgccgtgtggctcaatgccgggattcattctagggaatggatttctcaggcaacagcaatctggacggctcgcaaaatcgtatcggattaccaaagggaccccgctatcacgagtatcctcgagaagatggatattttccttctgcctgtcgctaatccggatggatacgtctacactcagactcaaaatagactgtggcgtaaaacacgcagtcgaaatcctggctcatcatgtatcggggcagaccccaatcgcaactggaatgcctcttttgccgggaaaggggcctctgacaatccgtgctcagaggtttaccacgggccgcacgcaaattcagaggtggaagtgaagtcagtagtcgacttcatccagaaacacggtaacttcaaaggcttcattgacttgcattcctactctcagctgctgatgtatccctacgggtacagtgtgaaaaaggcccccgacgcagaggagctggataaagtggctcggctggcagcgaaagctcttgcatcagtgtcagggactgagtatcaggtgggacccacctgcacaacagtctaccccgccagtggcagcagcattgactgggcctatgacaacggcataaaatttgctttcacgttcgaattgagggatacaggcacgtatggcttcctccttccagctaaccagataatccctaccgccgaggaaacctggctgggcctcaagaccatcatggaacatgtgagggacaatctgtattag

SEQ ID NO: 62033 - DNA, 681 bp, Artificial Sequence
  derived and/or modified sequence
atgaagatcgtgagcgactaccagcgggaccccgccatcaccagcatcctcgagaagatggatatcttccttctccccgttgccaatcctgatggctacgtctatacgcagacacagaaccgtctttggcgaaaaacaagaagccgcaatccagggagctcttgtattggggcggaccctaacaggaactggaatgctagttttgcagggaagggggctagtgacaatccctgctcagaggtctaccacggcccacacgccaactccgaagttgaagttaagtcggtggtggactttatccaaaagcacgggaactttaaggggtttattgatctgcacagctatagtcagttgttaatgtacccatatgggtacagcgttaaaaaagcgcctgatgcagaggaactggacaaggtcgcccgactggcagctaaagctttggcttccgtgtccggcaccgaataccaggttggcccaacctgcacaaccgtctaccccgcttctggatcttccatcgattgggcatacgataatggcataaagtttgcattcaccttcgaattaagagatacgggtacatatggtttcctcctgcccgcaaatcagatcattccgacagccgaagagacttggctgggcctgaaaaccatcatggaacacgtgagagacaacctgtactag

SEQ ID NO: 62034 - DNA, 1167 bp, Artificial Sequence
  derived and/or modified sequence
atgcgctggatactgttcattggggctctaataggatcgtctatctgtggtcaggagaagttttttggggatcaggtacttagaatcaacgtcagaaatggtgacgagatatctaagcttagccagctcgttaatagcaataatctgaaattaaatttctggaaatcaccttcttcttttaatagaccggtcgatgtgttggtgccctcggtgtcactgcaagccttcaagtcatttctccggtctcagggattagagtatgccgtaactatcgaggacctgcagatttatcatgagatggataacattgcggcagacttcccagatctggcccgtcgggtcaaaataggccactctttcgagaatagacccatgtatgtgcttaagtttagcaccggtaagggcgtccgccgtcccgcagtctggcttaatgccggaatccactcgagagaatggattagccaggccaccgcgatctggactgctcgaaagatcgtgtcagattatcagcgagacccggcaatcacctcaatccttgagaagatggacatatttttgctgccagttgccaatcctgacggctatgtttacacacagactcagaaccgcttatggagaaaaacacgcagcaggaatccgggtagttcctgtataggcgcagaccccaaccgtaactggaacgcctcctttgctgggaaaggggcaagcgacaacccatgctccgaggtgtatcatggtccacacgcaaactctgaagttgaggtgaaatccgtcgtggactttatccaaaaacatggtaattttaaagggttcattgatttacattcgtattcccaactattgatgtacccctatggatacagtgttaagaaagcacctgatgctgaggagctggataaagtggccaggctggcagccaaggccctggcgagcgtatccggaaccgaataccaggttggcccaacttgcaccacagtgtaccctgcttcaggcagttcaattgactgggcatacgataacggcatcaaattcgccttcacatttgagcttcgcgacactggcacctatggttttctgctcccagcaaaccagatcatcccaacggccgaagagacatggctgggcctgaagaccatcatggagcatgtacgcgacaacttatattag

SEQ ID NO: 62035 - DNA, 681 bp, Artificial Sequence
  derived and/or modified sequence
atgaagattgtgtctgactatcagcgggatcccgcaataactagcatcctggaaaaaatggacatttttctcctgccagtggctaaccccgatgggtacgtatacacacagactcagaatcgtctgtggcgtaagacccgttcccgcaatccagggtcatcatgcatcggcgcagacccaaacagaaactggaacgcttcgtttgctggcaagggggcatccgataacccttgttctgaggtgtatcatggcccacatgctaacagcgaagtagaggtgaagagtgtggtggacttcatccaaaaacatgggaattttaagggcttcattgatcttcatagctattcacagctcctaatgtatccctacggatatagtgtgaagaaagctccagacgccgaagaactggataaagtggcccgattggcagcaaaggcactcgcctccgtctctgggacggaataccaggtgggccctacctgtaccactgtgtatccggcttccggcagctccatcgactgggcgtatgataatggcataaagtttgcgtttacattcgagctgcgagacaccggaacatatggcttcctgctccccgcaaaccagattattcctactgccgaagagacttggctcgggttgaaaactataatggaacatgtgagggataatttgtattag

SEQ ID NO: 62036 - DNA, 2718 bp, Artificial Sequence
  derived and/or modified sequence
ataaatacagcttgactcagccactgtatgactgactccccggggacatgaggtggatactgttcattggggcccttattgggtccagcatctgtggccaagaaaaattttttggggaccaagttttgaggattaatgtcagaaatggagacgagatcagcaaattgagtcaactagtgaattcaaacaacttgaagctcaatttctggaaatctccctcctccttcaatcggcctgtggatgtcctggtcccatctgtcagtctgcaggcatttaaatccttcctgagatcccagggcttagagtacgcagtgacaattgaggacctgcagatttaccacgagatggacaacattgccgcagactttcctgacctggcgaggagggtgaagattggacattcgtttgaaaaccggccgatgtatgtactgaagttcagcactgggaaaggcgtgaggcggccggccgtttggctgaatgcaggcatccattcccgagagtggatctcccaggccactgcaatctggacggcaaggaagattgtatctgattaccagagggatccagctatcacctccatcttggagaaaatggatattttcttgttgcctgtggccaatcctgatggatatgtgtatactcaaactcaaaaccgattatggaggaagacgcggtcccgaaatcctggaagctcctgcattggtgctgacccaaatagaaactggaacgctagttttgcaggaaagggagccagcgacaacccttgctccgaagtgtaccatggaccccacgccaattcggaagtggaggtgaaatcagtggtagatttcatccaaaaacatgggaatttcaagggcttcatcgacctgcacagctactcgcagctgctgatgtatccatatgggtactcagtcaaaaaggccccagatgccgaggaactcgacaaggtggcgaggcttgcggccaaagctctggcttctgtgtcgggcactgagtaccaagtgggtcccacctgcaccactgtctatccagctagcgggagcagcatcgactgggcatatgacaacggcatcaaatttgcattcacatttgagttgagagataccgggacctatggcttcctcctgccagctaaccagatcatccccactgcagaggagacgtggctggggctgaagaccatcatggagcatgtgcgggacaacctctactaggcgatggctctgctctgtctacatttatttgtacccacacgtgcacgcactgaggccattgttaaaggagctctttcctacctgtgtgagtcagagccctctgggtttgtggagcacacaggcctgcccctctccagccagctccctggagtcgtgtgtcctggcagtgtccctgcaagaactggttctgccagcctgctcaattttggtcctgctgtttttgatgagccttttgtctgtttctccttccaccctgctggctgggcggctgcactcagcatcaccccttcctgggtggcatgtctctctctacctcatttttagaaccaaagaacatctgagatgattctctaccctcatccacatctagccaagccagtgaccttgctctggtggcactgtgggagacaccacttgtctttaggtgggtctcaaagatgatgtagaatttcctttaatttctcgcagtcttcctggaaaatattttcctttgagcagcaaatcttgtagggatatcagtgaaggtctctccctccctcctctcctgtttttttttttttgagacagagttttgctcttgttgcccaggctggagtgtgatggctcgatcttggctcaccacaacctctgcctcctgggttcaagcaattctcctgcctcagcctcttgagtagcttggtttataggcgcatgccaccatgcctggctaattttgtgtttttagtagagacagggtttctccatgttggtcaggctggtctcaaactcccaacctcaggtgatctgccctccttggcctcccagagtgctgggattacaggtgtgagccactgtgccgggcccgtcccctccttttttaggcctgaatacaaagtagaagatcactttccttcactgtgctgagaatttctagatactacagttcttactcctctcttccctttgttattcagtgtgaccaggatggcgggaggggatctgtgtcactgtaggtactgtgcccaggaaggctgggtgaagtgaccatctaaattgcaggatggtgaaattatccccatctgtcctaatgggcttacctcctctttgccttttgaactcacttcaaagatctaggcctcatcttacaggtcctaaatcactcatctggcctggataatctcactgccctggcacattcccatttgtgctgtggtgtatcctgtgtttccttgtcctggtttgtgtgtgtgtgtgtgtgtgtgtgtgtgtgtgtgtgtgtgtttgtgtgtgtgtgtctgtctattttgtatcctggaccacaagttcctaagtagagcaagaattcatcaaccagctgcctcttgtttcatttcacctcagcacgtaccatctgtccttttgttgttgttttgtttttgtttttttgcttttaccaaacatgtctgtaaatcttaacctcctgcctaggatttgtacagcatctggtgtgtgcttataagccaataaatattcaatgtgagtttca

SEQ ID NO: 62037 - DNA, 1621 bp, Artificial Sequence
  derived and/or modified sequence
tgactgactccccggggacatgaggtggatactgttcattggggcccttattgggtccagcatctgtggccaagaaaaattttttggggaccaagttttgaggattaatgtcagaaatggagacgagatcagcaaattgagtcaactagtgaattcaaacaacttgaagctcaatttctggaaatctccctcctccttcaatcggcctgtggatgtcctggtcccatctgtcagtctgcaggcatttaaatccttcctgagatcccagggcttagagtacgcagtgacaattgaggacctgcaggcccttttagacaatgaagattgtatctgattaccagagggatccagctatcacctccatcttggagaaaatggatattttcttgttgcctgtggccaatcctgatggatatgtgtatactcaaactcaaaaccgattatggaggaagacgcggtcccgaaatcctggaagctcctgcattggtgctgacccaaatagaaactggaacgctagttttgcaggaaagggagccagcgacaacccttgctccgaagtgtaccatggaccccacgccaattcggaagtggaggtgaaatcagtggtagatttcatccaaaaacatgggaatttcaagggcttcatcgacctgcacagctactcgcagctgctgatgtatccatatgggtactcagtcaaaaaggccccagatgccgaggaactcgacaaggtggcgaggcttgcggccaaagctctggcttctgtgtcgggcactgagtaccaagtgggtcccacctgcaccactgtctatccagctagcgggagcagcatcgactgggcatatgacaacggcatcaaatttgcattcacatttgagttgagagataccgggacctatggcttcctcctgccagctaaccagatcatccccactgcagaggagacgtggctggggctgaagaccatcatggagcatgtgcgggacaacctctactaggcgatggctctgctctgtctacatttatttgtacccacacgtgcacgcactgaggccattgttaaaggagctctttcctacctgtgtgagtcagagccctctgggtttgtggagcacacaggcctgcccctctccagccagctccctggagtcgtgtgtcctggcagtgtccctgcaagaactggttctgccagcctgctcaattttggtcctgctgtttttgatgagccttttgtctgtttctccttccaccctgctggctgggcggctgcactcagcatcaccccttcctgggtggcatgtctctctctacctcatttttagaaccaaagaacatctgagatgattctctaccctcatccacatctagccaagccagtgaccttgctctggtggcactgtgggagacaccacttgtctttaggtgggtctcaaagatgatgtagaatttcctttaatttctcgcagtcttcctggaaaatattttcctttgagcagcaaatcttgtagggatatcagtgaaggtctctccctccctcctctcctgtttttttttttttgagacagagttttgctcttgttgcccaggctggagtgtgatggctcgatcttggctcaccaca

SEQ ID NO: 62038 - DNA, 1167 bp, Artificial Sequence
  derived and/or modified sequence
atgagatggatcctgttcatcggcgccctgatcggcagcagcatctgcggccaggagaagttcttcggcgaccaggtgctgagaatcaacgtgagaaacggcgacgagatcagcaagctgagccagctggtgaacagcaacaacctgaagctgaacttctggaagagccccagcagcttcaacagacccgtggacgtgctggtgcccagcgtgagcctgcaggccttcaagagcttcctgagaagccagggcctggagtacgccgtgaccatcgaggacctgcagatctaccacgagatggacaacatcgccgccgacttccccgacctggccagaagagtgaagatcggccacagcttcgagaacagacccatgtacgtgctgaagttcagcaccggcaagggcgtgagaagacccgccgtgtggctgaacgccggcatccacagcagagagtggatcagccaggccaccgccatctggaccgccagaaagatcgtgagcgactaccagagagaccccgccatcaccagcatcctggagaagatggacatcttcctgctgcccgtggccaaccccgacggctacgtgtacacccagacccagaacagactgtggagaaagaccagaagcagaaaccccggcagcagctgcatcggcgccgaccccaacagaaactggaacgccagcttcgccggcaagggcgccagcgacaacccctgcagcgaggtgtaccacggcccccacgccaacagcgaggtggaggtgaagagcgtggtggacttcatccagaagcacggcaacttcaagggcttcatcgacctgcacagctacagccagctgctgatgtacccctacggctacagcgtgaagaaggcccccgacgccgaggagctggacaaggtggccagactggccgccaaggccctggccagcgtgagcggcaccgagtaccaggtgggccccacctgcaccaccgtgtaccccgccagcggcagcagcatcgactgggcctacgacaacggcatcaagttcgccttcaccttcgagctgagagacaccggcacctacggcttcctgctgcccgccaaccagatcatccccaccgccgaggagacctggctgggcctgaagaccatcatggagcacgtgagagacaacctgtactag

SEQ ID NO: 62039 - DNA, 681 bp, Artificial Sequence
  derived and/or modified sequence
atgaagatcgtgagcgactaccagagagaccccgccatcaccagcatcctggagaagatggacatcttcctgctgcccgtggccaaccccgacggctacgtgtacacccagacccagaacagactgtggagaaagaccagaagcagaaaccccggcagcagctgcatcggcgccgaccccaacagaaactggaacgccagcttcgccggcaagggcgccagcgacaacccctgcagcgaggtgtaccacggcccccacgccaacagcgaggtggaggtgaagagcgtggtggacttcatccagaagcacggcaacttcaagggcttcatcgacctgcacagctacagccagctgctgatgtacccctacggctacagcgtgaagaaggcccccgacgccgaggagctggacaaggtggccagactggccgccaaggccctggccagcgtgagcggcaccgagtaccaggtgggccccacctgcaccaccgtgtaccccgccagcggcagcagcatcgactgggcctacgacaacggcatcaagttcgccttcaccttcgagctgagagacaccggcacctacggcttcctgctgcccgccaaccagatcatccccaccgccgaggagacctggctgggcctgaagaccatcatggagcacgtgagagacaacctgtactag

SEQ ID NO: 62040 - protein, 645 aa, Artificial Sequence
  derived and/or modified sequence
MAEAVAAPISPWTMAATIQAMERKIESQAARLLSLEGRTGMAEKKLADCEKTAVEFGNQLEGKWAVLGTLLQEYGLLQRRLENVENLLRNRNFWILRLPPGSKGESPKEWGKLEDWQKELYKHVMRGNYETLVSLDYAISKPEVLSQIEQGKEPCNWRRPGPKIPDVPVDPSPGSGPPVPAPDLLMQIKQEGELQLQEQQALGVEAWAAGQPDIGEEPWGLSQLDSGAGDISTDATSGVHSNFSTTIPPTSWQTDLPPHHPSSACSDGTLKLNTAASTEADVKIVIKTEVQEEEVVATPVHPTDLEAHGTLFGPGQATRFFPSPAQEGAWESQGSSFPSQDPVLGLREPARPERDMGELSPAVAQEETPPGDWLFGGVRWGWNFRCKPPVGLNPRTGPEGLPYSSPDNGEAILDPSQAPRPFNEPCKYPGRTKGFGHKPGLKKHPAAPPGGRPFTCATCGKSFQLQVSLSAHQRSCGAPDGSGPGTGGGGSGSGGGGGGSGGGSARDGSALRCGECGRCFTRPAHLIRHRMLHTGERPFPCTECEKRFTERSKLIDHYRTHTGVRPFTCTVCGKSFIRKDHLRKHQRNHAAGAKTPARGQPLPTPPAPPDPFKSPASKGPLASTDLVTDWTCGLSVLGPTDGGDM

SEQ ID NO: 62041 - DNA, 1938 bp, Artificial Sequence
  derived and/or modified sequence
atggccgaggccgtggccgcccccatcagcccctggaccatggccgccaccatccaggccatggagagaaagatcgagagccaggccgccagactgctgagcctggagggcagaaccggcatggccgagaagaagctggccgactgcgagaagaccgccgtggagttcggcaaccagctggagggcaagtgggccgtgctgggcaccctgctgcaggagtacggcctgctgcagagaagactggagaacgtggagaacctgctgagaaacagaaacttctggatcctgagactgccccccggcagcaagggcgagagccccaaggagtggggcaagctggaggactggcagaaggagctgtacaagcacgtgatgagaggcaactacgagaccctggtgagcctggactacgccatcagcaagcccgaggtgctgagccagatcgagcagggcaaggagccctgcaactggagaagacccggccccaagatccccgacgtgcccgtggaccccagccccggcagcggcccccccgtgcccgcccccgacctgctgatgcagatcaagcaggagggcgagctgcagctgcaggagcagcaggccctgggcgtggaggcctgggccgccggccagcccgacatcggcgaggagccctggggcctgagccagctggacagcggcgccggcgacatcagcaccgacgccaccagcggcgtgcacagcaacttcagcaccaccatcccccccaccagctggcagaccgacctgcccccccaccaccccagcagcgcctgcagcgacggcaccctgaagctgaacaccgccgccagcaccgaggccgacgtgaagatcgtgatcaagaccgaggtgcaggaggaggaggtggtggccacccccgtgcaccccaccgacctggaggcccacggcaccctgttcggccccggccaggccaccagattcttccccagccccgcccaggagggcgcctgggagagccagggcagcagcttccccagccaggaccccgtgctgggcctgagagagcccgccagacccgagagagacatgggcgagctgagccccgccgtggcccaggaggagaccccccccggcgactggctgttcggcggcgtgagatggggctggaacttcagatgcaagccccccgtgggcctgaaccccagaaccggccccgagggcctgccctacagcagccccgacaacggcgaggccatcctggaccccagccaggcccccagacccttcaacgagccctgcaagtaccccggcagaaccaagggcttcggccacaagcccggcctgaagaagcaccccgccgccccccccggcggcagacccttcacctgcgccacctgcggcaagagcttccagctgcaggtgagcctgagcgcccaccagagaagctgcggcgcccccgacggcagcggccccggcaccggcggcggcggcagcggcagcggcggcggcggcggcggcagcggcggcggcagcgccagagacggcagcgccctgagatgcggcgagtgcggcagatgcttcaccagacccgcccacctgatcagacacagaatgctgcacaccggcgagagacccttcccctgcaccgagtgcgagaagagattcaccgagagaagcaagctgatcgaccactacagaacccacaccggcgtgagacccttcacctgcaccgtgtgcggcaagagcttcatcagaaaggaccacctgagaaagcaccagagaaaccacgccgccggcgccaagacccccgccagaggccagcccctgcccaccccccccgccccccccgaccccttcaagagccccgccagcaagggccccctggccagcaccgacctggtgaccgactggacctgcggcctgagcgtgctgggccccaccgacggcggcgacatgtag

SEQ ID NO: 62042 - DNA, 1938 bp, Artificial Sequence
  derived and/or modified sequence
atggcagaggccgtggcagctccaatttccccatggaccatggctgccactatccaggctatggaaaggaaaatcgaatcacaagccgctcggctgctctctctggagggacgtacagggatggccgaaaaaaagctggccgattgcgagaagactgcagtggagttcggcaaccagcttgaggggaaatgggccgttctggggaccctcctgcaagaatacgggctcctgcaaaggagattggagaacgtagagaatctcctcaggaatcggaatttctggatccttcgccttccacccggatccaagggtgagtcaccgaaagagtgggggaaactcgaggactggcagaaggagctatataagcacgttatgcgagggaattacgagacactcgtgagtctggactacgcaatctccaagccagaagttcttagtcaaattgagcagggtaaggaaccatgcaattggagaaggccaggacctaagattccagacgtccctgtggaccccagtccaggttcaggcccacctgtgcctgctcctgacctgcttatgcagataaaacaggaaggagagctgcagctgcaagagcagcaggcactgggagttgaggcatgggccgcaggtcaacctgatattggtgaggaaccctggggattgagtcagctcgactccggggccggggatattagcacagacgccacttcaggcgttcacagcaatttcagtaccactattccacctactagttggcaaaccgatctccctccacatcacccatcatctgcatgtagcgacggcactctgaaactgaatactgccgcttccaccgaggcagatgtcaagatagtgatcaaaaccgaggtgcaggaggaggaggtcgtagctacacccgttcacccaaccgaccttgaggctcatggtacactttttggccccgggcaggccacaagattcttcccctctccagctcaggaaggtgcatgggaaagccagggtagttctttccccagtcaggatcccgtgctcggtctgagagaaccagctagacccgagcgggacatgggggagctgagccccgctgtggctcaggaggagacacccccaggagattggcttttcgggggagtgcgctggggatggaactttaggtgcaagcctccagtaggactcaaccctcgaacagggcctgagggactaccatatagctcccccgacaatggcgaagcgattctggaccccagccaggccccccgccctttcaatgagccttgcaaataccctgggcggacaaaaggatttgggcacaaaccagggttgaaaaaacaccctgctgcaccaccgggcgggcgacctttcacgtgtgccacttgtgggaagtctttccagcttcaggttagtctttctgctcaccagcgctcttgtggcgcccccgatggctctggtcctgggacagggggcgggggcagtgggagcggcgggggcggggggggcagtggcggcggatctgccagggacggttccgctctgaggtgcggcgagtgcggcaggtgtttcactcggcccgcacacctcattcggcacagaatgctgcatactggggaacgaccattcccctgtactgagtgcgagaagagattcaccgagagatcgaagctgatcgaccattacaggacacacaccggtgtaaggcccttcacctgcactgtgtgcgggaagagcttcataagaaaggatcacctgagaaagcaccaaaggaatcacgcagccggagctaagacccctgcccggggacagcccctcccaacaccacctgcgccgcctgacccctttaagtccccagctagcaaagggccactagcttcaaccgatctggtcactgattggacctgtgggctgtcagtacttggacctacagacggtggcgatatgtag

SEQ ID NO: 62043 - DNA, 1938 bp, Artificial Sequence
  derived and/or modified sequence
atggccgaggccgtggccgcccccatcagcccctggaccatggccgccaccatccaggccatggagaggaagattgagagccaggccgcccggctgctgagcctggagggccgcacaggcatggccgagaagaagctggccgactgtgagaagacagctgtggagtttggaaaccagctggagggcaagtgggccgtgctgggcaccctgctgcaggagtatggcctgctgcagaggcggctggagaatgtggagaacctgctgaggaacagaaacttctggatcctgcggctgcccccaggcagcaaaggagagagccccaaggagtggggcaagctggaggactggcagaaggagctgtacaagcacgtgatgaggggcaactatgagaccctggtgtccctggactatgccatcagcaagccagaggtgctgagccagatcgagcagggcaaggagccctgcaactggaggcggcccggccccaagatcccagatgtgcctgtggaccccagccctggcagcggcccccctgtgcctgccccagacctgctgatgcagatcaagcaggagggggagctgcagctgcaggagcagcaggccctgggcgtggaggcctgggccgccggccagcctgacatcggggaggagccctggggcctgagccagctggacagcggggccggggacatcagcacagatgccaccagcggcgtgcacagcaacttcagcaccaccatcccccccacctcctggcagacagacctgcccccccaccaccccagcagcgcctgcagtgatggcaccctgaagctgaacacagctgccagcacagaagcagatgtgaagatcgtcatcaagacagaggtgcaggaggaggaggtggtggccacccctgtgcaccccacagacctggaggcccacggcaccctgtttggacctggccaggccacccgcttcttccccagccctgcccaggagggcgcctgggagagccagggcagcagcttccccagccaggaccctgtgctgggcctgcgggagcccgcccggcctgagcgggacatgggagagctgagccctgctgtggcccaggaggagaccccacctggggactggctgtttggaggagtgcgctggggctggaacttccgctgcaagccccctgtgggcctgaaccccaggacaggccctgagggcctgccctacagcagcccagacaacggggaggccatcctggaccccagccaggccccccggcccttcaatgagccctgcaagtacccaggccgcaccaagggcttcggccacaagccaggcctgaagaagcaccctgctgcccctcctgggggccggcccttcacctgtgccacctgtgggaagagcttccagctgcaggtgtccctgagcgcccaccagaggagctgtggggccccagatggcagcggccctggcaccggcggcggcggcagcggcagcggcggcggcggcggcggcagcggcggcggcagcgccagagatggcagcgccctgcgctgtggagaatgtggccgctgcttcaccaggcctgcccacctgatccgccacaggatgctgcacactggagagcggcccttcccctgcacagaatgtgagaagcgcttcacagagaggagcaagctgattgaccactaccgcacccacactggagtgcggcccttcacctgcaccgtgtgtgggaagagcttcatcaggaaggaccacctgaggaagcaccagagaaatcatgctgctggggccaagaccccagcccggggccagcccctgcccaccccaccagcccccccagaccccttcaagagccctgccagcaagggccccctggccagcacagacctggtgacagactggacctgtggcctgtctgtgctgggccccacagatggaggagacatgtag

SEQ ID NO: 62044 - DNA, 1938 bp, Artificial Sequence
  derived and/or modified sequence
atggccgaggccgtggccgcccccatcagcccctggaccatggccgctaccatacaggccatggaaaggaagattgagagtcaggctgcccggttgctgagcttagagggcagaaccgggatggctgaaaagaagcttgcagactgtgaaaaaaccgcggtggagttcggtaaccagttagagggtaagtgggcagtcctcggcactcttctgcaggaatatgggctccttcagaggaggcttgagaatgtagagaacctgctccgcaaccgtaatttctggatcctcaggctgccacccggcagcaagggggaatctcctaaagagtggggtaagctggaggattggcagaaagagctctacaaacatgtgatgcggggaaactacgagacactggtgtccttggactatgcaatcagcaagccagaagtgctgtcgcaaatcgagcaaggcaaggaaccatgtaactggcggagacccggcccgaaaatacccgatgtgccagtggatccatcacctggttcaggccctcccgtccccgcccctgacctcctgatgcagattaaacaggagggcgagctacagctgcaggagcagcaagcactaggcgttgaggcctgggcggccgggcagcccgatattggggaagaaccctggggcttgtctcagctcgacagcggagctggcgacatcagtaccgacgccacatccggtgtgcactccaacttttcgaccacaatacctccgacatcttggcagacagacctgccaccccatcatccaagttccgcatgctcagatgggacactgaaactgaatacagctgcgtcaacagaagccgatgtgaaaatagtgattaaaacagaagtacaggaggaagaggtggtggcaaccccagtccaccccaccgaccttgaagctcacggcacactctttggcccaggacaggccactcgtttcttcccatcccccgcccaggagggagcgtgggaatcccaaggtagctccttccctagccaggatcccgttctggggctccgggaacctgctagacctgagagagatatgggagagctgtccccggccgtggctcaggaggaaacccctcccggcgactggctgtttgggggagttcggtggggatggaacttcaggtgtaagccacctgtcggtctgaacccaagaaccgggcctgaggggctgccatacagttctccagataacggagaggcaatcctcgacccatcgcaggcccctcggccattcaatgaaccctgtaagtaccctggcaggaccaaaggttttgggcacaaacccggcctgaaaaagcatccagccgcaccccccgggggccgccctttcacttgcgctacatgtggaaagtccttccaattgcaagtgtccctcagcgcacatcagaggtcatgtggcgcccccgatggatctggtcccggcacaggcggaggaggttcagggtcaggcggtggaggagggggtagtggaggtggaagtgctagagacggatcagccctgaggtgtggcgagtgcggcaggtgcttcacgcgccctgctcacctcatcagacaccgcatgctgcatacaggagaacgcccatttccatgcactgaatgtgagaagcggttcaccgagagaagcaaactgatcgatcactaccggacccacacaggcgtccgaccgtttacctgtacagtttgtggcaaatcctttatcagaaaggatcacttgaggaagcaccaacggaaccatgccgctggcgcgaaaactccagcacggggtcagccacttcccacaccacctgcaccacccgatcccttcaaatctcccgcctctaagggcccccttgctagcaccgacctggtcactgattggacgtgcggcttgagcgtgctcggacccaccgatggaggtgacatgtag

SEQ ID NO: 62045 - DNA, 1938 bp, Artificial Sequence
  derived and/or modified sequence
atggctgaggccgttgctgccccaatctccccctggacaatggcggctaccatacaggccatggagcgcaagatcgaatctcaggctgcaaggctgctgtcactggaagggagaaccggcatggcggagaagaagctcgcggactgtgaaaaaaccgcagtggagtttgggaatcagcttgagggtaagtgggccgttctgggcactctgctgcaggagtatggcctgttgcagcggaggcttgaaaacgttgaaaaccttctgcggaacaggaacttttggattttgagactcccaccgggaagcaaaggcgagagtcctaaagaatggggaaaactggaagattggcagaaggaactgtacaagcatgtgatgcgaggaaactacgagaccctggtctctctcgactatgccataagtaagcccgaagtactgagccagatcgagcaggggaaggagccttgcaactggagacgacccggtcccaagatcccggatgtgccagtggacccctcccctgggagcggaccccctgtgcctgctccagatctgcttatgcagataaagcaggagggcgagcttcagctgcaagaacaacaggccctcggagtggaagcatgggccgcaggacagcccgacatcggcgaagagccgtggggactatcccagttagacagcggggcaggcgatatatctaccgacgctaccagtggggttcacagcaatttctctactaccattccacccacctcttggcagaccgatttgccaccacaccacccttcaagtgcgtgttctgatgggacgcttaagctaaatacagctgcctcaaccgaggcggatgtcaaaatagtcattaagaccgaagtgcaagaagaagaggtggttgccacccctgtacatccaacagaccttgaggcacacggcacactcttcggaccagggcaggctaccagattcttcccctccccggctcaggaaggagcctgggaaagccaaggaagcagcttcccttctcaggatccggtcctggggctgagagagcctgcacgtcccgagcgggatatgggggaactttcacctgctgtcgctcaggaggaaaccccccctggagactggttgtttggaggggtacgctggggctggaactttcggtgcaaacctccagtgggtctgaatccacgcaccggccctgagggcctcccctattcttcaccagacaatggcgaagccattctcgatccctcacaagcgccacgtccttttaacgaaccatgtaaatatccagggaggaccaagggcttcggacataaaccaggactcaaaaagcacccagcggcacctcctggcggaagacctttcacctgtgccacctgcggcaagtccttccagctccaggtgtccttaagtgcacatcagcggagttgcggcgcaccagatgggagtggcccaggaaccgggggaggtgggtctggcagcggcggagggggaggaggctcaggcggaggctccgctcgtgatggatctgctcttagatgcggggaatgcggccgttgcttcacccggccagctcacctgattcggcaccgaatgctccacactggagagagaccattcccctgcactgaatgtgagaagaggttcaccgaaagatccaagctcatcgatcattatcggacccataccggagtgcgaccatttacctgcacggtgtgcggtaagagttttatccgcaaggaccatcttcggaaacaccaaagaaaccacgccgctggcgcaaaaacacctgcaagagggcagccactaccaactcctcctgcccctccagatcctttcaaatctccagccagcaagggcccactggctagtaccgacctggtgactgactggacatgcggcctgtcagtactgggacccaccgacggcggtgacatgtag

SEQ ID NO: 62046 - DNA, 3797 bp, Artificial Sequence
  derived and/or modified sequence
gcggccgcgctgcctccaggaagcctcacgggccttcgtctgccgggccgcggcgccggctcccaggatgcagtgtggaccggccgggcgctgacggaggcggcgcgactgcgggcggcgcggcgcaggggcagccagcgaggagcggcggcagaggaaaggccaggcaggcgccgcctgcggagagcaccgggcggccgggcctgcgtggtgccgcgcgcggcggcggcgacgacgacttcctccgggccgggcgggacagcgcagggccatggccgaggcggtcgcggctccgatttctccgtggacgatggcagccacgattcaggccatggagaggaagattgaatcgcaggctgctcgcctgctttccctagaaggtcgaaccgggatggccgagaagaagctggctgattgcgagaagacagccgtggagttcgggaaccagctggagggcaagtgggccgtgctggggaccctgctgcaggagtacgggctgctgcagaggcggctggagaacgtggagaacctgctgcgcaacaggaacttctggatcctgcggctgcccccgggcagcaagggggagtcccctaaggagtggggcaagctggaggactggcagaaggagctctacaagcacgtgatgaggggcaactacgagacgctggtctccctggactacgccatctccaagcccgaggtcctctcccagattgaacaagggaaggagccctgcaactggcgccgccctggccccaagattccagatgttcctgtggaccccagtccaggctcggggcccccagttcccgccccagacctcttgatgcagatcaagcaggagggtgagctccagctccaggagcagcaggccctgggcgtggaggcgtgggcagccgggcagccagatattggggaggagccctggggcctcagccagctggattccggagcaggagacatctccacggatgccacctctggtgtccattccaacttttccaccaccatcccgcccacctcctggcaaacggatctccctccccaccatccctcttcagcatgctcggacgggaccctgaagctcaacacagcagcctccacggaagcagatgtaaaaattgtaataaaaacagaagtccaggaagaggaggtggtggccacacccgtacatcctactgacctagaggctcacgggaccctgtttggaccaggccaagccacacggttcttccctagtcctgcccaggaaggagcctgggaaagccagggcagctccttccccagccaggaccctgtgctggggctgcgagagcccgcccggcctgagagggacatgggtgagctcagtcctgctgtggcccaggaggagacccctcctggggactggctcttcggaggggtccggtggggctggaatttccggtgtaaaccgccagtgggcctgaacccgaggacggggcccgaggggcttccttactcctccccggacaacggagaggccatcttggaccccagccaggccccaaggccattcaacgaaccctgtaaataccctggccggaccaaaggctttggccacaagccagggctgaagaagcaccccgcggcgccccccgggggccggcccttcacctgcgccacgtgtgggaagagcttccagctgcaagtcagcctgagcgcgcaccagcgcagctgtggggcgcccgacgggtcgggcccgggcacaggcggtggcggcagcggcagtggcggcggcggtggcggcagcggtgggggcagcgcacgggatggcagcgcccttcggtgtggggagtgcggccgttgcttcacgcgccccgcgcacctcatccgccatcgcatgctgcacaccggcgagcggcccttcccctgcaccgagtgtgagaagcgcttcaccgaacgctccaagctcatcgaccactaccgaacgcacacgggcgtgcggcccttcacctgcaccgtctgcggcaaaagcttcatccgcaaggaccacctccgcaagcaccagcgcaaccatgcagcgggcgccaagaccccggcccgaggccagccactcccgacgccgcccgcacctcctgatcccttcaagagccccgcctccaaaggacctttggcctccacagaccttgtgaccgactggacttgtggcctcagcgtcctgggacccaccgatggcggggacatgtgagcgcctccagccccatagcccctgccggccgcacgtgtaaaaagccccgtgtgcaggcagcagggcggcgtggaagcttcaggcagacgcgggacggggagaaccaaatgtccaagttgctgaactgatgatcactggagaaagagaaactatccaccaggacagctgccacctctaaaccaagtagaattctctgtgaaatgggagcgccgtagaattttaagtaatttaattgcaaacctgttttgttttttgttttttgtttttttttaattcttgaggaaaaagctggaaaatagtaatagggctatttaaattttgtaggtacttttggttttcagggcgtgcatttctgtcactatctcactgagtctgatagtgtgttggaaggttggccagttggggacccctggcccactgactcctggggatggggtcctgtgtgtgcccctgctctgcccagttgggctgagtgggcctagcgcaccaagcccctgggcagtgagggccattgggtcccttggagcacacctcagtgcagcaggaaggacccctccgggagtagcggttgcatttcccagcttgcctctcctgaaaaggccccccaaaagtgctggccccaacttttctctattttgggccatctgtggtacccgtcccaagggcacttggtggtgtcccctagtgtgtgactccctggcctcataaggacgagttgtctgaaatcccagcgttaggtctggggagatggagaagctgaaactggggagctgcaccacaaacgtctagctctcagcagagctgggagcaaagcctggccgcccaccccaacctggggctgcctcccactccgtgagatgcttctgtctcctgttcactttgtgtggtagtttcttattttcaaaatgcatctcatttgatcattactgtgaccttgggaagcagcaggacagggatttctttttagaggtgcaaactgctcagaggggacacacctcagcctctcactgtgggtacacgtggcgtgccatgagtggggaagagcaacaggcgagatgcctcattctactggaacatcactgtgggtgaacagagatttccaggttttccctcttaaaatatttgtcccacaccgacaagagtccagtcaccaggcctcaaaggaacttctgcttgtagcagccgcctcccctgtgccccagcctccttaatgtgtgcactctcagagggcacagctcgcgaggctgggtttgggggccaagtggcttgttcattccagcatctaacatcataaaggtgggcccagatttcttgattcgaccacagtgctgttcctaccacacaaatatccattcctgttttgttgaagcagccactggtcctcttgtttcccctgcagacggagggacctggcagtgcccattcattcagccccctcatgcatacttttattaggcgatagactagttaagaaaattgtttctatgtactgtatattttgtacctgtttacacttctaatattgatataactgatattttgaaaaataagagaaaacatcctgttaaaataaaacctaaccagcacc

SEQ ID NO: 62047 - protein, 489 aa, Artificial Sequence
  derived and/or modified sequence
MNKSRWQSRRRHGRRSHQQNPWFRLRDSEDRSDSRAAQPAHDSGHGDDESPSTSSGTAGTSSVPELPGFYFDPEKKRYFRLLPGHNNCNPLTKESIRQKEMESKRLRLLQEEDRRKKIARMGFNASSMLRKSQLGFLNVTNYCHLAHELRLSCMERKKVQIRSMDPSALASDRFNLILADTNSDRLFTVNDVKVGGSKYGIINLQSLKTPTLKVFMHENLYFTNRKVNSVCWASLNHLDSHILLCLMGLAETPGCATLLPASLFVNSHPAGIDRPGMLCSFRIPGAWSCAWSLNIQANNCFSTGLSRRVLLTNVVTGHRQSFGTNSDVLAPLLFNGCRSGEIFAIDLRCGNQGKGWKATRLFHDSAVTSVRILQDEQYLMASDMAGKIKLWDLRTTKCVRQYEGHVNEYAYLPLHVHEEEGILVAVGQDCYTRIWSLHDARLLRTIPSPYPASKADIPSVAFSSRLGGSRGAPGLLMAVGQDLYCYSYS

SEQ ID NO: 62048 - DNA, 1470 bp, Artificial Sequence
  derived and/or modified sequence
atgaacaagagcagatggcagagcagaagaagacacggcagaagaagccaccagcagaacccctggttcagactgagagacagcgaggacagaagcgacagcagagccgcccagcccgcccacgacagcggccacggcgacgacgagagccccagcaccagcagcggcaccgccggcaccagcagcgtgcccgagctgcccggcttctacttcgaccccgagaagaagagatacttcagactgctgcccggccacaacaactgcaaccccctgaccaaggagagcatcagacagaaggagatggagagcaagagactgagactgctgcaggaggaggacagaagaaagaagatcgccagaatgggcttcaacgccagcagcatgctgagaaagagccagctgggcttcctgaacgtgaccaactactgccacctggcccacgagctgagactgagctgcatggagagaaagaaggtgcagatcagaagcatggaccccagcgccctggccagcgacagattcaacctgatcctggccgacaccaacagcgacagactgttcaccgtgaacgacgtgaaggtgggcggcagcaagtacggcatcatcaacctgcagagcctgaagacccccaccctgaaggtgttcatgcacgagaacctgtacttcaccaacagaaaggtgaacagcgtgtgctgggccagcctgaaccacctggacagccacatcctgctgtgcctgatgggcctggccgagacccccggctgcgccaccctgctgcccgccagcctgttcgtgaacagccaccccgccggcatcgacagacccggcatgctgtgcagcttcagaatccccggcgcctggagctgcgcctggagcctgaacatccaggccaacaactgcttcagcaccggcctgagcagaagagtgctgctgaccaacgtggtgaccggccacagacagagcttcggcaccaacagcgacgtgctggcccccctgctgttcaacggctgcagaagcggcgagatcttcgccatcgacctgagatgcggcaaccagggcaagggctggaaggccaccagactgttccacgacagcgccgtgaccagcgtgagaatcctgcaggacgagcagtacctgatggccagcgacatggccggcaagatcaagctgtgggacctgagaaccaccaagtgcgtgagacagtacgagggccacgtgaacgagtacgcctacctgcccctgcacgtgcacgaggaggagggcatcctggtggccgtgggccaggactgctacaccagaatctggagcctgcacgacgccagactgctgagaaccatccccagcccctaccccgccagcaaggccgacatccccagcgtggccttcagcagcagactgggcggcagcagaggcgcccccggcctgctgatggccgtgggccaggacctgtactgctacagctacagctag

SEQ ID NO: 62049 - DNA, 2374 bp, Artificial Sequence
  derived and/or modified sequence
gctccaactcctgcagagctgagccggaggggaatccggaagggacacgctgaacaggaacagaaatgaataaaagtcgctggcagagtagaagacgacatgggagaagaagccaccagcagaacccttggttcagactccgtgattctgaagacaggtctgactcccgggcagcacagcccgctcacgattccggccacggtgatgacgagtctccgtcaacctcgtctggcacagctgggacctcctctgtgccagagctacctgggttttactttgaccctgaaaagaaacgctacttccgcttgctccctggacataacaactgcaaccccctgacgaaagagagcatccggcagaaggagatggagagcaagagactgcggctgctccaggaagaagacagacggaaaaagattgccaggatgggatttaatgcatcttccatgctacgaaaaagccagctgggttttctcaacgtcaccaattactgccatttagcccacgagctgcgtctcagctgcatggagaggaaaaaggtccagattcgaagcatggatccctccgccttggcaagcgaccgatttaacctcatactggcagataccaacagtgaccggctcttcacagtgaacgatgttaaagttggaggctccaagtatggtatcatcaacctgcaaagtctgaagacccctacgctcaaggtgttcatgcacgaaaacctctacttcaccaaccggaaggtgaattcggtgtgctgggcctcgctgaatcacttggattcccacattctgctatgcctcatgggactcgcagagactccaggctgtgccaccctgctcccagcatcactgttcgtcaatagtcacccagcaggaatagaccggcctggcatgctctgcagtttccggatccctggtgcctggtcctgtgcctggtccctgaatatccaagcaaataactgcttcagtacaggcttgtctcggcgggtcctgttgaccaacgtggtgacgggacaccggcagtcctttgggaccaacagtgatgtcttggctcctctgctgtttaatggctgccgctctggggaaatctttgccattgatctgcgttgtggaaatcaaggcaagggatggaaggccacccgcctgtttcatgattcagcagtgacctctgtgcggatcctccaagatgagcaatacctgatggcttcagacatggctggaaagatcaagctgtgggacctgaggaccacgaagtgcgtaaggcagtacgaaggccacgtgaatgagtacgcctacctgcccctgcatgtgcacgaggaagaaggaatcctggtggcagtgggccaggactgctacacgagaatctggagcctccacgatgcccgcctactgagaaccataccctccccgtaccctgcctccaaggccgacattcccagtgtggccttctcgtcgcggctggggggctcccggggcgcgccggggctgctcatggctgtcgggcaggacctttactgttactcctacagctaattctgcagggcacagcccagagccatgtggatttgacttacgggagtaaagcgtaactttttactgcatctaatgagggtgttttaagtgacactcagtgtacacagatcccatcctctggctgctaggagagaagtgctgaatgttccgtgtggagatgctcaggaaagttatttgagttaaattgctggctgagagagcttggaagtccttttcataaaaggtacctctttccttttcttattgaattcttagaacttagttaaccctccctgccttttcttaacaaaaaggacttttctaaggactgaagattggcaaaaacgaaaagcttcttcctccaagagcccattgaagaagcccagtgatgagacggtgagatggtttgagtcctcggtgcctgggtagcaggaagaaagacctgcatcctgcatctgtacttggggaagccagcggagaggacggggaggttacttctctaagtttctgcagaaatattgaaggctggagtttggaatccttaaacttggccttctcaaactcagcagcagatctccgggattctgctgttattatccaaaggcgttggaaggaaagatggatcttcttacatgctagaagttttaaacggtccttaacatgcctttgttcaagcaccttccagaatgtaaggttcagcagctctggtttctattacggtgacttgaatgtcagattcaagggcccggcgtcaaaggaaattggttttgactttttgtaatctaggagcgacagttcgtgagatgtttattcagtgttaaagagcctgtttttctaccaaacaataaaaccaagagaag

SEQ ID NO: 62050 - DNA, 1470 bp, Artificial Sequence
  derived and/or modified sequence
atgaacaagtcccgctggcagtcccgccgacggcacgggcgtagatcccaccagcagaacccgtggttccgcttacgtgactctgaggatcgctctgactcccgcgccgctcagcccgcccatgactcgggacacggagatgatgaaagtccgtccacgtcttctggcacagccggaacgtcctcggttcctgaactgccgggtttctactttgatcccgaaaagaagcgttacttccgcctcctgccagggcataataactgtaacccattgacgaaggagagcattaggcagaaggagatggagtcaaagcggctgcggctcctgcaggaggaggacagaaggaaaaaaattgcaaggatggggttcaatgccagtagcatgttgcgaaagagtcagttaggcttcctgaatgtgactaactattgtcatctcgcccatgaacttcgcctgtcctgcatggagcgcaaaaaagtgcagatccgttcgatggatcccagcgcactggccagcgaccggttcaatctgatcctggccgacacaaatagtgacagattgttcaccgtcaacgatgtgaaggtggggggctctaagtacggcatcataaacctacaatctctgaaaaccccaactctaaaggtcttcatgcatgagaatctctactttaccaatagaaaggtcaacagcgtctgttgggctagcctgaaccacctagattcccacattcttctgtgccttatgggactggctgagacgcctggctgtgctacccttttgcccgcttcactgttcgtgaacagccaccccgctgggattgataggcccgggatgctgtgtagttttcgcattcctggagcctggtcctgcgcgtggtccctcaatatccaggctaataattgtttctccactggactgtcacgcagagttctgctgacaaacgtcgtaacgggccatcgacagtccttcggcactaacagtgacgtgctcgccccattgctgtttaacgggtgcaggagtggcgagatttttgctattgatctacgatgtggaaaccagggaaaagggtggaaggccaccagactctttcacgattcggctgtaaccagcgtgagaattctgcaggatgagcagtacctaatggcatctgatatggctggaaaaattaaactttgggacctgcgcacgacgaagtgcgtccgtcagtacgaggggcacgttaacgaatacgcttacctgccacttcacgtccacgaagaggagggcattctcgtggctgtgggccaggattgttacaccagaatttggtctctgcacgatgctcggctgctcagaacaattccaagtccgtatccggcgtcaaaagccgacataccgagtgttgcattttcttccagactcgggggctcgcgtggggcacctggcctgcttatggcagtgggacaggacctgtactgttactcctatagttag

SEQ ID NO: 62051 - DNA, 1470 bp, Artificial Sequence
  derived and/or modified sequence
atgaacaagagccgctggcagagcagaagaagacatggccgccgcagccaccagcagaacccctggttccggctgcgggacagtgaagatagaagtgacagccgggccgcccagcctgcccatgattctggccatggagatgatgagagccccagcaccagcagcggcacagctggcaccagctctgtgcctgagctgcccggcttctactttgatcctgagaagaagcgctacttccggctgctgcccggccacaacaactgcaaccccctgaccaaggagagcatccggcagaaggagatggagagcaagaggctgcggctgctgcaggaggaggacaggaggaagaagatcgccaggatgggcttcaatgccagctccatgctgaggaagagccagctgggcttcctgaatgtgaccaactactgccacctggcccacgagctgcggctgagctgcatggagaggaagaaggtgcagatccgctccatggaccccagcgccctggccagtgaccgcttcaacctgatcctggccgacaccaacagcgacaggctcttcaccgtgaatgatgtgaaggtgggcggcagcaaatatggcatcatcaacctgcagagcctgaagacccccaccctgaaggtgttcatgcatgagaacctgtacttcaccaacaggaaggtgaacagcgtgtgctgggccagcctgaaccacctggacagccacatcctgctgtgcctgatgggcctggccgagaccccaggctgtgccaccctgctgcctgccagcctgtttgtgaacagccaccctgctggcatcgacaggcctggcatgctgtgcagcttccgcatccctggggcctggagctgtgcctggagcctgaacatccaggccaacaactgcttcagcacaggcctgagcagaagagtgctgctgaccaacgtggtgacaggccaccggcagagctttggcaccaacagtgatgtgctggcccccctgctcttcaacggctgccgctctggagagatctttgccatcgacctgcgctgtggcaaccagggcaagggctggaaggccaccaggctcttccatgattctgctgtgacctctgtgcgcatcctgcaggatgagcagtacctgatggccagtgacatggccggcaagatcaagctgtgggacctgcggaccaccaagtgtgtgcggcagtatgagggccacgtgaatgaatatgcctacctgcccctgcacgtgcatgaggaggagggcatcctggtggccgtgggccaggactgctacacccgcatctggagcctgcatgatgcccggctgctgcggaccatccccagcccctacccagccagcaaggctgacatccccagcgtggccttcagcagccggctgggcggcagcagaggagcccctggcctgctgatggctgtgggccaggacctgtactgctacagctacagctag

SEQ ID NO: 62052 - DNA, 1470 bp, Artificial Sequence
  derived and/or modified sequence
atgaacaagagccggtggcagagccggcggcggcacggccggcggtcccatcaacaaaatccctggttccggctacgcgactcagaagaccggagtgattctagggctgcacagccggcccacgacagcggccacggggatgatgagtccccttctacatcttccggcaccgctggaacgtcctctgtgccagagctgcccggcttttattttgatccagagaaaaaacgatatttccgactgttaccaggccacaacaattgtaaccctctaaccaaggagtcgattcgtcagaaagaaatggagagcaaaaggttgcgcttgctccaagaggaagacagacgcaagaagatcgctcggatgggtttcaatgccagcagcatgctccggaagagccagctagggtttcttaacgtgacaaattattgccaccttgctcacgagctgagactttcatgtatggaacggaagaaagttcagatcagatctatggacccctctgctctggcgagtgatcgatttaacttaattctcgccgataccaactccgatcgtctcttcactgtcaatgatgtcaaggtgggagggtcaaaatatggaattatcaatttgcaaagcctgaaaacccctacactgaaagtatttatgcatgaaaacctgtactttacgaacaggaaggtgaactcagtttgttgggctagcctcaatcacctagattcccacatattgttgtgcctcatgggactagccgagactccaggctgtgccaccctgctgcccgctagcttgtttgtgaacagccatcccgccggaattgatcggccggggatgctctgttcgtttaggatcccaggcgcctggtcctgcgcctggagccttaatatacaggcaaataactgcttttccaccgggctgtcccggagggtgctgctgactaatgttgtaacaggccaccggcagtcttttgggactaattctgacgtgctggccccactgctcttcaatggctgcaggagcggagaaattttcgcaatcgatctccgctgcggaaatcagggtaagggctggaaagccactcgcctatttcacgactccgccgtgacaagcgtgagaatcttgcaggatgagcagtacctgatggcttccgatatggcgggaaagataaaattgtgggatttgcgtacaacaaagtgtgtgaggcagtatgaaggccacgtcaatgaatatgcctatttaccgcttcatgttcacgaggaggagggcatattggttgcggtagggcaggactgttataccaggatttggagtctccacgacgcaaggctcctacggactatcccatctccgtatcctgcttctaaggccgacatccctagtgttgcgttttcttctagactgggtgggtccagaggcgcccctggtttattgatggccgttgggcaagatctgtactgctattcctactcctag

SEQ ID NO: 62053 - DNA, 1470 bp, Artificial Sequence
  derived and/or modified sequence
atgaacaaatccagatggcagtccaggcggaggcatggcaggcgttctcaccagcagaatccatggttccggctccgcgattctgaagacagatccgacagtcgagctgcacagcctgcccatgacagcggacacggcgatgacgagtcacccagcacaagcagtggaactgcgggaacatcctccgtgcctgagcttccaggtttctattttgatcccgagaaaaaacgttattttcgactgcttccgggacataacaactgtaacccgctgactaaagagagcatccgccagaaagagatggagagtaaacggctcagactgttacaggaagaggaccgacggaagaaaatcgcaaggatgggattcaacgcctcgtctatgctgcggaaatcccagctaggattcctgaatgtgaccaactattgccatctcgcacacgagctaagactgtcatgtatggagcgaaaaaaggtgcagatcagatcaatggatccatctgcactggcctccgatcggttcaacctcattctcgccgacacgaattcagacagattatttactgtgaatgacgtgaaggtgggcggatcgaagtatggcataatcaatttacagtcccttaagacgccaaccctgaaggtgtttatgcacgaaaatttgtactttactaacaggaaagtgaactctgtctgttgggcttctctgaaccatttagacagtcacattcttctatgtttgatgggtctcgctgagacgcccggatgcgctaccctgctccctgcgagcctgttcgtgaacagccacccggctggcatcgaccgacccggaatgctgtgcagcttccgtattcccggagcctggtcgtgcgcttggtcactgaacattcaggccaacaactgttttagtaccggactgtcacgtagggtactcctgacaaacgtagtaactgggcacaggcagtcttttgggacaaacagcgatgtgctcgctcccctgctgtttaatggctgtcggagtggcgagatctttgcgatagatctccgctgcggcaaccaggggaagggatggaaagcgactcgtcttttccatgatagcgctgttacaagcgtgagaattctacaggatgaacagtacttgatggcgtccgatatggctggcaagataaagctgtgggacctcagaaccaccaagtgcgtgagacaatacgagggccacgttaatgaatatgcttatctccctttgcatgttcatgaggaggagggcatcctggtagccgtcgggcaggattgctacactcgcatctggtccctccatgatgcacggctgttgaggacaattcctagcccctatccggctagcaaagccgatattcccagtgtggcgttttctagccgactaggcggtagccggggagcgccaggactgctgatggcagtaggacaggatctctattgctattcgtactcatag

SEQ ID NO: 62054 - protein, 248 aa, Artificial Sequence
  derived and/or modified sequence
MDQPAVATASTSIREDLVGGESFITASKPAQKTSSFEREGWWRIALTDTPIPGTYHLKTFIEESLLNPVIATYNFKNEGRKKPPLVQRNNPVLNDLPQYMPPDFLDLLKKQVATYSFKDKPRPSPSTLVDKDQSLQLSPGQYNVLPAPVPKYASRSCVFRSTVQRFPTTYFIPHEGPGPGHYNVKMPPTSSVTSCFQSRVPRFLPSCSKTPGPGAYTTLRQFPKQSPTIAKMGQEHSLFFNNNNWLLK

SEQ ID NO: 62055 - DNA, 891 bp, Artificial Sequence
  derived and/or modified sequence
agcactaaagacaaacctggcgggtcccccggagcggtcccaggcgcgcgcgctcgggagcccacgggccacacccgcctcctagcaaccggagctcaggttcagcctagagagagaggaggccaccatggaccagccagccgtcgccaccgcttccacctcaataagggaagacctggtgggtggagaatcattcatcacagcttcgaaaccagcccaaaagacttcctcttttgaaagagaaggatggtggagaatagcattaacagatactcctatacctggcacttaccacttgaaaacttttattgaagaatccctattaaatccagtgatagcaacctacaattttaaaaacgaaggaaggaaaaagccacctcttgtgcaaagaaacaatccagtcctaaatgatcttccgcagtatatgcctcctgacttcctggacctgttaaagaagcaagtggctacttactcattcaaagacaaaccacggccaagccccagcacactagttgacaaagatcagtcacttcagctttctccggggcaatacaacgtgcttcctgcaccagttcccaaatatgcttccaggagctgtgtatttcgctcaacagttcaaagattcccaacaacctattttattccccatgaaggccctggtccaggtcattataatgtgaaaatgcctccaacaagctctgtcacttcttgttttcaatccagagtccctcgattcttgcccagctgttcaaaaaccccaggcccaggagcatatacaactttaagacaattccctaagcagtctccgaccatagccaaaatgggccaagagcatagccttttcttcaacaacaacaattggcttttaaaataaagtgatcttggcaccaa

SEQ ID NO: 62056 - DNA, 747 bp, Artificial Sequence
  derived and/or modified sequence
atggaccagcccgccgtggccaccgccagcaccagcatcagagaggacctggtgggcggcgagagcttcatcaccgccagcaagcccgcccagaagaccagcagcttcgagagagagggctggtggagaatcgccctgaccgacacccccatccccggcacctaccacctgaagaccttcatcgaggagagcctgctgaaccccgtgatcgccacctacaacttcaagaacgagggcagaaagaagccccccctggtgcagagaaacaaccccgtgctgaacgacctgccccagtacatgccccccgacttcctggacctgctgaagaagcaggtggccacctacagcttcaaggacaagcccagacccagccccagcaccctggtggacaaggaccagagcctgcagctgagccccggccagtacaacgtgctgcccgcccccgtgcccaagtacgccagcagaagctgcgtgttcagaagcaccgtgcagagattccccaccacctacttcatcccccacgagggccccggccccggccactacaacgtgaagatgccccccaccagcagcgtgaccagctgcttccagagcagagtgcccagattcctgcccagctgcagcaagacccccggccccggcgcctacaccaccctgagacagttccccaagcagagccccaccatcgccaagatgggccaggagcacagcctgttcttcaacaacaacaactggctgctgaagtag

SEQ ID NO: 62057 - DNA, 747 bp, Artificial Sequence
  derived and/or modified sequence
atggatcagcctgccgtggctaccgcctctactagtatcagagaagacctggtaggcggggagtctttcatcacagcttcaaaacccgcacagaaaacctcctcatttgaacgcgaaggttggtggcggattgccctgacggacacccctattccagggacttaccatctgaaaaccttcatcgaggaatctctgctgaatccggtgattgccacgtataactttaaaaatgaggggagaaaaaaaccccccttagtgcaacgtaataacccggtgcttaatgatctaccccaatacatgccgcccgattttctggacttactaaaaaaacaagtggctacttactcttttaaagataagcctaggccctctccctcaaccctcgttgataaggatcagagcctccagctgtcgccgggacagtataacgtgctacccgccccagtgcctaaatatgccagccgttcttgtgttttcagaagtaccgttcagagattcccaacgacatacttcatcccccacgagggtcctggaccaggacactataacgtaaagatgcccccaacctcctccgtgacctcatgttttcagtccagggtgccacgattccttccaagctgcagcaaaacccccggacccggcgcatatacaaccctacggcaattccctaaacagagccctactattgccaaaatgggccaggagcacagcctgttcttcaacaacaacaactggctattgaagtag

SEQ ID NO: 62058 - DNA, 747 bp, Artificial Sequence
  derived and/or modified sequence
atggaccagcctgctgtggccacagccagcaccagcatccgggaggacctggtgggcggggagagcttcatcacagccagcaagccagcccagaagaccagcagctttgagcgggagggctggtggagaattgccctgacagacacccccatccctggcacctaccacctgaagaccttcatcgaggagagcctgctgaaccctgtgattgccacctacaacttcaagaatgaaggaaggaagaagccacccctggtgcagaggaacaaccctgtgctgaatgacctgccccagtacatgcccccagacttcctggacctgctgaagaagcaggtggccacctacagcttcaaggacaagccccggcccagccccagcaccctggtggacaaggaccagagcctgcagctgagccctggccagtacaacgtgctgcctgcccctgtgcccaagtatgccagccgcagctgtgtgttccgcagcacagtgcagcgcttccccaccacctacttcatcccccatgagggccctggccctggccactacaacgtgaagatgccacccaccagctctgtgaccagctgcttccagagccgggtgccccgcttcctgcccagctgcagcaagaccccaggccctggggcctacaccaccctgcggcagttccccaagcagagccccaccatcgccaagatgggccaggagcacagcctcttcttcaacaacaacaactggctgctgaagtag

SEQ ID NO: 62059 - DNA, 747 bp, Artificial Sequence
  derived and/or modified sequence
atggaccagcccgccgtggccaccgccagcaccagcatccgggaggacctcgtcggcggagaaagctttatcactgcaagtaagcctgcccagaaaactagttctttcgagcgagagggctggtggcgcatcgcccttactgacacgcctattccgggtacctaccacctcaaaacattcatcgaagaaagcctcttgaaccccgtaattgctacatacaatttcaaaaatgaagggcggaagaagcctcccctggtacagagaaataacccggtgcttaatgacctcccacagtacatgccacccgacttccttgacttgctcaagaagcaggttgccacctactctttcaaagacaaacctcgcccatccccttctactctggtggacaaagatcagtcactgcagttaagcccagggcagtacaatgttctgccagcccccgttcctaaatatgcgagtcgctcttgcgttttccgctcaactgttcagcggttcccaaccacctatttcatcccccacgaggggcctggtcccggccattacaatgtgaagatgcctccaacatcaagcgtgacctcgtgctttcagagcagggtgccccgctttctgccctcatgtagcaaaacaccgggccccggggcatacaccaccttgcggcagtttccgaaacaatcccctaccatagccaaaatgggccaggagcactctcttttcttcaataataataattggttactgaagtag

SEQ ID NO: 62060 - DNA, 747 bp, Artificial Sequence
  derived and/or modified sequence
atggaccaaccagccgtggcaaccgcttcaactagtattagggaagacctagttggtggcgaaagctttattaccgcttccaagcctgcccaaaaaaccagcagttttgagagggaaggttggtggcgtatcgcactgacggatacccctattccaggcacctatcacctcaaaacattcatcgaggaaagcttgctgaaccctgtgatcgccacttataactttaagaacgagggcaggaagaagcctccccttgtacagcggaacaatcctgtgctcaacgacttgccccagtatatgcctcctgacttcctcgatctgttgaaaaagcaggtggctacgtacagcttcaaagacaagccgcgaccctccccaagcaccctggtggacaaggaccaatccctccaactttcccctggccaatataacgtcctgcccgctcctgtgccaaaatacgcctcacgcagttgtgtgttccgcagcaccgtgcagcggttcccaactacgtactttattcctcacgaggggcctggacccggtcattacaacgtgaagatgccccctacatcatcagtgacatcctgctttcagtcccgtgtccctcgtttcctcccaagctgtagtaaaacacccggtccgggagcctacacaacgctacgccaattcccaaaacagtcaccaactatcgcaaagatgggccaggagcactcactcttcttcaacaataataactggctgctcaagtag

SEQ ID NO: 62061 - protein, 454 aa, Artificial Sequence
  derived and/or modified sequence
MQKHSPGPPALALLSQSLLTTGNGDTLIINCPGFGQHRVDPAAFQAVFDRKAIGPVTNYSVATHVNISFTLSAIWNCYSRIHTFNCHHARPWHNQFVQWNPDECGGIKKSGMATENLWLSDVFIEESVDQTPAGLMASMSIVKATSNTISQCGWSASANWTPSISPSMDRARAWRRMSRSFQIHHRTSFRTRREWVLLGIQKRTIKVTVATNQYEQAIFHVAIRRRCRPSPYVVNFLVPSGILIAIDALSFYLPLESGNCAPFKMTVLLGYSVFLLMMNDLLPATSTSSHASLVAPLALMQTPLPAGVYFALCLSLMVGSLLETIFITHLLHVATTQPLPLPRWLHSLLLHCTGQGRCCPTAPQKGNKGPGLTPTHLPGVKEPEVSAGQMPGPGEAELTGGSEWTRAQREHEAQKQHSVELWVQFSHAMDALLFRLYLLFMASSIITVICLWNT

SEQ ID NO: 62062 - DNA, 1365 bp, Artificial Sequence
  derived and/or modified sequence
atgcaaaagcattcccctggcccacctgcactcgctctgctcagccagtctctgttgactactgggaacggggatactctgattatcaactgtcccggctttggtcagcacagagtcgacccggcagccttccaggcggtattcgatcgaaaagcgatcggccctgtcactaactattctgtggccactcatgtgaatatctcattcacactgtctgccatctggaattgctattcacgaatccataccttcaactgtcaccatgcacgtccatggcacaatcaatttgttcagtggaaccctgatgagtgcggcggcattaaaaagagcggaatggccaccgagaacctgtggctgagcgatgtcttcatcgaagagtctgtggatcagacgcctgcaggactgatggcctccatgtctatcgttaaggcaacaagtaacacgatcagtcagtgtggctggagcgcatctgcaaactggacgccctctattagccccagcatggatagggcaagagcttggcggcggatgtccaggtcgttccagatacaccatagaacatcctttaggacgaggagggagtgggtgctcctaggcatacagaagcgcaccattaaggtgacagtcgccacaaatcagtatgaacaggccatttttcacgtggctattcggcgccgctgtagaccatcaccctacgttgtcaattttctcgtgcctagcgggatccttatcgctatcgacgcactgtctttctatctccccctagagtcagggaattgcgctcctttcaaaatgaccgtgttactcggctatagcgtgttcttgctcatgatgaatgatcttctcccagctactagcaccagctctcatgcaagtcttgtcgcccccctcgccctaatgcagacacccttacccgctggagtatattttgcattgtgtctgagcctcatggtcgggagtctgctggaaacaatcttcataacccaccttctgcacgtggccacaacccagcctctccccctccctagatggctgcattctctgctgctgcactgcactgggcagggccggtgctgtcctacagctccacagaagggtaacaagggcccaggcttgactccaacccatttgccaggggtaaaagaacccgaggtctctgcaggccagatgcctggcccgggcgaggccgaactcaccgggggctccgaatggacccgggcccagcgagagcacgaggcccagaagcagcattccgtagagctgtgggtgcagtttagtcatgccatggacgcgcttttattcagactctatcttctgttcatggcctcctccattattacagtcatatgcttatggaatacatag

SEQ ID NO: 62063 - DNA, 1365 bp, Artificial Sequence
  derived and/or modified sequence
atgcagaagcacagccctggccccccagccctggccctgctgagccagagcctgctgaccactggaaatggagacaccctcatcatcaactgccccggcttcggccagcaccgggtggaccctgctgccttccaggccgtgtttgacaggaaggccatcggccctgtgaccaactacagcgtggccacccacgtgaacatctccttcaccctgagcgccatctggaactgctacagccgcatccacaccttcaactgccaccacgcccggccctggcacaaccagtttgtgcagtggaacccagatgaatgtggcggcatcaagaagagcggcatggccacagagaacctgtggctgagtgatgtgttcatcgaggagagcgtggaccagaccccagctggcctgatggcctccatgagcatcgtgaaggccaccagcaacaccatcagccagtgtggctggagcgccagcgccaactggacccccagcatcagccccagcatggaccgggcccgggcctggaggaggatgagccgctccttccagatccaccacaggaccagcttccgcacccggcgggagtgggtgctgctgggcatccagaagaggaccatcaaggtgacagtggccaccaaccagtatgagcaggccatcttccacgtggccatcagaagacgctgccggcccagcccctacgtggtgaacttcctggtgcccagcggcatcctgattgccattgatgccctgtccttctacctgcccctggagagcggcaactgtgcccccttcaagatgacagtgctgctgggctacagcgtcttcctgctgatgatgaatgacctgctgcctgccaccagcaccagcagccacgccagcctggtggcccccctggccctgatgcagacccccctgcctgctggggtgtactttgccctgtgcctgagcctgatggtgggcagcctgctggagaccatcttcatcacccacctgctgcacgtggccaccacccagcccctgcccctgccccgctggctgcacagcctgctgctgcactgcaccggccagggccgctgctgccccacagccccccagaagggcaacaagggccctggcctgacccccacccacctgcccggggtgaaggagcctgaggtgtctgctggccagatgcctggccctggagaggccgagctgactggaggcagcgagtggacccgggcccagcgggagcacgaggcccagaagcagcacagcgtggagctgtgggtgcagttcagccacgccatggatgccctgctcttccggctgtacctgctcttcatggccagcagcatcatcaccgtcatctgcctgtggaacacctag

SEQ ID NO: 62064 - DNA, 1365 bp, Artificial Sequence
  derived and/or modified sequence
atgcagaagcacagccccggcccccccgccctggccctgctgagccagtccttacttacaactggcaatggcgacaccctaattatcaactgtccgggttttgggcagcatagagtagacccggcagcttttcaggccgtttttgacagaaaggccatagggccagtgaccaactatagcgtggcaacgcatgtaaacatttcctttacgctctcagccatctggaattgctatagccgtattcataccttcaactgccatcacgctcggccgtggcacaatcagttcgtgcagtggaacccagacgaatgtggagggatcaagaagtctgggatggcaaccgaaaatctgtggctcagtgacgtcttcatcgaggaatcagttgaccaaacacccgccggattgatggcctctatgagcatcgttaaagcaaccagcaatacgatttcccagtgcggatggagtgctagcgcgaactggactcctagcatatcccccagcatggatcgagcccgcgcgtggagacgcatgtcacggagctttcagattcatcaccgaacatcattccggacgcgccgcgagtgggtgctattagggatacagaaaagaacaatcaaggtgacagttgctactaatcagtacgagcaggcgattttccatgttgccatccggaggcgttgtagaccttcaccttacgtggtaaattttctggtgcccagcgggatccttatagctatcgacgccttgagcttttatttacccctggagagcggcaactgtgctccctttaagatgaccgtgttactcggctactccgtctttctcctgatgatgaatgaccttctgcccgcaacatcaacatctagccacgcatccctggtggctcccctggctctcatgcaaacccctcttcccgccggggtgtatttcgctctgtgtctgagtttgatggtggggtcactcctggagacgattttcatcacacatctcctgcacgtcgcaactacccagcctctacctcttccgcggtggcttcacagtctgttactgcattgcactgggcagggaaggtgttgccccacagcacctcagaagggaaataaaggcccaggcctaactcccacccacctgcccggagtgaaggagccagaggtcagtgcaggacagatgccaggacccggagaggccgagttgacggggggtagcgaatggacccgggcacaaagagaacacgaggcccaaaagcaacactccgtggagctctgggtccagttttcccatgctatggacgcactgttgttcagactgtacctcttgttcatggcttcttcaattataaccgtcatctgcctgtggaacacatag

SEQ ID NO: 62065 - DNA, 1365 bp, Artificial Sequence
  derived and/or modified sequence
atgcagaaacatagcccgggaccacccgctctcgctctgcttagtcagtcactcctgaccacaggcaatggggatactctcattatcaactgtcctgggttcggccagcatcgggtagacccggctgcattccaagccgtgtttgataggaaggcaataggcccagttacgaattatagtgtggctactcatgtgaacatctcattcactctgtccgcaatctggaattgttattcccgcatccacactttcaattgccatcatgcacgaccctggcacaaccaatttgtgcagtggaaccctgacgaatgcggtggcattaagaaatcgggaatggctacggagaatctttggctctcagacgtgtttatcgaggaatccgtcgaccagactccagctggcttaatggcttcaatgagcatagtaaaggctacttccaacacaatctcccagtgcggctggtccgctagcgccaattggaccccctctataagtccatccatggatcgggctcgagcctggcggaggatgtccaggtcgtttcagattcaccaccggacaagttttagaacgcgacgtgagtgggttctgctgggaattcaaaagcgtaccatcaaagtcacagtagcaacaaatcagtatgaacaggcgatctttcatgtcgccatacggaggagatgcagacctagcccttatgtggtgaactttctcgtgccttcagggatccttatcgctattgatgccctgagtttttatctgccattggaatctggtaattgcgccccattcaagatgaccgtgttactcggatattcagttttcttacttatgatgaacgacctcttaccagctacatcaacttcttctcacgcgtctttggtggcccctctggctcttatgcaaaccccactgcccgctggcgtgtattttgcactgtgccttagcctgatggtgggatccctcttagagaccatctttattactcatctgttgcacgtggcgactacccagcccctgccactgcccagatggctccacagcttgcttctgcactgcactgggcaggggaggtgctgtcccaccgctccgcagaaaggtaataaaggccctggactgacacccacacacttgcccggagtcaaggaacctgaggtaagtgctgggcagatgcctgggccaggggaggcggaattaaccgggggatcggagtggactcgtgctcagcgagaacatgaagcccaaaaacagcacagcgtcgagctatgggtacagtttagccacgccatggatgctttattgttccgtctttatctgctgttcatggcctcatcaattataacagtgatatgtctgtggaacacctag

SEQ ID NO: 62066 - DNA, 1674 bp, Artificial Sequence
  derived and/or modified sequence
atgcagaaacactctccaggccccccagccctggccctcctctctcagtctctgctcactacaggaaatggcgacactttgattatcaattgcccaggctttggccagcacagggtggaccctgcagcctttcaagcagtgtttgacagaaaggctattggtccagtcaccaactacagtgtcgccactcatgtcaacatctccttcaccttgtctgccatctggaactgctattccaggattcacaccttcaactgccaccatgcccggccttggcacaatcaatttgtgcagtggaacccagatgaatgcggaggcatcaagaagtccggcatggcaactgagaacctatggctttcagatgtcttcatcgaggagtctgtggatcagacacctgcaggtctcatggctagtatgtcaatagtgaaggccacatcaaacacaataagccaatgtgggtggtcagcatctgcaaactggacaccttctatttccccttccatggacagagcccgggcatggagaaggatgtccaggagctttcaaatacatcacagaacctcattcagaacaaggagggagtgggtactgctgggtatccaaaaaagaacaataaaggtgaccgtggccactaaccagtatgaacaagccatcttccatgtggccatcaggcgcaggtgcaggcccagcccctacgtggtaaactttctggtgcccagtggcattctgattgccatcgatgccctcagtttctacctgccactggaaagtgggaattgtgccccattcaagatgactgttctgctgggctacagcgtcttcctgctcatgatgaatgacttgctcccagccactagcacttcatcacatgcttcactagtggcgcctctggccctcatgcagacccccttgcctgcaggtgtctacttcgccctgtgcctgtccctgatggtgggcagcctgctggagaccatcttcatcacccacctgctgcacgtggccaccacccagcccctacctctgcctcggtggctccactccctgctgctgcactgcaccggccaagggagatgctgtcccactgcgccccagaagggaaataagggcccgggtctcacccccacccacctgcccggtgtgaaggagccagaggtatcagcagggcagatgccaggccctggggaggcagagctgacagggggctcagaatggacaagggcccagcgggaacacgaggcccagaagcagcactcggtggagctgtgggtgcagttcagccacgcgatggacgccctgctcttccgcctctacctgctcttcatggcctcctccatcatcaccgtcatatgcctctggaacacctaggcaggtgctcacctgcaaacttcagtctggacttctttttgccagagaactccagaaaccagtcaggctctcagtcagccttgtggccctgtcaaccgcctcatttttaacccagtcctctgtgtagtttcagaccagacctgaatagtctcctatgccctccaaaagtcgggtccttgctcctgcatgccatcagccccactcagccctcccatacctccctggctcctcaggattcaggttcctagggtacgtccttgattaaatcaccccaatatgcccctttgcagaaagtattggcttttccct

SEQ ID NO: 62067 - DNA, 1365 bp, Artificial Sequence
  derived and/or modified sequence
atgcagaagcacagccccggcccccccgccctggccctgctgagccagagcctgctgaccaccggcaacggcgacaccctgatcatcaactgccccggcttcggccagcacagagtggaccccgccgccttccaggccgtgttcgacagaaaggccatcggccccgtgaccaactacagcgtggccacccacgtgaacatcagcttcaccctgagcgccatctggaactgctacagcagaatccacaccttcaactgccaccacgccagaccctggcacaaccagttcgtgcagtggaaccccgacgagtgcggcggcatcaagaagagcggcatggccaccgagaacctgtggctgagcgacgtgttcatcgaggagagcgtggaccagacccccgccggcctgatggccagcatgagcatcgtgaaggccaccagcaacaccatcagccagtgcggctggagcgccagcgccaactggacccccagcatcagccccagcatggacagagccagagcctggagaagaatgagcagaagcttccagatccaccacagaaccagcttcagaaccagaagagagtgggtgctgctgggcatccagaagagaaccatcaaggtgaccgtggccaccaaccagtacgagcaggccatcttccacgtggccatcagaagaagatgcagacccagcccctacgtggtgaacttcctggtgcccagcggcatcctgatcgccatcgacgccctgagcttctacctgcccctggagagcggcaactgcgcccccttcaagatgaccgtgctgctgggctacagcgtgttcctgctgatgatgaacgacctgctgcccgccaccagcaccagcagccacgccagcctggtggcccccctggccctgatgcagacccccctgcccgccggcgtgtacttcgccctgtgcctgagcctgatggtgggcagcctgctggagaccatcttcatcacccacctgctgcacgtggccaccacccagcccctgcccctgcccagatggctgcacagcctgctgctgcactgcaccggccagggcagatgctgccccaccgccccccagaagggcaacaagggccccggcctgacccccacccacctgcccggcgtgaaggagcccgaggtgagcgccggccagatgcccggccccggcgaggccgagctgaccggcggcagcgagtggaccagagcccagagagagcacgaggcccagaagcagcacagcgtggagctgtgggtgcagttcagccacgccatggacgccctgctgttcagactgtacctgctgttcatggccagcagcatcatcaccgtgatctgcctgtggaacacctag

SEQ ID NO: 62068 - protein, 692 aa, Artificial Sequence
  derived and/or modified sequence
MDGEPPASSGLGLPDYTSGVSFHDQADLPETEDFQAGLYVTESPQPQEAEAVSLGRLSDKSSTYQYLPYISYLVAPGSASGPSRLNSRKEAGLLAAVTLTQKIIVYLSDTTLMDILPRISHEVLLPVLSFLTSLVTGFPSGAQARTILCVKTISLIALICLRIGQEMVQQHLSEPVATFFQVFSQLHELRQQDLKLDPAGRGEGQLPQVVFSDGQQRPVDPALLDELQKVFTLEMAYTIYVPFSCLLGDIIRKIIPNHELVGELAALYLESISPSSRNPASVEPTMPGTGPEWDPHGGGCPQDDGHSGTFGSVLVGNRIQIPNDSRPENPGPLGPISGVGGGGLGSGSDDNALKQELPRSVHGLSGNWLAYWQYEIGVSQQDAHFHFHQIRLQSFPGHSGAVKCVAPLSSEDFFLSGSKDRTVRLWPLYNYGDGTSETAPRLVYTQHRKSVFFVGQLEAPQHVVSCDGAVHVWDPFTGKTLRTVEPLDSRVPLTAVAVMPAPHTSITMASSDSTLRFVDCRKPGLQHEFRLGGGLNPGLVRALAISPSGRSVVAGFSSGFMVLLDTRTGLVLRGWPAHEGDILQIKAVEGSVLVSSSSDHSLTVWKELEQKPTHHYKSASDPIHTFDLYGSEVVTGTVSNKIGVCSLLEPPSQATTKLSSENFRGTLTSLALLPTKRHLLLGSDNGVIRLLA

SEQ ID NO: 62069 - protein, 738 aa, Artificial Sequence
  derived and/or modified sequence
MLVRVVLSLTPSFPEPSALYTACKMVRWLSAKLGPTVASRHVARNLLRLLTSCYVGPTRQQFTVSSGESPPLSAGNIYQKRPVLGDIVSGPVLSCLLHIARLYGEPVLTYQYLPYISYLVAPGSASGPSRLNSRKEAGLLAAVTLTQKIIVYLSDTTLMDILPRISHEVLLPVLSFLTSLVTGFPSGAQARTILCVKTISLIALICLRIGQEMVQQHLSEPVATFFQVFSQLHELRQQDLKLDPAGRGEGQLPQVVFSDGQQRPVDPALLDELQKVFTLEMAYTIYVPFSCLLGDIIRKIIPNHELVGELAALYLESISPSSRNPASVEPTMPGTGPEWDPHGGGCPQDDGHSGTFGSVLVGNRIQIPNDSRPENPGPLGPISGVGGGGLGSGSDDNALKQELPRSVHGLSGNWLAYWQYEIGVSQQDAHFHFHQIRLQSFPGHSGAVKCVAPLSSEDFFLSGSKDRTVRLWPLYNYGDGTSETAPRLVYTQHRKSVFFVGQLEAPQHVVSCDGAVHVWDPFTGKTLRTVEPLDSRVPLTAVAVMPAPHTSITMASSDSTLRFVDCRKPGLQHEFRLGGGLNPGLVRALAISPSGRSVVAGFSSGFMVLLDTRTGLVLRGWPAHEGDILQIKAVEGSVLVSSSSDHSLTVWKELEQKPTHHYKSASDPIHTFDLYGSEVVTGTVSNKIGVCSLLEPPSQATTKLSSENFRGTLTSLALLPTKRHLLLGSDNGVIRLLA

SEQ ID NO: 62070 - DNA, 2217 bp, Artificial Sequence
  derived and/or modified sequence
atgctggtgagagtggtgctgagcctgacccccagcttccccgagcccagcgccctgtacaccgcctgcaagatggtgagatggctgagcgccaagctgggccccaccgtggccagcagacacgtggccagaaacctgctgagactgctgaccagctgctacgtgggccccaccagacagcagttcaccgtgagcagcggcgagagcccccccctgagcgccggcaacatctaccagaagagacccgtgctgggcgacatcgtgagcggccccgtgctgagctgcctgctgcacatcgccagactgtacggcgagcccgtgctgacctaccagtacctgccctacatcagctacctggtggcccccggcagcgccagcggccccagcagactgaacagcagaaaggaggccggcctgctggccgccgtgaccctgacccagaagatcatcgtgtacctgagcgacaccaccctgatggacatcctgcccagaatcagccacgaggtgctgctgcccgtgctgagcttcctgaccagcctggtgaccggcttccccagcggcgcccaggccagaaccatcctgtgcgtgaagaccatcagcctgatcgccctgatctgcctgagaatcggccaggagatggtgcagcagcacctgagcgagcccgtggccaccttcttccaggtgttcagccagctgcacgagctgagacagcaggacctgaagctggaccccgccggcagaggcgagggccagctgccccaggtggtgttcagcgacggccagcagagacccgtggaccccgccctgctggacgagctgcagaaggtgttcaccctggagatggcctacaccatctacgtgcccttcagctgcctgctgggcgacatcatcagaaagatcatccccaaccacgagctggtgggcgagctggccgccctgtacctggagagcatcagccccagcagcagaaaccccgccagcgtggagcccaccatgcccggcaccggccccgagtgggacccccacggcggcggctgcccccaggacgacggccacagcggcaccttcggcagcgtgctggtgggcaacagaatccagatccccaacgacagcagacccgagaaccccggccccctgggccccatcagcggcgtgggcggcggcggcctgggcagcggcagcgacgacaacgccctgaagcaggagctgcccagaagcgtgcacggcctgagcggcaactggctggcctactggcagtacgagatcggcgtgagccagcaggacgcccacttccacttccaccagatcagactgcagagcttccccggccacagcggcgccgtgaagtgcgtggcccccctgagcagcgaggacttcttcctgagcggcagcaaggacagaaccgtgagactgtggcccctgtacaactacggcgacggcaccagcgagaccgcccccagactggtgtacacccagcacagaaagagcgtgttcttcgtgggccagctggaggccccccagcacgtggtgagctgcgacggcgccgtgcacgtgtgggaccccttcaccggcaagaccctgagaaccgtggagcccctggacagcagagtgcccctgaccgccgtggccgtgatgcccgccccccacaccagcatcaccatggccagcagcgacagcaccctgagattcgtggactgcagaaagcccggcctgcagcacgagttcagactgggcggcggcctgaaccccggcctggtgagagccctggccatcagccccagcggcagaagcgtggtggccggcttcagcagcggcttcatggtgctgctggacaccagaaccggcctggtgctgagaggctggcccgcccacgagggcgacatcctgcagatcaaggccgtggagggcagcgtgctggtgagcagcagcagcgaccacagcctgaccgtgtggaaggagctggagcagaagcccacccaccactacaagagcgccagcgaccccatccacaccttcgacctgtacggcagcgaggtggtgaccggcaccgtgagcaacaagatcggcgtgtgcagcctgctggagccccccagccaggccaccaccaagctgagcagcgagaacttcagaggcaccctgaccagcctggccctgctgcccaccaagagacacctgctgctgggcagcgacaacggcgtgatcagactgctggcctag

SEQ ID NO: 62071 - DNA, 2217 bp, Artificial Sequence
  derived and/or modified sequence
atgctggtccgagtagtgttgtctctcactccatcgtttccagagccttctgcgctgtacactgcctgcaagatggtgagatggctgtcagctaaactagggccaaccgtagcatctagacacgtcgcccgtaacctactccgcctgttaacttcctgctatgtcggacccacgagacagcagttcacagtgtcctctggagagtctccgccgctgagtgccggcaacatataccagaaaagacctgtgcttggcgatattgtttcaggccctgtattatcttgcttgttgcatatcgctcgcctttacggagagcccgtgctcacataccagtatctgccttacatctcttatttggttgctccaggaagcgcgtctgggccaagtaggttgaattccaggaaggaagcaggcctcctcgcggccgtaaccctgacgcaaaagattatcgtttacctgagcgataccacactgatggatatcctgcctcgcatctcccacgaggtactgttgcctgtgttgtcttttttgaccagccttgttactgggttcccttcgggcgcccaggctcgaacgatcctgtgtgtcaaaaccatctctctgattgccctaatctgcctacggattggccaggaaatggtgcagcagcatttgagcgagccagtcgccaccttttttcaggtgtttagccaactgcatgagctcagacaacaagatctgaaattggacccagccggacgcggagaaggacagctgccacaagttgtgtttagtgatgggcaacaaagacccgtggatcccgccttattagacgagctccagaaggtattcacactcgaaatggcttacacgatttacgtgcccttcagctgcttactgggagacattattagaaagatcatccctaatcacgaactggtcggtgaattggcagcgctctacttggagtcaatctctccgtcatcaagaaaccccgcctcggtcgaacccacaatgcccggcaccggccctgaatgggatccccacggcggtggttgtccacaggacgacggccacagcgggactttcggcagtgtgctggtcggaaatagaatccaaatccccaacgattcaaggcccgaaaatccagggcccctaggccccatctccggggtgggtggcggcggtttgggatcagggtccgacgataacgccctcaaacaggagcttccccggagcgtgcatggcctatctggaaattggctggcttactggcagtatgagattggtgtgtctcagcaagatgctcactttcatttccatcagatacggctgcaatccttccccggtcattccggggcagtaaaatgcgtcgctccactgagtagcgaagacttctttttatctggaagtaaggatcgcaccgttcggttatggcctctatacaactatggcgatgggacgtctgagaccgcccccagattggtctacacacagcatcgcaaatcagtgttcttcgttgggcaactggaagccccccagcacgtggtcagctgtgatggagccgtccacgtgtgggatcctttcaccggcaagactctgcgcacagtggaaccactggattcacgagtgcccctgaccgccgtcgccgttatgccagcaccacacacctcgattaccatggctagctccgatagtaccctgagatttgtcgactgtcgcaagcccggcctgcagcacgagtttaggttgggcggggggttaaatcctgggctcgtgcgggctctcgcaattagccctagcgggcggagtgtggttgccgggttctcttcaggcttcatggtgctgctggacacgaggaccgggctggtgctgcgtgggtggcccgcgcatgaaggggacatactccagattaaggctgtggaaggtagtgtgctggtgagttcaagctccgaccattctctcaccgtttggaaggaactggagcagaagcccacacaccactataagtccgccagcgaccctatacatacctttgacctgtacggtagcgaggtggtcacgggaaccgtttccaacaaaatcggggtctgcagcctgcttgaaccgcccagccaggctaccaccaaattaagttctgagaactttagggggactttaacttcactcgcattactgcctaccaaaaggcatctgttgctggggagtgacaatggggtgatccggctactggcttag

SEQ ID NO: 62072 - DNA, 2217 bp, Artificial Sequence
  derived and/or modified sequence
atgctggtgcgggtggtgctgagcctgacccccagcttccctgagcccagcgccctgtacacagcctgcaagatggtgcgctggctgagcgccaagctgggccccaccgtggccagcagacatgtggccaggaacctgctgcggctgctgaccagctgctacgtgggccccacccggcagcagttcaccgtgagcagcggggagagcccccccctgtctgctggcaacatctaccagaagaggcctgtgctgggggacatcgtgtctggccctgtgctgagctgcctgctgcacatcgcccggctgtatggagagcctgtgctgacctaccagtacctgccctacatctcctacctggtggcccctggcagcgccagcggccccagccggctgaacagcaggaaggaggccggcctgctggccgctgtgaccctgacccagaagatcatcgtgtacctgagtgacaccaccctgatggacatcctgccccgcatcagccatgaggtgctgctgcctgtgctgtccttcctgaccagcctggtgacaggcttccccagcggggcccaggcccggaccatcctgtgtgtgaagaccatcagcctcatcgccctgatctgcctgagaattggccaggagatggtgcagcagcacctgtctgagcctgtggccaccttcttccaggtgttcagccagctgcacgagctgcggcagcaggacctgaagctggaccctgctggccgcggggagggccagctgccccaggtggtgttcagtgatggccagcagaggcctgtggaccctgccctgctggatgagctgcagaaggtgttcaccctggagatggcctacaccatctacgtgcccttcagctgcctgctgggggacatcatcaggaagatcatccccaaccacgagctggtgggggagctggccgccctgtacctggagagcatcagccccagcagcagaaatcctgcctctgtggagcccaccatgcctggcactggacctgagtgggacccccacggcggcggctgcccccaggatgatggccacagcggcaccttcggctctgtgctggtgggcaaccgcatccagatccccaatgacagcaggcctgagaaccctggccccctgggccccatctctggagtgggcggcggcggcctgggcagcggcagtgatgacaatgccctgaagcaggagctgcccaggtctgtgcacggcctgagcggcaactggctggcctactggcagtatgaaattggagtgtcccagcaggatgcccacttccacttccaccagatccggctgcagagcttccctggccacagcggggctgtgaagtgtgtggcccccctgagcagcgaggacttcttcctgagcggcagcaaggacagaacagtgcggctgtggcccctgtacaactatggagatggcaccagcgagacagccccccggctggtgtacacccagcacaggaagagcgtcttctttgtgggccagctggaggccccccagcacgtggtgtcctgtgatggagctgtgcacgtgtgggaccccttcaccgggaagaccctgaggacagtggagcccctggacagccgggtgcccctgacagctgtggccgtgatgcctgccccccacaccagcatcaccatggccagcagtgacagcaccctgcgctttgtggactgcaggaagccaggcctgcagcacgagttccggctgggcggcggcctgaaccctggcctggtgcgggccctggccatcagccccagcggccgctctgtggtggccggcttcagcagcggcttcatggtgctgctggacaccaggacaggcctggtgctgcggggctggccagcccacgagggggacatcctgcagatcaaggctgtggagggctctgtgctggtgagcagcagcagtgaccacagcctgactgtgtggaaggagctggagcagaagcccacccaccactacaagagcgccagtgaccccatccacacctttgacctgtatggcagcgaggtggtgactggaacagtgagcaacaagattggagtgtgcagcctgctggagccccccagccaggccaccaccaagctgagcagcgagaacttccggggcaccctgaccagcctggccctgctgcccaccaagaggcacctgctgctgggcagtgacaatggagtcatccggctgctggcctag

SEQ ID NO: 62073 - DNA, 2217 bp, Artificial Sequence
  derived and/or modified sequence
atgctggtgcgggtggtgctgagcctgacccccagcttccccgagccctccgccctatacaccgcctgtaagatggttagatggctgtccgctaaactcggcccaacagtggcatcaagacacgtggccagaaacctactgaggctgttgaccagctgttacgtgggacctaccaggcaacagtttacagtcagctcaggtgagtcacctccattgagcgccgggaatatttaccagaaaagacccgtgctgggagacattgtctccgggccggttctttcctgtttgctgcatatcgctcgtctttatggtgaaccagtgcttacctaccaatacctgccatacatcagctacctggtggcccctggcagcgcttcgggccctagcaggctgaattcccggaaggaagccggcctcttggcggcagttacactgacgcagaagatcatcgtctatctatctgacactaccttgatggatattctgccccggatttcccatgaggtactcttacccgtcctttctttcctgacgtccctcgtgaccggattccctagtggagcacaggctcgcacaatactgtgcgttaagacgattagcctcatcgccctcatatgtcttagaatcggacaggaaatggtgcaacagcacctgagcgagcccgtagcgacgttcttccaggtcttttctcaactgcatgaactaaggcagcaggatctgaagttagaccctgctggcagaggcgaggggcagctgcctcaggtcgtcttttcagacggacagcagcggccagttgatcctgccctcctggatgaacttcagaaggtgtttactctggagatggcctacactatctacgtacccttctcgtgtttgctcggtgacattatccgaaagatcatcccaaaccacgagttggtcggcgaactggccgctctttatttagaatcgatttcaccctcaagccgtaacccagcctcggtcgaacccaccatgcccggcacaggaccagaatgggacccccacggcggtggatgtccccaggacgacggacactcggggacttttggctccgtcctggtgggaaatcgcattcagatccccaatgattctcggcctgaaaatcctggtccactcggaccaataagcggcgtcggagggggtgggctgggctctggtagtgatgataacgctctcaaacaagagctgccgcgatctgttcatggcctatcgggcaactggctggcctactggcaatatgagattggcgtgtcacagcaggatgcgcattttcactttcaccagatccgactccagtcatttcccgggcattccggagctgtgaagtgcgtggcacccctgagtagcgaggacttctttttgagcggcagcaaagaccgcacagtccgactctggccactctacaattacggggacgggacaagcgagactgctccaagactggtgtacactcagcatagaaaatctgtcttcttcgttgggcagttggaagccccacagcatgtggtgagttgtgatggtgccgtgcacgtctgggacccattcactggaaagaccctgagaacagtagagccattggattccagggtgccgctgacagccgtggccgtcatgcctgctcctcacaccagtattaccatggcaagctccgactcaactttaaggtttgtggattgtcggaagcctgggctccagcacgagtttaggctggggggagggttaaatcccggcttagttcgagctctggccattagtccctctgggcgctccgtggtggctggcttcagttctggattcatggtgcttctagatacgcggacaggactggttctccgagggtggcctgctcacgaaggcgacattctgcagattaaagcggtggaggggtccgtgcttgtctcttcatcttcagatcattcgctgacggtctggaaagagctcgagcagaaaccaacacaccactataagtctgcatcagaccctattcataccttcgatttgtatggatctgaagtagttacgggcaccgtatccaataagatcggcgtctgttcattgctggaacccccctcacaggccacgacaaaactgagtagcgaaaactttcggggtaccctgaccagcctggctctcctgcctactaagaggcacctattgcttggatccgataatggggtgattaggctgctagcctag

SEQ ID NO: 62074 - DNA, 2217 bp, Artificial Sequence
  derived and/or modified sequence
atgctcgtaagagtagtcttaagcctgaccccatcatttcccgaaccatcagccctctacaccgcttgtaagatggtcaggtggctgagcgccaagctgggcccaacagttgcctcccgccacgttgcacggaacctgctgcggctactgacaagctgttacgtgggccctacaagacagcaattcaccgtaagtagcggagagtccccacccttatctgcaggcaacatatatcagaagcgacctgttctgggcgacatcgtgtccggccctgtcctgtcctgcctactgcacattgctcgcctttatggtgagcccgtattgacgtaccagtatcttccgtacatctcttatttggttgccccaggcagcgcatcgggccctagccgactgaatagtaggaaggaagcaggactattggcagctgttactctgacacagaagattatcgtatacttgtccgacacaactctgatggacattctcccgcgaatttcccacgaggtactcctgccggttctgagtttcttgacgagtcttgtgactggattcccaagtggggcacaagcccgaacgatactgtgtgtgaagacgattagcttgatcgctctgatatgtcttaggatcgggcaggagatggtgcagcagcacctgagcgagccagtggcgacattcttccaagttttctcccagctccatgaactgaggcagcaggacctgaaactcgacccagctgggcgtggggaaggacagttgccacaggtggtgttctctgacggtcaacaacggcctgtggatcccgctcttctggatgagttacaaaaggtatttacgctcgagatggcttacacaatttacgtgcccttctcctgcctgcttggggatatcattaggaaaataatcccaaatcacgagctagtcggtgagttggccgctctgtacctggaatccattagtccaagcagcagaaatcccgcatcagtcgagcctaccatgcccggtactgggcctgaatgggatccacatggaggagggtgtcctcaggatgacggtcatagcggaacttttggatccgtattggttggaaaccggattcagatccctaacgactcacggccagagaaccctggaccactggggccaatttcaggggttggtggaggtggactgggttccggctccgatgataacgcacttaagcaggagcttcctcgctctgtccacgggctcagcggcaactggctcgcctattggcaatacgagatcggagtctcccaacaggatgctcactttcacttccaccaaattcgcttgcagtccttcccagggcactcaggggcagtcaagtgtgtggcacctctgtcctccgaagatttttttcttagcggaagcaaggatcggactgttagactctggcctctgtacaactacggagacggaacttcggagacagcgccacgactggtgtacacacagcatagaaaatctgtcttttttgttgggcagctagaagctccacagcacgtggtcagctgcgatggagctgttcatgtctgggacccttttaccgggaaaacgctcaggactgtcgagcctcttgactcgagggtaccactgaccgctgtggctgtgatgccagccccacacacttcgattaccatggcttcctctgatagcactctcagatttgtcgactgtagaaagccgggtctgcagcatgaattcagactggggggtgggctcaaccccggtttggtccgtgcccttgcaatcagcccctccggaagaagtgtcgtcgccggattcagctccggatttatggtgttgctggacactcgtactggactggttctccggggttggccggcacacgagggtgatattctgcaaatcaaggccgtggaaggttctgtgttggtgtcaagttcttcagaccacagccttacagtgtggaaagaactcgagcagaaacctacccaccattacaaaagcgcgagcgatccaatccacacttttgatctgtatggaagtgaggtggtaactggcaccgtgtccaataaaattggtgtatgctcacttctggaacccccttcccaagcaacgaccaaattgtcctctgaaaattttagaggcacactgaccagcctagccctcttacctacaaagaggcacctgctgctggggtctgacaacggggtaataaggctccttgcatag

SEQ ID NO: 62075 - DNA, 3184 bp, Artificial Sequence
  derived and/or modified sequence
aaacgagagtcctaaagagcaggcgaaagccacggcgtctgcgtttgcaatgcatgctggtccgtgtagttctcagcctgacaccgtcgttcccagaacccagcgcgctctatacagcctgcaagatggtccgctggctgtctgccaagctcggccccacagtggcctctcgccacgtggcccggaacctgctccgcctgctgacgtcttgttatgttggacccactcggcagcagttcacagtgagcagtggcgagagcccaccgctgagcgccggcaacatctaccagaagaggccggtcctgggcgacatcgtgtcagggcctgtgctcagctgcctcctccacatcgcccgcctgtatggggagcctgtcctcacctaccagtacctgccctacatcagctacctggtggccccagggagtgcctcaggccccagccgactgaacagccgtaaggaggcggggctgctggccgcggtgacgctgactcagaagatcatcgtgtacctctcagacaccacactcatggacatcctgccccggatcagccatgaggtcctgctgcccgtgctcagcttcctcacctccctcgtcacggggttcccaagtggggcccaggctcggaccatcctgtgtgtgaaaaccatcagcctcatcgccctcatctgcctgcgcattggacaggagatggtccagcagcacctgagcgagcccgtggccacctttttccaggtcttctctcagctgcatgagcttcggcaacaggatctgaagctggaccctgcgggccgtggtgagggccagctgccacaggtggtcttctctgatgggcagcagcggcccgtggaccccgccctgctggacgagctgcagaaggtgttcaccctggagatggcatacacaatctacgtgcccttctcctgcctgttgggtgacatcatccggaaaatcatccccaaccacgagctggttggggagctggcggcgctgtacttggagagcatcagccccagcagtcgcaaccctgccagcgtggagcccaccatgcccggcaccgggcccgagtgggacccccatggtgggggctgccctcaggatgacggccactcagggacctttgggagcgtcctggtggggaaccgcattcagatccccaatgactctcggcctgagaaccccggaccactgggccccatctcgggggtgggtggcgggggcctgggcagcgggagcgacgacaacgccctgaagcaggagctgccgcggagcgtgcacgggctgagcggaaactggctggcgtactggcagtacgagatcggcgtgagccagcaggatgcccactttcacttccaccagatccgcctgcagagcttcccgggccactcgggggccgtcaagtgcgtggcacccctaagcagcgaggacttcttcctgagcggcagcaaggatcgtaccgtgcgcctctggccgctgtacaactacggcgacgggaccagcgagacggccccacgcctcgtctacacccagcaccgcaagagcgtcttcttcgtgggccagcttgaggccccgcagcacgtggtgagctgtgacggggctgtgcacgtctgggaccccttcacagggaagacccttcgcacagtggagccgctggacagccgggtgcccctgactgcggtggctgtcatgcccgccccccacaccagcatcaccatggccagctctgactctaccctgcgctttgtggactgcaggaagcctggtctgcagcacgagttccgactgggcggtgggctgaaccctgggcttgtccgtgccctggccatcagccccagtggccgtagtgtcgtggccggcttctcctcaggcttcatggtgctcctggacacccgcacaggcctggttctgcgaggctggccagcccacgagggggacattctgcagatcaaggcggtggagggcagcgtcctggtcagctcctcctctgaccattccttgaccgtctggaaggagctggagcagaagcccacccatcactacaagtcagcatccgaccccatccacacctttgacctgtacggcagcgaggtggtcactggcaccgtgtccaacaagattggcgtctgctccctgcttgagccaccctcgcaggccaccacgaagctcagctctgagaacttccgcggcacgctcaccagcctggccttgctgcccactaaacgccacctcctgctgggctcagacaacggggttatccgcctcctggcatagactgaggcaggagctggccgggcaagggtgggaagacatctgcgggcgcgtgtccactcaccctgttccctgagcagcagctccctccagggaggccctgggtcccacgccctgggtgcccacatggcctgccaactagggcctgcaaatggagtgggggagtcctggcccctgaatcaccagagccaccaagcctgccagaggggtctcattcatggcttggggacacagggctcctagcaagcaggaagttaagagcaggaggaagcgttgctaccttcacttctccccagctctgccctctgggtccacatgaggacagggaagctcgggaaggggaagggagactggccctgcccagccggtctctagcccctcagcccccgctgggcactctctgtcccatccctctaggacagggaagctggcctggtccagggcactgatggtgcttggattccagcctaaggaaggctggccgtggtccaggagttaagggcttgggtctggggtttaagtggccacccatccaggccctggccagtgtgggaccgggacgggaaggaagaaggaggctaggagcagggggaaaaggtgcacttggccagtggcgcctgccaggagtgagtccatgcgttgtctgcccacccctaccacagtgtttgtgccttcagctgagggggcagcctctgggccctgaacccctgctggggctccacgaccctgagagaaggggtgagaagaatcatctctgcacctcgggtctctgccagaggaagacttaagcatccctgcgacctcacattctagacagagatgaggtccaggggttggcccctgctgccttctcacaatttgcaatagatgtaaataggaccaataaatcctttggaagagccatggggtgaactgag

SEQ ID NO: 62076 - protein, 173 aa, Artificial Sequence
  derived and/or modified sequence
MQPFSIPVQITLQGSRRRQGRTAFPASGKKRETDYSDGDPLDVHKRLPSSAGEDRAVMLGFAMMGFSVLMFFLLGTTILKPFMLSIQREESTCTAIHTDIMDDWLDCAFTCGVHCHGQGKYPCLQVFVNLSHPGQKALLHYNEEAVQINPKRDVTDCRVKEKQTLTVSDEHKQ

SEQ ID NO: 62077 - DNA, 522 bp, Artificial Sequence
  derived and/or modified sequence
atgcagccgttttcgatccctgtgcagatcactctccagggcagccgacggcggcaaggccggactgcattcccagcctcagggaaaaagagagaaacagactatagcgatggagacccactcgatgtccataagagactcccatccagtgctggggaggatcgcgccgtcatgctaggcttcgccatgatgggttttagcgttcttatgttcttcctcctcggaacaaccattttgaagccgttcatgttatcaatacaaagagaggaaagcacctgcacagcaatacacacagacataatggacgattggctagattgcgcctttacctgtggagtgcactgtcatggacagggaaagtacccctgcctgcaggtgttcgtgaatttgagccaccctggacagaaggcattgttacattacaatgaagaagcagtgcagattaaccccaagcgagacgtcacggattgtagagtgaaagagaagcagacattaaccgtttctgacgaacataaacagtag

SEQ ID NO: 62078 - DNA, 522 bp, Artificial Sequence
  derived and/or modified sequence
atgcagcccttcagcatccctgtgcagatcaccctgcagggcagcagaagacggcagggccgcacagccttccctgccagcggcaagaagcgggagacagactacagtgatggagaccccctggatgtgcacaagaggctgcccagcagcgctggagaagatagagctgtgatgctgggctttgccatgatgggcttctctgtgctgatgttcttcctgctgggcaccaccatcctgaagcccttcatgctgagcatccagcgggaggagagcacctgcacagccatccacacagacatcatggatgactggctggactgtgccttcacctgtggggtgcactgccacggccagggcaagtacccctgcctgcaggtgtttgtgaacctgagccaccctggccagaaggccctgctgcactacaatgaggaggccgtgcagatcaaccccaagagagatgtgacagactgccgggtgaaggagaagcagaccctgactgtgtctgatgagcacaagcagtag

SEQ ID NO: 62079 - DNA, 522 bp, Artificial Sequence
  derived and/or modified sequence
atgcagcccttcagcatccccgtgcagatcaccctgcagggcagccgaagacggcagggaagaacagcatttcctgcatcgggaaaaaagagagagacagactactcagacggagatccacttgacgtccataagagacttcctagttctgcaggcgaagacagggcagtcatgctgggctttgctatgatggggttcagcgttttgatgttctttctgctgggaacaaccatactgaagcccttcatgctgagcatccagcgtgaagaatccacatgtacagcaatacacacagacattatggatgactggctggactgcgccttcacatgcggagtccactgccatgggcagggcaagtatccgtgcttgcaagtcttcgtgaacttgagccatccagggcagaaggcactgttacactataacgaggaggcagtccagatcaatcccaagagggatgtgaccgattgccgggttaaggaaaaacaaactctaaccgttagcgatgaacacaaacagtag

SEQ ID NO: 62080 - DNA, 1004 bp, Artificial Sequence
  derived and/or modified sequence
acagtgcaaagagagagaagcagcttcggctgcagcaaaccacgcaggtccttcttgatcatctagaactgaccgctccgccttgccaggagtctgcagaaccacgtggctagcctgcctgaagttctcacctctccaggaaggcggggggcttctaatggctgcagctgcgctgggggctgggggctcccgctgggactccacttccgtggatgtctaagcttcacctttcttgcgcccgcaggggcatgactcaggtgaaagggagccattttctcagacccctggcctcatgcagcccttcagcatccccgtgcaaatcacacttcagggcagccggaggcgccaggggaggacagcctttcctgcctcagggaagaagagagagacagactacagtgatggagacccactagatgtgcacaagaggctgccatccagtgctggagaggaccgagccgtgatgctggggtttgccatgatgggcttctcagtcctaatgttcttcttgctcggaacaaccattctaaagccttttatgctcagcattcagagagaagaatcgacctgcactgccatccacacagatatcatggacgactggctggactgtgccttcacctgtggtgtgcactgccacggtcaggggaagtacccgtgtcttcaggtgtttgtgaacctcagccatccaggtcagaaagctctcctacattataatgaagaggctgtccagataaatcccaagcgtgatgttacagactgcagagttaaagaaaagcagacattgacagtttctgatgagcataaacagtaagtgcagtcacaggccaaacttcttgctaggaacagcaagactgggaagaggtcttaaatttagtgatactgttattattctatattctcaatatagtaacacatgcatcttgctgtgtcaaatgctttctgggccatcattaaaaggacattaaaaacgtttttcttctaatgaatgcagtataccacag

SEQ ID NO: 62081 - DNA, 522 bp, Artificial Sequence
  derived and/or modified sequence
atgcaaccgttctccatccccgtgcagattacgcttcagggatcccgccgacgccaggggagaacagcgtttccggcttctggtaagaaacgggagactgattactctgacggtgatcccctcgacgtccacaagagattgcctagtagcgcaggggaagacagagcggtgatgctcggtttcgccatgatggggttctccgtccttatgttcttcttgctggggactacaatcctcaagccctttatgctctctatccagcgggaggagagcacctgcacagccattcataccgatatcatggacgattggctggactgcgccttcacatgtggtgtccactgccatggtcagggcaagtatccatgtttacaggtgttcgtgaacttaagtcaccccggacagaaggccctccttcactataacgaggaagctgtgcaaatcaacccgaagcgggatgttaccgactgtagagtcaaagagaagcagaccctgactgtctctgacgaacacaaacagtag

SEQ ID NO: 62082 - DNA, 522 bp, Artificial Sequence
  derived and/or modified sequence
atgcagcccttcagcatccccgtgcagatcaccctgcagggcagcagaagaagacagggcagaaccgccttccccgccagcggcaagaagagagagaccgactacagcgacggcgaccccctggacgtgcacaagagactgcccagcagcgccggcgaggacagagccgtgatgctgggcttcgccatgatgggcttcagcgtgctgatgttcttcctgctgggcaccaccatcctgaagcccttcatgctgagcatccagagagaggagagcacctgcaccgccatccacaccgacatcatggacgactggctggactgcgccttcacctgcggcgtgcactgccacggccagggcaagtacccctgcctgcaggtgttcgtgaacctgagccaccccggccagaaggccctgctgcactacaacgaggaggccgtgcagatcaaccccaagagagacgtgaccgactgcagagtgaaggagaagcagaccctgaccgtgagcgacgagcacaagcagtag

SEQ ID NO: 62083 - protein, 319 aa, Artificial Sequence
  derived and/or modified sequence
MEELTAFVSKSFDQKVKEKKEAITYREVLESGPLRGAKEPTGCTEAGRDDRSSPAVRAAGGGGGGGGGGGGGGGGGGVGGGGAGGGAGGGRSPVRELDMGAAERSREPGSPRLTEVSPELKDRKEDAKGMEDEGQTKIKQRRSRTNFTLEQLNELERLFDETHYPDAFMREELSQRLGLSEARVQVWFQNRRAKCRKQENQLHKGVLIGAASQFEACRVAPYVNVGALRMPFQQVQAQLQLDSAVAHAHHHLHPHLAAHAPYMMFPAPPFGLPLATLAADSASAASVVAAAAAAKTTSKNSSIADLRLKAKKHAAALGL

SEQ ID NO: 62084 - protein, 190 aa, Artificial Sequence
  derived and/or modified sequence
MEDEGQTKIKQRRSRTNFTLEQLNELERLFDETHYPDAFMREELSQRLGLSEARVQVWFQNRRAKCRKQENQLHKGVLIGAASQFEACRVAPYVNVGALRMPFQQVQAQLQLDSAVAHAHHHLHPHLAAHAPYMMFPAPPFGLPLATLAADSASAASVVAAAAAAKTTSKNSSIADLRLKAKKHAAALGL

SEQ ID NO: 62085 - DNA, 960 bp, Artificial Sequence
  derived and/or modified sequence
atggaagaactgacagcttttgtgagcaagtcttttgaccagaaggtaaaggaaaagaaggaagcgataacttatagagaggtcctcgagtcaggacctctgcgaggggcaaaagagcctactgggtgtactgaggccggcagggacgatcggagttccccagcggtgcgcgcagccggaggcggggggggtgggggaggcggcggaggcggggggggcggaggagggggcgttggtgggggcggtgcaggcggtggagccggcggtgggagatcacctgtgagggaattggatatgggcgccgccgagcgcagtcgggaacctggaagccctagactcacggaggttagcccagaactgaaggataggaaggaagatgctaaggggatggaggatgaagggcagacgaagataaaacaaaggagaagtcgtaccaatttcacgttggagcagctaaatgagctcgaacgtctgttcgatgagacgcactatcctgatgccttcatgagggaggaactcagccaacgccttggactgagtgaggcccgggtgcaagtctggtttcagaatcgaagagccaaatgccgcaaacaggaaaatcagctgcataaaggggtgctgatcggcgccgcttcccagtttgaggcatgtagagtggccccctacgtcaatgttggcgcactgcgtatgcctttccagcaggtgcaggctcagctccaactggactctgcagtggcccacgcccaccatcacctgcacccccatctggctgctcacgcgccctacatgatgtttcctgccccaccattcggcctgccgctggcgaccttggctgccgacagcgctagcgctgcttccgttgttgccgccgccgccgccgccaagaccacgtctaagaacagttccatcgctgacttgcgcttgaaggcaaagaagcatgctgcagcgctcggcctctag

SEQ ID NO: 62086 - DNA, 960 bp, Artificial Sequence
  derived and/or modified sequence
atggaggagctgacagcctttgtgtccaagagctttgaccagaaggtgaaggagaagaaggaggccatcacctaccgggaggtgctggagagcggccccctgcggggggccaaggagcccaccggctgcacagaggccggcagagatgacaggagcagccctgctgtgcgggctgctgggggcggcggcggcggcggcggcggcggcggcggcggcggcggcggcggcggcgtgggcggcggcggggccggcggcggggccggcggcggccgcagccctgtgcgggagctggacatgggcgctgctgagaggagccgggagcccggcagcccccggctgacagaggtgtccccagagctgaaggacagaaaagaagatgccaagggcatggaggatgagggccagaccaagatcaagcagaggaggagcaggaccaacttcaccctggagcagctgaatgagctggagcggctgtttgatgagacccactacccagatgccttcatgagggaggagctgagccagaggctgggcctgtctgaggcccgggtgcaggtgtggttccagaacagaagagccaagtgcaggaagcaggagaaccagctgcacaagggcgtgctgattggagctgccagccagtttgaggcctgccgggtggccccctacgtgaatgtgggcgccctgaggatgcccttccagcaggtgcaggcccagctgcagctggacagcgctgtggcccacgcccaccaccacctgcacccccacctggccgcccacgccccctacatgatgtttcctgccccacccttcggcctgcccctggccaccctggccgctgacagcgccagcgctgcctctgtggtggccgctgctgctgctgccaagaccaccagcaagaacagcagcattgctgacctgcggctgaaggccaagaagcacgccgccgccctgggcctgtag

SEQ ID NO: 62087 - DNA, 960 bp, Artificial Sequence
  derived and/or modified sequence
atggaggagctgaccgccttcgtgagcaagagcttcgaccagaaggtgaaggagaagaaggaggccataacctatagagaagtacttgagtcaggccccctgcggggggccaaagagcccaccgggtgcactgaggcgggacgagatgatagaagttcacctgccgtgcgcgctgcgggcggaggaggtggtggagggggagggggcggcggcggaggtggaggcggtggagtcggtggggggggcgctggcggcggggcgggcggcgggcggagcccagttagggaactggatatgggtgcagccgagagatcacgggagccaggctctccacgccttaccgaggtctcccccgaactgaaggataggaaggaggatgcaaagggcatggaggacgaaggccagaccaagatcaaacaaagacggtcacgaacgaatttcactcttgaacagctgaatgaacttgagcggctattcgatgagactcactaccccgacgctttcatgcgggaggagttaagtcagcggctggggcttagtgaagcgcgtgtgcaggtctggtttcagaatagaagagctaagtgcaggaagcaggaaaatcagctgcacaaaggcgtgttaattggggccgcttcacagtttgaagcatgccgcgtggccccgtacgtcaacgtgggagcattacggatgccattccagcaggtccaggctcagctccagctggactcggcggtggctcacgcccatcaccacttgcatccacatcttgccgcccatgctccatatatgatgtttcctgccccgccgttcgggttacccctggccactctggctgctgacagtgcaagtgccgcttcagtggtggctgcggctgccgctgcaaagactacctctaagaattcctctattgccgatctacggcttaaggcgaagaagcatgcagctgcacttggtctatag

SEQ ID NO: 62088 - DNA, 960 bp, Artificial Sequence
  derived and/or modified sequence
atggaagaacttacggcgttcgtctccaagtcttttgaccagaaagtgaaggagaagaaggaggcgatcacgtaccgggaggtgctggagagcgggccgctgcgcggggccaaggagccgaccggctgcaccgaggcgggccgcgacgaccgcagcagcccggcagtccgggcggccggcggaggcggcggcggaggaggcggaggcggcggcggaggaggcggaggaggtgtaggaggaggaggagcaggcggaggagctggaggagggcgctctcccgtccgggagctggacatgggcgccgccgagagaagcagggagccgggcagcccgcgactgacggaggtgtccccggagctgaaagatcgcaaagaggatgcgaaagggatggaggacgaaggccagaccaaaatcaagcagaggcgaagtcggaccaatttcaccctggaacaactcaatgagctggagaggctttttgacgagacccactatcccgacgccttcatgcgagaggaactgagccagcgactgggcctgtcggaggcccgagtgcaggtttggtttcaaaatcgaagagctaaatgtagaaaacaagaaaatcaactccataaaggtgttctcataggggccgccagccagtttgaagcttgtagagtcgcaccttatgtcaacgtaggtgctttaaggatgccatttcagcaggttcaggcgcagctgcagctggacagcgctgtggcgcacgcgcaccaccacctgcatccgcacctggccgcgcacgcgccctacatgatgttcccagcaccgcccttcggactgccgctcgccacgctggccgcggattcggcttccgccgcctcggtagtggcggccgcagcagccgccaagaccaccagcaagaactccagcatcgccgatctcagactgaaagccaaaaagcacgccgcagccctgggtctgtga

SEQ ID NO: 62089 - DNA, 960 bp, Artificial Sequence
  derived and/or modified sequence
atggaggaattaacagcttttgtgtctaagagtttcgaccagaaagtcaaagaaaaaaaggaggcaatcacctacagggaggttcttgaaagcggcccacttaggggcgcaaaggagccaacaggatgcacagaggcaggcagagatgatagatcttcccctgctgtgcgggcagccggaggagggggaggaggcggtgggggaggcggtggaggcggtggcggtggcggtgtggggggagggggtgccggtggaggagctggcggaggccgtagccccgtaagggagttggacatgggcgcagctgaaagatctagagagcctgggtctcccagattaacagaggtctccccggaactaaaagatcgaaaggaagacgccaaaggtatggaagacgagggccaaacaaaaatcaaacaaaggaggagtcgcaccaacttcacattggagcagttgaacgaactggaaagactgtttgatgagactcattatcccgacgccttcatgcgtgaagaacttagccagcgcttgggtctcagcgaagcacgggtccaagtgtggttccagaaccgacgcgcaaaatgccgcaagcaagaaaaccaactgcacaaaggagtactaatcggagcagctagccagttcgaggcctgtagggtggcaccatacgtgaacgtgggggcactgcgcatgcctttccaacaagtgcaggcccaactccagctagactctgccgttgcccatgctcaccatcacttacatccgcaccttgctgcccatgcaccctacatgatgtttcctgcccctccgttcgggttgcctcttgcgacgttagctgccgactcagctagtgcagcatctgtcgtcgctgctgcagccgctgcgaagactaccagcaagaacagcagcatcgctgacctgcgcctgaaagccaagaaacacgcagctgccctagggctgtag

SEQ ID NO: 62090 - DNA, 960 bp, Artificial Sequence
  derived and/or modified sequence
atggaggagctgaccgccttcgtgagcaagagcttcgaccagaaggtgaaggagaagaaggaggccatcacctacagagaggtgctggagagcggccccctgagaggcgccaaggagcccaccggctgcaccgaggccggcagagacgacagaagcagccccgccgtgagagccgccggcggcggcggcggcggcggcggcggcggcggcggcggcggcggcggcggcggcgtgggcggcggcggcgccggcggcggcgccggcggcggcagaagccccgtgagagagctggacatgggcgccgccgagagaagcagagagcccggcagccccagactgaccgaggtgagccccgagctgaaggacagaaaggaggacgccaagggcatggaggacgagggccagaccaagatcaagcagagaagaagcagaaccaacttcaccctggagcagctgaacgagctggagagactgttcgacgagacccactaccccgacgccttcatgagagaggagctgagccagagactgggcctgagcgaggccagagtgcaggtgtggttccagaacagaagagccaagtgcagaaagcaggagaaccagctgcacaagggcgtgctgatcggcgccgccagccagttcgaggcctgcagagtggccccctacgtgaacgtgggcgccctgagaatgcccttccagcaggtgcaggcccagctgcagctggacagcgccgtggcccacgcccaccaccacctgcacccccacctggccgcccacgccccctacatgatgttccccgccccccccttcggcctgcccctggccaccctggccgccgacagcgccagcgccgccagcgtggtggccgccgccgccgccgccaagaccaccagcaagaacagcagcatcgccgacctgagactgaaggccaagaagcacgccgccgccctgggcctgtag

SEQ ID NO: 62091 - DNA, 1513 bp, Artificial Sequence
  derived and/or modified sequence
gtgtccccggagctgaaagatcgcaaagaggatgcgaaagggatggaggacgaaggccagaccaaaatcaagcagaggcgaagtcggaccaatttcaccctggaacaactcaatgagctggagaggctttttgacgagacccactatcccgacgccttcatgcgagaggaactgagccagcgactgggcctgtcggaggcccgagtgcaggtttggtttcaaaatcgaagagctaaatgtagaaaacaagaaaatcaactccataaaggtgttctcataggggccgccagccagtttgaagcttgtagagtcgcaccttatgtcaacgtaggtgctttaaggatgccatttcagcaggttcaggcgcagctgcagctggacagcgctgtggcgcacgcgcaccaccacctgcatccgcacctggccgcgcacgcgccctacatgatgttcccagcaccgcccttcggactgccgctcgccacgctggccgcggattcggcttccgccgcctcggtagtggcggccgcagcagccgccaagaccaccagcaagaactccagcatcgccgatctcagactgaaagccaaaaagcacgccgcagccctgggtctgtgacgccaacgccagcaccaatgtcgcgcctgtcccgcggcactcagcctgcacgccctccgcgccccgctgcttctccgttacccctttgagacctcgggagccggccctcttcccgcctcactgaccatccctcgtcccctatcgcatcttggactcggaaagccagactccacgcaggaccagggatctcacgaggcacgcaggctccgtggctcctgcccgttttcctactcgagggcctagaattgggttttgtaggagcgggtttgggggagtctggagagagactggacaggggagtgctggaaccgcggagtttggctcaccgcaaagctgcaacgatggactcttgcatagaaaaaaaaatcttgttaacaatgaaaaaatgagcaaacaaaaaaatcgaaagacaaacgggagagaaaaagaggaagggaacttatttcttaactgctatttggcagaagctgaaattggagaaccaaggagcaaaaacaaattttaaaattaaagtattttatacatttaaaaatatggaaaaacaacccagacgattctcgagagactggggggagttaccaacttaaatgtgtgtttttaaaaatgcgctaagaaggcaaagcagaaagaagaggtatacttatttaaaaaactaagatgaaaaaagtgcgcagctgggaagttcacaggttttgaaactgacctttttctgcgaagttcacgttaacacgagaaatttgatgagagaggcgggcctccttttacgttgaatcagatgctttgagtttaaacccaccatgtatggaagagcaagaaaagagaaaatattaaaacgaggagagagaaattattatggcaaaactgtctggactgctgacagtaaattccggtttgcatg

SEQ ID NO: 62092 - DNA, 4078 bp, Artificial Sequence
  derived and/or modified sequence
aaagctagcctctagcgcagagtttgccgggagggagaaggggcagaggtggaaagcttaaccctccggtcgcctaggtgtttggggccgccaagacccctcgaactccgcagagcccctgaatctttggatcttaggggccaaaacttcccattctctttcaaggtagaaggaagccaacgaaagctgaggtccaggctacgctgcttctcccgggcgaggcgtttcggtttcttgaccggctcttccggaaatgatttttaacacccatgctggcctggatcctgcgctgggaagaactgcaaacagcctcgactatctaaactcagctttgacttcttaaaacccggagtctctgattcgggcgcagaggataaaggttccagggggatatatatatggtggctgtatatgctcacactagaagagctcctgtttttaaagggaggagaaggacaggaaagtggcaacggatgtgtgcaaacccagagcagaaaaattcatattttattaaacatccgagctgctggttgcatgaaaaggctttgagcaaccaatagaaaccgaggatcgcgaatattccgcttgaacctgttgatctctgtgggttaagcgtttagggtcgagtctgcgtttccacgagggagggcgaagagagaacagaaagagcggttgctttcgcccgccaccggaggctggttttccgcctcctgccttctggcccggcttgggcggcgagccctttgggcagccaacatggcgtgggcgcctgtgctcgtgcgaccccggtcgggcaggcgggacggagattacctggctgtccaggggaccttatgcagggtttggcccgagcccaggggcagcgaggggcgtctgcggatgcggctccctgtgcggcacaacaccggggtctgttgctctcgctgatacctttcggcccaattgttcctaaattagaccagcaagtttgcggtaggcagagagccagcggtggtgagagctggcctgagaacgagccagccttctgggaatggccggtgtgagaggccagtgggtggccttgccgcgcccttatgtccagactttgctctgtgagaggcctggcgctgcgcctttgatttctgtgagtgctgcggagcaagtgagtgcgaaagtgagtggaaaccatttggtgtttgctggggaaggccggtgactggggggtgaatagtgaggcggtgagtcgaggtacgtttgtgaaggaggtggtggatgactgcccaccttgccccaggcggccgctcagacttgacctttgcgcttctccgggatattcttcctccgggtgggttgagaagccggaccaggattccacgagggggaaggattctctattcttttttgcgacaaatctggtaacaggatttgctgtgctgttttcgtccgtgtgtgtgtgcgtgtgtgtgtgtgttcgtgtggatgcacgtgtggccccgctggggtgccccctccagtgtccccggagctgaaagatcgcaaagaggatgcgaaagggatggaggacgaaggccagaccaaaatcaagcagaggcgaagtcggaccaatttcaccctggaacaactcaatgagctggagaggctttttgacgagacccactatcccgacgccttcatgcgagaggaactgagccagcgactgggcctgtcggaggcccgagtgcaggtttggtttcaaaatcgaagagctaaatgtagaaaacaagaaaatcaactccataaaggtgttctcataggggccgccagccagtttgaagcttgtagagtcgcaccttatgtcaacgtaggtgctttaaggatgccatttcagcaggttcaggcgcagctgcagctggacagcgctgtggcgcacgcgcaccaccacctgcatccgcacctggccgcgcacgcgccctacatgatgttcccagcaccgcccttcggactgccgctcgccacgctggccgcggattcggcttccgccgcctcggtagtggcggccgcagcagccgccaagaccaccagcaagaactccagcatcgccgatctcagactgaaagccaaaaagcacgccgcagccctgggtctgtgacgccaacgccagcaccaatgtcgcgcctgtcccgcggcactcagcctgcacgccctccgcgccccgctgcttctccgttacccctttgagacctcgggagccggccctcttcccgcctcactgaccatccctcgtcccctatcgcatcttggactcggaaagccagactccacgcaggaccagggatctcacgaggcacgcaggctccgtggctcctgcccgttttcctactcgagggcctagaattgggttttgtaggagcgggtttgggggagtctggagagagactggacaggggagtgctggaaccgcggagtttggctcaccgcaaagctgcaacgatggactcttgcatagaaaaaaaaatcttgttaacaatgaaaaaatgagcaaacaaaaaaatcgaaagacaaacgggagagaaaaagaggaagggaacttatttcttaactgctatttggcagaagctgaaattggagaaccaaggagcaaaaacaaattttaaaattaaagtattttatacatttaaaaatatggaaaaacaacccagacgattctcgagagactggggggagttaccaacttaaatgtgtgtttttaaaaatgcgctaagaaggcaaagcagaaagaagaggtatacttatttaaaaaactaagatgaaaaaagtgcgcagctgggaagttcacaggttttgaaactgacctttttctgcgaagttcacgttaacacgagaaatttgatgagagaggcgggcctccttttacgttgaatcagatgctttgagtttaaacccaccatgtatggaagagcaagaaaagagaaaatattaaaacgaggagagagaaaaataatattaacacaaaaaaatgccacagacaatgatttctctgagaaattattatggcaaaactgtctggactgctgacagtaaattccggtttgcatgttacttgtattccattgatggtgtgtctcctcccacccccttatctcccatgcactcactccattttcatcttcactatgaaaaacaataccaaaagtatctggaaattgatatatatatatccatatatatatatcatatatttgccatatatatatatatatatatatatatatatatatatatatatttgccctgtctttgatcctggggaacaaaagaaaaaagtcagaaagggaaaaaattacactcattgtcctaagaagacagaggtgggcagaatatgtggggaaaggaaaaagaaaacaagaccaccaaatgaaataatgaaggtacagcgcctcgctgtgccagacacagtaggcgctcaatcagtattagttcccaccattccccttttcttgtgttccttcttgttggtttcctgaagtcctatttgaagacagtggtttatttccccctctctatcccgtcaaattcaccttaaataacacccagctagatacaggcactaggtttgtgtaagatatgttgatacacacgaacaaagtttattttgactataatgtgtggactgactttcaacatttgcattttatctcacaaaggtgtatctattcaagtaaccttttttttttgtttgtttgtttcttttttgtttttttttttcttttggttgtttgtttcaattcatgtagctatttaaactgggataccttggactaagccagtctgtatcccaattcgctagcaagcctaagtttgtggggttttgtttttgtttttgttttaccttctaatttacaagaaagaggaaaagctcttctaactgaactttggtatgcggttgagctttgtaactatttgttctccatgaaaacaaaattatttatatttgacatatttttttctagtgtattaagttattttaaacaaaagatgttatctcatgacgtgttgtcagtacaaaatgtgtcgcctccaattctgttaaaccttttaaataagtgccaagttattaatt

SEQ ID NO: 62093 - protein, 290 aa, Artificial Sequence
  derived and/or modified sequence
MERCSRCHRLLLLLPLVLGLSAAPGWAGAPPVDVLRALRFPSLPDGVRRAKGICPADVAYRVARPAQLSAPTRQLFPGGFPKDFSLLTVVRTRPGLQAPLLTLYSAQGVRQLGLELGRPVRFLYEDQTGRPQPPSQPVFRGLSLADGKWHRVAVAVKGQSVTLIVDCKKRVTRPLPRSARPVLDTHGVIIFGARILDEEVFEGDVQELAIVPGVQAAYESCEQKELECEGGQRERPQNQQPHRAQRSPQQQPSRLHRPQNQEPQSQVRELGEPPSAAHPREGRHPGISPP

SEQ ID NO: 62094 - protein, 263 aa, Artificial Sequence
  derived and/or modified sequence
  misc_feature (1)..(1): Xaa can be any naturally occurring amino acid
XAPPVDVLRALRFPSLPDGVRRAKGICPADVAYRVARPAQLSAPTRQLFPGGFPKDFSLLTVVRTRPGLQAPLLTLYSAQGVRQLGLELGRPVRFLYEDQTGRPQPPSQPVFRGLSLADGKWHRVAVAVKGQSVTLIVDCKKRVTRPLPRSARPVLDTHGVIIFGARILDEEVFEGDVQELAIVPGVQAAYESCEQKELECEGGQRERPQNQQPHRAQRSPQQQPSRLHRPQNQEPQSQVRELGEPPSAAHPREGRHPGISPP

SEQ ID NO: 62095 - protein, 290 aa, Artificial Sequence
  derived and/or modified sequence
MERCSRCHRLLLLLPLVLGLSAAPGWAGAPPVDVLRALRFPSLPDGVRRAKGICPADVAYRVARPAQLSAPTRQLFPGGFPKDFSLLTVVRTRPGLQAPLLTLYSAQGVRQLGLELGPPVRFLYEDQTGRPQPPSQPVFRGLSLADGKWHRVAVAVKGQSVTLIVDCKKRVTRPLPRSARPVLDTHGVIIFGARILDEEVFEGDVQELAIVPGVQAAYESCEQKELECEGGQRERPQNQQPHRAQRSPQQQPSRLHRPQNQEPQSQVRELGEPPSAAHPREGRHPGISPP

SEQ ID NO: 62096 - DNA, 873 bp, Artificial Sequence
  derived and/or modified sequence
atggagagatgcagcagatgccacagactgctgctgctgctgcccctggtgctgggcctgagcgccgcccccggctgggccggcgccccccccgtggacgtgctgagagccctgagattccccagcctgcccgacggcgtgagaagagccaagggcatctgccccgccgacgtggcctacagagtggccagacccgcccagctgagcgcccccaccagacagctgttccccggcggcttccccaaggacttcagcctgctgaccgtggtgagaaccagacccggcctgcaggcccccctgctgaccctgtacagcgcccagggcgtgagacagctgggcctggagctgggcagacccgtgagattcctgtacgaggaccagaccggcagaccccagccccccagccagcccgtgttcagaggcctgagcctggccgacggcaagtggcacagagtggccgtggccgtgaagggccagagcgtgaccctgatcgtggactgcaagaagagagtgaccagacccctgcccagaagcgccagacccgtgctggacacccacggcgtgatcatcttcggcgccagaatcctggacgaggaggtgttcgagggcgacgtgcaggagctggccatcgtgcccggcgtgcaggccgcctacgagagctgcgagcagaaggagctggagtgcgagggcggccagagagagagaccccagaaccagcagccccacagagcccagagaagcccccagcagcagcccagcagactgcacagaccccagaaccaggagccccagagccaggtgagagagctgggcgagccccccagcgccgcccaccccagagagggcagacaccccggcatcagccccccctag

SEQ ID NO: 62097 - DNA, 792 bp, Artificial Sequence
  derived and/or modified sequence
tgagccccccccgtggacgtgctgagagccctgagattccccagcctgcccgacggcgtgagaagagccaagggcatctgccccgccgacgtggcctacagagtggccagacccgcccagctgagcgcccccaccagacagctgttccccggcggcttccccaaggacttcagcctgctgaccgtggtgagaaccagacccggcctgcaggcccccctgctgaccctgtacagcgcccagggcgtgagacagctgggcctggagctgggcagacccgtgagattcctgtacgaggaccagaccggcagaccccagccccccagccagcccgtgttcagaggcctgagcctggccgacggcaagtggcacagagtggccgtggccgtgaagggccagagcgtgaccctgatcgtggactgcaagaagagagtgaccagacccctgcccagaagcgccagacccgtgctggacacccacggcgtgatcatcttcggcgccagaatcctggacgaggaggtgttcgagggcgacgtgcaggagctggccatcgtgcccggcgtgcaggccgcctacgagagctgcgagcagaaggagctggagtgcgagggcggccagagagagagaccccagaaccagcagccccacagagcccagagaagcccccagcagcagcccagcagactgcacagaccccagaaccaggagccccagagccaggtgagagagctgggcgagccccccagcgccgcccaccccagagagggcagacaccccggcatcagccccccctag

SEQ ID NO: 62098 - DNA, 873 bp, Artificial Sequence
  derived and/or modified sequence
atggagagatgcagcagatgccacagactgctgctgctgctgcccctggtgctgggcctgagcgccgcccccggctgggccggcgccccccccgtggacgtgctgagagccctgagattccccagcctgcccgacggcgtgagaagagccaagggcatctgccccgccgacgtggcctacagagtggccagacccgcccagctgagcgcccccaccagacagctgttccccggcggcttccccaaggacttcagcctgctgaccgtggtgagaaccagacccggcctgcaggcccccctgctgaccctgtacagcgcccagggcgtgagacagctgggcctggagctgggcccccccgtgagattcctgtacgaggaccagaccggcagaccccagccccccagccagcccgtgttcagaggcctgagcctggccgacggcaagtggcacagagtggccgtggccgtgaagggccagagcgtgaccctgatcgtggactgcaagaagagagtgaccagacccctgcccagaagcgccagacccgtgctggacacccacggcgtgatcatcttcggcgccagaatcctggacgaggaggtgttcgagggcgacgtgcaggagctggccatcgtgcccggcgtgcaggccgcctacgagagctgcgagcagaaggagctggagtgcgagggcggccagagagagagaccccagaaccagcagccccacagagcccagagaagcccccagcagcagcccagcagactgcacagaccccagaaccaggagccccagagccaggtgagagagctgggcgagccccccagcgccgcccaccccagagagggcagacaccccggcatcagccccccctag

SEQ ID NO: 62099 - DNA, 873 bp, Artificial Sequence
  derived and/or modified sequence
atggaaagatgctcccgctgtcacaggctgctgctgctcctccctctggtgttaggcctcagcgccgcaccaggatgggccggcgcccctcctgtggacgtgcttagagcattgaggtttccatctctgccagacggcgtaagacgcgcaaagggaatttgtcccgccgacgttgcttaccgcgtggctcgacccgcacagctctctgctccaactaggcagctttttccaggaggcttccctaaagactttagtttgttgactgtggtcagaactagacccggtttgcaggctcctttactgactctttatagcgctcaaggggtgcgccagctgggactggaactaggtcgtcctgtgcgtttcctgtatgaggatcagacagggcggccacaaccacctagtcagcccgtattcagagggctttccctcgccgatggcaagtggcaccgtgttgcggtggccgtgaaaggccaaagcgtaactcttattgtcgattgcaaaaagagggtcacccgtcctctgcccaggagtgcgcggccagtccttgacacgcacggggtaatcatctttggagccagaattttggatgaggaagttttcgaaggagatgttcaggagctggccattgtacctggcgtgcaggccgcatatgaatcatgtgagcagaaagagctggaatgtgaggggggccagagggaaagaccacagaatcagcagccccatcgtgcacagcgcagcccgcagcagcagccttcacggttgcaccgaccgcagaaccaggagccacagtcccaggtgcgggagctgggcgagccaccttccgccgcgcatcccagagaagggcgtcaccctggcatctcacccccctag

SEQ ID NO: 62100 - DNA, 873 bp, Artificial Sequence
  derived and/or modified sequence
atggagaggtgctccagatgtcaccggctattgctgttactcccattggtcctaggcctgagcgctgccccaggctgggcgggcgcaccacctgtggacgtgctgcgtgccctcagattccctagtctccccgacggggtgcgtcgcgctaagggcatttgccccgctgatgtggcttaccgcgtcgctaggccagcccagctcagcgccccgacaaggcagctcttccctgggggctttcccaaagacttctccctacttacggtcgtgcggacacgccctgggttgcaggccccactgctcaccttgtactctgctcagggtgttcggcagctgggactcgagctgggacggccagtgcgctttttatacgaggaccagacgggcaggcctcagcctcctagtcagcccgtttttaggggcctgtccctggcagacggtaagtggcaccgcgtggctgtggccgtgaagggccagtccgttaccttaatcgtggactgtaagaaacgagtgacacgtcccttaccacgttcagccaggccggtcctggacacacacggtgttattatcttcggtgcacgcatcttggatgaagaggtgtttgaaggggatgtccaagagctggccatcgttcctggagtgcaggccgcatatgagagttgcgaacagaaagaactggaatgtgagggggggcaacgagaaaggccccaaaaccagcagccgcatcgggcacagcggagcccccagcaacagccgtctaggctccatagaccacaaaatcaggaacctcagtcccaagtccgagaactgggcgaaccgccatctgcagcccaccctcgcgagggacgccatccaggcattagtccaccctag

SEQ ID NO: 62101 - DNA, 792 bp, Artificial Sequence
  derived and/or modified sequence
taagctccacccgttgacgtgcttcgagcactgcgtttccctagtttacccgacggggtccggcgagcaaaaggtatctgcccagctgatgtggcgtatagggtggctcggccagcccagctttcagctccaaccaggcagcttttccccgggggatttcccaaggacttctccctgttaactgttgtgagaactaggcctggcctccaggctccactgctaaccctgtattctgcccagggcgttagacagctgggcttggagcttggaaggcctgtacgcttcctttacgaggaccagacaggccgaccgcaacctccctctcaacctgtgttcaggggtctgagtctagcagacggaaagtggcatcgggtagcggtggccgtgaagggccaatctgtaactcttatcgtggactgcaaaaaacgagtgacgcggccactcccaagatcagcccgtcctgtccttgacacacacggcgttattatctttggtgcccggatactagacgaagaggtcttcgagggggacgtgcaggagctggccattgttcccggcgtacaggcagcctatgaaagttgcgagcaaaaggagctcgagtgtgagggcggccaaagggaaagaccgcagaaccagcagccacaccgcgctcagaggagtcctcagcagcaacctagccgcctacatcgacctcaaaatcaggaaccccaatcacaagtgcgagaactgggtgagccaccgtcagctgcgcacccgagggagggccgccatcccggaatttctccaccctag

SEQ ID NO: 62102 - DNA, 873 bp, Artificial Sequence
  derived and/or modified sequence
atggagcgttgctctaggtgtcacagactgcttctgttgctccccctagttttgggactaagtgccgcgccaggttgggccggagctcctccagtagatgttcttagggcactgcggtttccgagcttaccggacggcgtgaggcgagcaaagggcatctgtccagctgacgtggcctatagggtggctaggcccgcacagcttagcgcccccacgcgccagctgtttccaggaggctttccaaaagacttttccttgttaaccgtcgtgcgcacacgcccaggcttgcaggcgccactgcttaccctctatagcgcccagggagtgagacagctcggactcgaactcggcccgccggtcagattcctttacgaggaccaaacaggacgcccacaacctccaagtcaacccgtttttcgtggtctaagcctggccgacggcaagtggcatcgggtcgccgttgccgtgaaaggacaaagcgtgaccctgatcgtggactgcaaaaaaagggtaactagaccgctgcctcgtagcgcccgacctgtgttggatacacatggcgtgattatcttcggggcacgaatccttgacgaagaagtcttcgaaggggatgtccaggaactcgccattgttcccggtgtgcaagctgcttacgaatcatgtgagcagaaggaactcgagtgcgaggggggacagcgggagaggccacagaaccagcagccacatcgcgcccaacgttcgcctcagcagcagcctagcagactccatcggcctcaaaatcaggaaccgcagagccaggtgcgggagctcggagaacctccatccgctgcacatccgcgcgaaggcaggcatccaggtatctcaccaccctag

SEQ ID NO: 62103 - DNA, 873 bp, Artificial Sequence
  derived and/or modified sequence
atggagaggtgtagcaggtgccacaggctgctcctgctgctgccccttgtgctgggtttaagcgccgcgccgggatgggctggcgcgcccccagtagacgtgctcagagccctgcgctttcccagcctacctgatggtgtgagacgcgccaaaggaatctgcccggccgacgttgcctacagagtggccagaccagcccagttaagtgcccctacccgccagctgttccccggtggtttccccaaggatttctcattactgacagtggttaggaccaggcctgggctgcaagcaccattactgacactgtattcagctcagggtgtgcggcaacttgggctcgagttgggtcggcctgtgcggttcctatacgaggatcagaccggtagacctcaacccccatcccagccagtgtttaggggcttgtctttggcagatggtaagtggcaccgggttgctgttgctgtcaagggccagtccgttaccttgatcgtagactgtaagaagagggtgactcgacctctgcctcgctctgctcggcctgtgctggatacccacggcgtgattatattcggagcgcgcatcctggacgaagaagtgttcgagggggatgtgcaggagctcgccattgttcccggcgtccaagcagcctatgagagctgtgagcaaaaggaactcgaatgcgaaggagggcagcgtgagagaccccaaaaccaacaacctcatagggctcagcgcagccctcagcaacagccgtcccggctgcaccggccacagaaccaggagccccagtcccaggtgcgggaactcggagaacctccgtctgcagctcacccgcgagagggccgacacccgggtatatctcccccgtag

SEQ ID NO: 62104 - DNA, 873 bp, Artificial Sequence
  derived and/or modified sequence
atggagcgctgttcccggtgccaccgtttgctgctccttctacccctagtgctgggtttatctgccgcgccaggatgggccggtgcacctcccgttgatgtgctgagagcccttaggtttccatccttgcctgatggagtccggcgcgctaagggaatatgtccggctgatgtcgcctacagagttgcccggccagctcagctgtcagcccccacaaggcagctgtttcccggcggtttcccaaaagatttctccctgctgacagttgtgaggacccgcccagggctgcaagctcctttactgactctgtatagcgcccagggggttaggcagttggggctagagctgggccggccggtccggtttctctacgaagatcagaccggacgccctcagcccccttcccaaccggtgttccgcggtttgagcttggcagacggcaaatggcaccgtgtcgcggtggctgttaaaggtcaatcagtcactttgattgtagactgcaagaaaagggtgactcgtccactaccacggtccgccaggcctgtgctggatactcatggtgtcataatattcggcgcacgcattctggacgaggaggtgtttgagggggacgtccaggagctcgccatagttccgggggtacaggccgcctatgagagctgcgagcagaaggagcttgagtgtgaaggcggccagcgtgaaaggccgcagaatcaacagcctcatcgcgcacagagatcaccccagcagcagccttctaggctgcacaggccacagaatcaggagccacagtcgcaggtgcgcgagctcggggaacctccttcagcagcccacccacgtgagggccgacatccaggaatttcccccccttag

SEQ ID NO: 62105 - DNA, 873 bp, Artificial Sequence
  derived and/or modified sequence
atggaacggtgctccaggtgtcatagacttctcctgctcttacctttggtcctgggcctgtctgcagctccgggctgggccggagccccacccgtggacgtgttgcgtgccctccggtttcctagcctacctgatggcgttcggagggctaaaggtatttgtcccgccgatgtcgcctatcgagtagcccggcctgcccagctgtcggcgccaaccagacaactgtttcccggtgggtttcccaaagatttctcacttttgaccgtggtcaggacacggcctggcctccaagccccactgttgactctgtattcagcccagggcgttcgtcaactcggcttggaacttggtcgccccgtgcgattcctgtatgaagatcagaccggtcgcccacagccgccaagtcaacctgtgttccgcggcctttccctggctgatgggaaatggcaccgagtcgcggttgccgtgaaaggacagagcgtgactcttatagttgactgtaagaaaagggtgacccggcctctgccaaggtctgcgcgccctgtgctagatacacatggcgttatcatcttcggcgcaaggattctggacgaggaggtgttcgagggcgacgtacaggaactcgctattgtcccaggtgtgcaagccgcctatgagtcttgcgagcagaaagagctagaatgcgaaggcggacaaagggagaggccacaaaaccagcagccccaccgggcgcaacggtcacctcagcagcagccatctagattgcaccgcccccagaatcaggaaccccagagccaggtgcgggagctgggggaaccaccaagcgctgcgcacccgagagaaggccgccaccctgggatatcccccccttag

SEQ ID NO: 62106 - DNA, 873 bp, Artificial Sequence
  derived and/or modified sequence
atggagcgctgcagccgctgccaccggctgctgctgctgctgcccctggtgctgggcctgtctgctgcccctggctgggccggggcccctcctgtggatgtgctgcgggccctgcgcttccccagcctgcctgatggagtgcggcgggccaagggcatctgcccagcagatgtggcctacagagtggcccggcctgcccagctgagcgcccccacccggcagctgtttcctgggggcttccccaaggacttcagcctgctgactgtggtgaggacccggcccggcctgcaggcccccctgctgaccctgtacagcgcccagggcgtgcggcagctgggcctggagctgggccggcctgtgcgcttcctgtatgaggaccagacaggccggccccagccccccagccagcctgtgttccggggcctgagcctggctgatggcaagtggcaccgggtggccgtggccgtgaagggccagagcgtgaccctcatcgtggactgcaagaagagggtgacccggcccctgcccaggtctgcccggcctgtgctggacacccacggcgtcatcatctttggagcccgcatcctggatgaggaggtgtttgaaggagatgtgcaggagctggccatcgtgcctggggtgcaggccgcctatgagagctgtgagcagaaggagctggagtgtgagggcggccagcgggagcggccccagaaccagcagccccaccgggcccagaggagcccccagcagcagcccagccggctgcaccggccccagaaccaggagccccagagccaggtgcgggagctgggggagcccccatctgctgcccacccccgggagggccgccaccctggcatcagccccccatag

SEQ ID NO: 62107 - DNA, 792 bp, Artificial Sequence
  derived and/or modified sequence
tgagcccctcctgtggatgtgctgcgggccctgcgcttccccagcctgcctgatggagtgagaagagccaagggcatctgcccagcagatgtggcctacagagtggcccggcctgcccagctgagcgcccccacccggcagctgtttcctgggggcttccccaaggacttcagcctgctgactgtggtgaggaccaggcctggcctgcaggcccccctgctgaccctgtacagcgcccagggcgtgcggcagctgggcctggagctgggccggcctgtgcgcttcctgtatgaggaccagacaggccggccccagccccccagccagcccgtcttccggggcctgagcctggctgatggcaagtggcaccgggtggccgtggccgtgaagggccagagcgtgaccctgattgtggactgcaagaagagggtgacccggcccctgcccaggtctgcccggcctgtgctggacacccatggagtcatcatctttggagcccgcatcctggatgaggaggtgtttgaaggagatgtgcaggagctggccatcgtgcctggggtgcaggccgcctatgagagctgtgagcagaaggagctggagtgtgagggcggccagcgggagcggccccagaaccagcagccccaccgggcccagaggagcccccagcagcagcccagccggctgcaccggccccagaaccaggagccccagagccaggtgcgggagctgggggagccccccagcgctgcccacccccgggagggccgccaccctggcatcagccccccatag

SEQ ID NO: 62108 - DNA, 873 bp, Artificial Sequence
  derived and/or modified sequence
atggagcgctgcagccgctgccaccggctgctgctgctgctgcccctggtgctgggcctgtctgctgcccctggctgggccggggcccctcctgtggatgtgctgcgggccctgcgcttccccagcctgcctgatggagtgcggcgggccaagggcatctgcccagcagatgtggcctacagagtggcccggcctgcccagctgagcgcccccacccggcagctgtttcctgggggcttccccaaggacttcagcctgctgactgtggtgaggacccggcccggcctgcaggcccccctgctgaccctgtacagcgcccagggcgtgcggcagctgggcctggagctgggcccccctgtgcgcttcctgtatgaggaccagacaggccggccccagccccccagccagcctgtgttccggggcctgagcctggctgatggcaagtggcaccgggtggccgtggccgtgaagggccagagcgtgaccctcatcgtggactgcaagaagagggtgacccggcccctgcccaggtctgcccggcctgtgctggacacccacggcgtcatcatctttggagcccgcatcctggatgaggaggtgtttgaaggagatgtgcaggagctggccatcgtgcctggggtgcaggccgcctatgagagctgtgagcagaaggagctggagtgtgagggcggccagcgggagcggccccagaaccagcagccccaccgggcccagaggagcccccagcagcagcccagccggctgcaccggccccagaaccaggagccccagagccaggtgcgggagctgggggagcccccatctgctgcccacccccgggagggccgccaccctggcatcagccccccatag

SEQ ID NO: 62109 - DNA, 1194 bp, Artificial Sequence
  derived and/or modified sequence
agccaccgaggagggagcagtgccgggagccccgacggcgccttgctgcatggagctgggccgctgacagctgtcgctgcccgcagcctctgacctccctgggaccccggcgtctgaggctcatagtctgctccctgtcttctgtcagcctcagggcatccagcgtctcaggccgacctgggtccctgggacccggcgtttcggcttctcagccatggagcggtgcagccgctgccatcgcctcctcctcctcctacctctggtgctggggctgagcgcggccccaggctgggcaggtgcaccccctgtggatgtgctccgggccctgaggttcccctccctccctgatggtgtccggagagcgaaaggcatctgtccagctgatgtggcctaccgagtggcacgacctgcccagctcagtgcacccactcgccagcttttcccaggaggatttcccaaagatttctctctgctgactgttgtccggacccgccctggtctccaagctcccctcctgactctctacagtgcccagggtgtccgacagctgggcctggagctgggccgacctgtccgcttcctgtatgaagaccagactgggcggcctcaacctccctctcagccagtcttccgaggcctcagcctagcagatggcaagtggcaccgtgtggctgtggctgtgaagggccagtctgtcaccctcattgttgactgcaagaagcgagtcacccggcctctcccccgaagtgctcgtccagtattggacacccatggagtgatcatctttggtgcccgtattctggatgaagaagtctttgagggtgatgtccaggagctggccattgtcccaggggtccaggcagcctatgaatcatgtgaacagaaggagctggaatgcgaggggggccagagggaaagaccccaaaaccaacagcctcacagagcccagagatctccacagcagcaaccatcaagacttcacaggccacaaaatcaggaaccccagagccaggtgagggagctgggagaacccccaagtgcagcacaccccagagagggaagacacccaggcatctctcctccttagttgtcctccccaccctcatctccctattcccatcaccccctcctcctagtcctcattcatcagcctttttattttcatctaaaaataaaaagagttgttatgaagaa

SEQ ID NO: 62110 - DNA, 898 bp, Artificial Sequence
  derived and/or modified sequence
gtgcaccccctgtggatgtgctccgggccctgaggttcccctccctccctgatggtgtccggagagcgaaaggcatctgtccagctgatgtggcctaccgagtggcacgacctgcccagctcagtgcacccactcgccagcttttcccaggaggatttcccaaagatttctctctgctgactgttgtccggacccgccctggtctccaagctcccctcctgactctctacagtgcccagggtgtccgacagctgggcctggagctgggccgacctgtccgcttcctgtatgaagaccagactgggcggcctcaacctccctctcagccagtcttccgaggcctcagcctagcagatggcaagtggcaccgtgtggctgtggctgtgaagggccagtctgtcaccctcattgttgactgcaagaagcgagtcacccggcctctcccccgaagtgctcgtccagtattggacacccatggagtgatcatctttggtgcccgtattctggatgaagaagtctttgagggtgatgtccaggagctggccattgtcccaggggtccaggcagcctatgaatcatgtgaacagaaggagctggaatgcgaggggggccagagggaaagaccccaaaaccaacagcctcacagagcccagagatctccacagcagcaaccatcaagacttcacaggccacaaaatcaggaaccccagagccaggtgagggagctgggagaacccccaagtgcagcacaccccagagagggaagacacccaggcatctctcctccttagttgtcctccccaccctcatctccctattcccatcaccccctcctcctagtcctcattcatcagcctttttattttcatctaaaaataaaaagagttgttatgaagaa

SEQ ID NO: 62111 - DNA, 1194 bp, Artificial Sequence
  derived and/or modified sequence
agccaccgaggagggagcagtgccgggagccccgacggcgccttgctgcatggagctgggccgctgacagctgtcgctgcccgcagcctctgacctccctgggaccccggcgtctgaggctcatagtctgctccctgtcttctgtcagcctcagggcatccagcgtctcaggccgacctgggtccctgggacccggcgtttcggcttctcagccatggagcggtgcagccgctgccatcgcctcctcctcctcctacctctggtgctggggctgagcgcggccccaggctgggcaggtgcaccccctgtggatgtgctccgggccctgaggttcccctccctccctgatggtgtccggagagcgaaaggcatctgtccagctgatgtggcctaccgagtggcacgacctgcccagctcagtgcacccactcgccagcttttcccaggaggatttcccaaagatttctctctgctgactgttgtccggacccgccctggtctccaagctcccctcctgactctctacagtgcccagggtgtccgacagctgggcctggagctgggcccacctgtccgcttcctgtatgaagaccagactgggcggcctcaacctccctctcagccagtcttccgaggcctcagcctagcagatggcaagtggcaccgtgtggctgtggctgtgaagggccagtctgtcaccctcattgttgactgcaagaagcgagtcacccggcctctcccccgaagtgctcgtccagtattggacacccatggagtgatcatctttggtgcccgtattctggatgaagaagtctttgagggtgatgtccaggagctggccattgtcccaggggtccaggcagcctatgaatcatgtgaacagaaggagctggaatgcgaggggggccagagggaaagaccccaaaaccaacagcctcacagagcccagagatctccacagcagcaaccatcaagacttcacaggccacaaaatcaggaaccccagagccaggtgagggagctgggagaacccccaagtgcagcacaccccagagagggaagacacccaggcatctctcctccttagttgtcctccccaccctcatctccctattcccatcaccccctcctcctagtcctcattcatcagcctttttattttcatctaaaaataaaaagagttgttatgaagaa

SEQ ID NO: 62112 - DNA, 873 bp, Artificial Sequence
  derived and/or modified sequence
atggagcggtgcagccggtgccaccggctgctgctgctgctgcccctggtgctcggcctatccgctgcgcccggctgggctggcgccccccctgttgacgtcctaagggcgctgcggtttcccagtctcccagatggggtacgcagggctaagggtatctgccccgccgacgtggcgtacagagttgctaggcctgcccagctatccgctcctactcgccagctgtttccagggggattccccaaggatttcagtttgctgacagtggttcgaacccgtcctggacttcaggcaccactgcttactctgtactctgcacaaggtgtcaggcagttaggattagagttaggaaggccagttcgttttctgtacgaggaccagaccggccggccccagcccccttcccagcccgtgtttagaggcctctcactggccgatgggaaatggcaccgggtggccgttgcagtgaaaggacaaagtgtgacccttatagtcgattgtaaaaagagggtaacgcgccctcttccacggagcgcccgtcccgtgctcgacacccacggtgtcatcatctttggcgccaggatactcgacgaagaggtgttcgagggcgatgtccaagaactggctatcgtgccgggcgttcaggcagcatatgaatcttgcgagcaaaaagaactggagtgcgaggggggacagagagagaggccacagaatcagcagccacatcgcgcacagcgttccccccagcagcaaccaagcagactccatcggccccagaatcaagagccacaatcacaagtccgcgagctaggcgagccgccatcagccgcccaccctagggaaggcagacatcctggaatctcgcccccttag

SEQ ID NO: 62113 - DNA, 873 bp, Artificial Sequence
  derived and/or modified sequence
atggagcggtgcagccggtgccaccggctgctgctgctgctgcccttggtgctggggttgagcgctgcccccgggtgggccggtgcacctcctgtagatgtgctcagggcactccgcttcccgtccttgccagacggagttcgcagggccaaagggatttgtcctgctgatgtagcttatcgggtggctcgcccagcccagttgtcagcccccaccagacagctcttccccggaggcttccctaaggatttttcattactcacagttgtgcgaacacgcccaggtctacaagccccacttcttacactctactccgcccagggagtcagacagctaggcctagaacttggacgcccagttaggttcctgtacgaggatcagaccgggcgtccacagcccccttcacagcccgtcttccgcggcctgtctctggccgacggtaagtggcaccgcgtggctgtggccgttaaagggcagtcagttacattgattgtagactgcaaaaagcgcgtcacccgccctctgcctaggtccgctagacccgtgctggacacacacggggtaattatctttggggcccgcattctcgatgaggaggtgtttgaaggggacgtccaagagctggccatcgtgcccggtgtgcaggccgcctatgagagctgcgagcagaaagagctggagtgcgagggcggacaacgagagcgccctcaaaatcagcaaccacatcgtgcacaacgctccccccagcagcagccctcccgcctgcacagaccgcagaatcaagaaccccagtcccaggtgagggaacttggagagccaccaagcgccgcgcacccccgtgagggacgtcaccctggaatttcaccaccttag

SEQ ID NO: 62114 - DNA, 792 bp, Artificial Sequence
  derived and/or modified sequence
tgagccccccccgtggacgtgctgcgggccctgcggttccccagcctgcccgacggagtgcgccgtgcaaagggcatatgtcctgcagacgttgcctacagagtggccagaccagcacagctgtctgcacctacccgccaactgttccccggaggttttccgaaggacttttccctgctgactgttgtgaggacgagaccaggcctgcaggctccactgttgaccctctactctgcgcagggcgttagacaactgggcctggagttaggccgccccgtacgattcctatatgaagaccagacaggaagaccacaacctcccagccaaccagtgttccgtggtctgtcactcgctgatggtaagtggcatcgggtagcagtcgccgtcaaggggcagagcgtgacactgattgtggattgcaagaagcgtgttacccgccccctccctcgctcggcacggcccgtgctggatacccatggagttattatttttggagccaggatactggacgaagaggtgttcgagggcgacgtgcaggagcttgccattgtgcctggagtgcaggctgcttacgagtcgtgcgaacagaaggagttggaatgtgagggcggccagcgcgaacgcccccagaatcagcagcctcatagagctcagcgaagcccccaacagcaaccaagccgcctccatcgcccccagaaccaagagccacagtctcaagttagggaactgggcgagccacccagcgcagcgcaccccagggagggcagacacccagggatttcccccccatag

SEQ ID NO: 62115 - DNA, 873 bp, Artificial Sequence
  derived and/or modified sequence
atggagcggtgcagccggtgccaccggctgctgctgctgctgcccttggtgttgggcctgagtgccgctccagggtgggccggagccccccctgtggacgtgttgagagcactcaggttcccttctcttccagacggggtgcggagagccaagggcatttgtccagctgatgtagcttatagagtagccaggccagcccagttgagcgcgcctacccggcagcttttcccagggggatttcccaaggacttcagtctcctaacagtggtccggactcggcccgggcttcaagctcccttgctgacactgtattcagctcagggagtcagacaactaggcctggaacttggtccacctgtccgtttcctgtacgaggaccagaccggtcgcccccagccaccctcccagcctgtttttcggggtctttcactggcagatggaaagtggcaccgcgtggccgtggctgtgaaaggtcagtctgtgacattaattgtggactgcaagaagcgggtgactcgccctctgcccaggtcagcaagacctgttttggacactcacggagtgattatcttcggcgcccgaatactcgacgaggaagtcttcgagggagacgtccaggagctggctatcgtgcccggcgttcaggccgcgtacgagtcatgtgaacaaaaggaactggagtgtgaaggtgggcagcgcgagaggccgcagaaccagcagccccatagagcacagcgctccccacagcaacagccttctcgtttacacaggcctcaaaaccaggaacctcagtcacaggttagggaactaggcgaacccccctccgccgcacacccgcgtgaagggcgccacccggggattagccccccctag

SEQ ID NO: 62116 - DNA, 873 bp, Artificial Sequence
  derived and/or modified sequence
atggagcggtgcagccggtgccaccggctgctgctgctgctgcccttagtgttaggactatcggcagccccaggctgggccggggcgcctcctgtcgatgtcttgagagccctccgatttccttctctgcctgatggtgtgagacgggccaagggcatttgtcctgccgatgttgcgtaccgagtggctcgacccgcgcagctgtcggcacctacccgtcagctgttcccaggcgggttcccgaaggatttctcgctgctaacagtcgtgcgaacccgccccggcctccaggccccattgcttaccctctattcagctcagggcgtgagacagctgggcctggagttggggagacccgtgaggtttttatacgaagaccagacaggccgccctcaacctcccagccagccagtgttccggggactgagcctcgccgacgggaagtggcacagagtggccgttgcggtgaaagggcaatccgtgacactcatcgtggactgcaaaaagcgggtgacgcggcctctgcctcgatctgccagaccagtattagacacccatggggtgattatcttcggggcccggatattggacgaagaagttttcgagggggacgtacaggaattggcgattgtcccaggcgtgcaggccgcctacgaatcttgcgagcagaaggagctggagtgcgaagggggacagcgggagcgcccccagaatcagcagccgcaccgagcacaacgcagtccccagcagcagccaagcagactgcaccgccctcagaatcaggagcctcaaagccaggtacgcgaactgggcgagcccccctctgctgctcatccaagagaaggtcgccaccccggcatttcgcctccatag

SEQ ID NO: 62117 - DNA, 873 bp, Artificial Sequence
  derived and/or modified sequence
atggagcggtgcagccggtgccaccggctgctgctgctgctgcccctggtcttggggcttagtgccgcaccaggttgggcaggcgcacctcccgtggacgttctgcgggcattgagattcccctccttaccagacggagtcagaagagcaaagggaatctgccccgctgatgtggcttaccgcgttgcacgcccagcccagttgtccgcacccacaaggcagctgttccccggcggctttcctaaggatttctcgttgctgaccgtcgtgaggacccggcccggcttgcaggccccgttgctgaccctctattcagctcagggggtgcgacagctgggcctggagctaggtaggccagtgcggtttctgtatgaagatcaaacgggccggcctcagccgccctctcagcccgtttttcgcgggttaagtctcgcagatggaaagtggcacagggtagccgtcgcggtgaagggccaatccgtcacattaattgtcgactgtaagaaacgggttaccagacccctgccgaggtccgctcgacccgtgttggacacccacggtgtaattattttcggcgctagaatactcgacgaggaggtttttgagggcgacgtccaggaactagctattgtgccgggcgtccaggctgcctacgagagctgcgaacaaaaagagttggagtgtgagggcggccagagagaacgcccgcagaaccagcagccacatagagcccagcgctcccctcagcagcagccaagtcggttacaccgcccgcagaaccaggagccgcagtcacaagtgagggaattaggggagccgccgagcgcagcccatcctagagagggccgccatccagggatttcaccaccatag

SEQ ID NO: 62118 - DNA, 873 bp, Artificial Sequence
  derived and/or modified sequence
atggagcggtgcagccggtgccaccggctgctgctgctgctgcccctagtgctgggcctgtctgctgcccccgggtgggccggcgcaccccccgtagatgttctgcgggcactgcggttcccatccttgccagacggcgtgcgtagggccaagggtatctgtcccgcggacgtggcttacagggtagcccgacccgctcaactgagcgcccctacaagacaacttttccccggaggtttcccaaaagatttttccctgctcacagtggtgagaactagaccaggactgcaggcgcccttactaaccctgtatagcgcccagggcgtaaggcagcttggtctagagcttgggcgaccagtgcgatttttgtacgaagatcagaccggtcggccacaacctccatcccagccggtgttccgcgggctgtctctggccgatggtaagtggcacagagtggctgtggccgttaaggggcaatctgtgacgctgatcgtggattgcaagaaaagagtgacgaggcccctgccgcgatccgctcgaccggtgcttgatacacacggcgtcatcatttttggagcaaggattctggacgaagaggtattcgagggtgatgtccaagaactcgctatcgtgcccggagtccaagccgcctacgagtcttgcgagcagaaggagctcgaatgcgagggcggtcagcgggagcggccacagaatcagcagcctcacagagctcaaagatctcctcagcagcaaccatcccgccttcataggccccaaaaccaggaaccccagtctcaggttcgtgagctgggggagcctccatcagcggctcacccgcgggaggggcgccaccccggaatctctcccccctag

SEQ ID NO: 62119 - DNA, 873 bp, Artificial Sequence
  derived and/or modified sequence
atggagcgttgcagcagatgtcataggctgttactcttgctgccattggtcttgggactcagcgccgcacctggatgggccggtgcccctcctgtcgacgtgctcagggcattgcgatttcctagcctgccagacggggtcagaagagcaaaggggatttgccctgccgacgtagcgtatcgcgtggcaaggcccgctcagctgtccgctcctacacgacagctgttccctggcggttttcctaaggacttcagtctgctcaccgtcgtccgtacaaggcctggcctacaggccccactcctgacgttgtatagtgcccaaggcgtccggcagctggggctggaactgggcaggcctgttcgctttctctatgaagaccagactgggcgacctcaacccccttcccaacctgtgtttcgcggactctctctggcagacggaaaatggcaccgggttgctgttgctgtgaagggtcagtctgtgaccctgattgtggactgcaaaaagagggtcacacgaccactacctcggtcggctagaccagtgcttgatactcatggagtgattatctttggtgctcgaatacttgatgaggaagttttcgaaggcgacgtgcaggaacttgcaatagtaccaggcgtacaggcagcgtatgaatcctgcgaacagaaagaacttgagtgcgaagggggacagcgagagcgccctcagaaccaacaaccacacagggctcagcggagcccgcagcagcagccatctcgccttcaccgaccccagaatcaggagcctcaatcacaagtgcgcgaattgggcgaaccgccaagcgccgctcatccacgcgagggccgacatcccggtatctcacccccttag

SEQ ID NO: 62120 - DNA, 873 bp, Artificial Sequence
  derived and/or modified sequence
atggagcgatgcagtagatgccaccgattgctgcttttgctccccctcgtgctcggactaagtgccgcacctggttgggccggagctcctccagtcgatgtgctcagagcccttaggttcccctcactgccggacggtgtccgaagagccaagggcatttgcccagccgacgtagcttacagagtggcaaggccagcccaactttccgcccctacgcggcagttatttcccggagggtttccaaaggatttttccttgctaaccgtggtgcgcaccaggcccggacttcaagcaccgttgttaactctgtacagcgcgcagggggtccgccagttgggcctcgaactgggacgccctgtccggttcctctacgaggatcagaccggtcggccacagccaccttcccagcccgtttttaggggactaagcctggcggacgggaaatggcatcgagttgccgtggctgtcaaaggccagagcgttacattgatagttgattgcaaaaagcgggttacccggccactgcctcggtctgcacggccagtgctggatacccacggagtcataatcttcggagcaaggatcttggatgaagaggtctttgagggcgacgtgcaggaactggccatcgttcccggagtccaggccgcttacgagtcttgtgaacaaaaagaactggagtgtgaggggggtcagagggagcggccacaaaaccaacagcctcacagggcccagcgatccccccagcaacagccctcccgcctccacagaccccaaaaccaggaacctcagtcacaggtacgagagctgggcgagcccccatcagcggcacacccaagagaggggagacatccagggatttccccaccctag

SEQ ID NO: 62121 - DNA, 792 bp, Artificial Sequence
  derived and/or modified sequence
tgagctccacccgttgacgtgctgagagcccttcgcttcccgagcctgccagatggagtgagacgcgcaaaaggaatctgcccagccgatgtggcctatagagtggccaggcccgctcagttgagcgctcccacaagacagctgtttccgggtggtttcccaaaagatttttcactgcttacagtagtgcgcacccgccctgggctgcaagccccactgctcacattgtattctgctcagggagtacgtcagttggggctcgagctagggcgaccagtcaggtttctttacgaggatcaaacaggcaggccacaaccaccttctcagccggtcttcagggggctgtctttggccgacgggaaatggcatagagtcgccgtggctgtcaagggacagagcgtgactctcatcgtcgactgtaaaaagcgggtcacccggcctcttccgagatctgccagacccgtccttgacacacatggcgtgatcatattcggtgccaggattctggatgaagaggtgtttgaaggtgacgtccaggagctcgctattgtgcccggagtgcaggctgcctacgaatcttgcgagcagaaggagttagaatgcgagggcggtcagagagaacgtccgcagaaccagcaacctcaccgagcacagaggtccccccagcagcaaccatcgcgactccatcgtccacagaatcaggagcctcaaagccaggttcgggagttaggcgaacccccatctgctgcccatcctcgagaaggaagacatccaggcatttcccctccttag

SEQ ID NO: 62122 - DNA, 873 bp, Artificial Sequence
  derived and/or modified sequence
atggagcgatgtagtcgctgccataggttgctcctcttgctccccttggtattgggattgtctgctgcccctggatgggcaggtgcaccacctgtggacgttctgcgcgctctgcgctttccatcactgcccgatggggtgcggcgagcgaaaggaatctgtcctgccgatgtggcgtatagggtcgctagaccagcccagctttcagctccaacaagacaactttttccaggaggctttcccaaagatttctccctgctgaccgtggtaaggactcggccaggactacaagcccctctgttgacactgtacagcgcccagggagttcgccagctgggattggagcttggaccgcctgtaagattcctgtacgaggatcaaaccggacggccacagcctccgagtcagcccgtttttaggggccttagcctggccgacgggaagtggcaccgcgtggctgtggcagttaagggtcaatctgtgaccctcatagtggactgtaagaaacgggtgaccagaccactcccccgaagcgccaggcctgtgctggacactcacggtgtgatcatctttggcgctagaatcctcgacgaggaagtgtttgaaggcgatgtacaggagctggcaatcgtgcccggagtgcaggccgcttacgaaagttgtgaacaaaaagagctcgagtgcgagggaggacagcgggaaaggcctcagaaccagcaaccgcaccgagcacagcgctcaccccagcagcaaccatctagactccaccgcccacagaaccaggagccccagtcccaggtgcgagaactgggggaacccccttcagctgcacatccccgagagggcaggcatccagggatttctcccccttag

SEQ ID NO: 62123 - DNA, 873 bp, Artificial Sequence
  derived and/or modified sequence
atggagcggtgttccagatgtcacagactgctgctcctcctgcccctcgtattaggtctgtctgctgcacccggttgggctggagcacctcctgtggacgtgctcagagcattacggttcccttctctgcccgacggcgtaaggagggctaaggggatctgtcctgccgatgttgcctacagagtggccagacccgctcagcttagcgcacctacacgccagctgttccccggaggctttcctaaagacttttctttgctcactgtcgtgcgaactaggccgggtctgcaggctccactattgactctctactccgcgcaaggggtgcgacagctggggcttgaactgggccgaccagtaaggttcctatacgaagatcagacaggacgaccccagccaccatcccagcctgtcttccgtggcctgtccctggccgacggtaagtggcatcgggtagcagtggctgtgaagggtcaatctgtgaccctcattgttgactgcaaaaaaagagtgaccagacctttgcccaggtctgcgaggcctgtcttggatacacatggggtgataatctttggggctagaattctggacgaagaggtgttcgagggagacgtccaggaactagccattgtgccaggcgttcaagctgcatatgaaagttgcgaacagaaggagttggagtgtgaaggagggcaacgagagcggccacaaaatcagcagcctcatcgtgcccaacgctccccgcaacagcagccatcacggctccaccgccctcaaaatcaagaaccacagtctcaggtgcgagagctcggcgagcctccaagcgctgcccacccgagggagggccgtcatcccggtatttcgcccccatag

SEQ ID NO: 62124 - DNA, 873 bp, Artificial Sequence
  derived and/or modified sequence
atggaaaggtgctcaaggtgccaccgactgctgctgcttctgcccctggtgttagggctgagtgccgctccgggttgggctggggcaccacccgtggacgtcctccgggcactgagatttccttcactgcctgatggcgtgcgcagggccaagggtatatgccctgctgacgtcgcgtaccgcgtcgcacgacccgctcagctgagcgccccaactagacagctcttccctggaggatttccaaaagactttagcctcctcacagtcgttaggacacgtccgggattacaggcaccccttctgactctctacagcgcccagggggttaggcagttagggctggagctcggcagaccagttaggtttctgtatgaagaccagaccggtagaccccaacctccttcgcagccagtgtttcgcggtctttccctcgcagatgggaagtggcaccgggtggccgtggctgtcaaaggtcaatctgtgacattaatagttgattgcaagaagcgggttaccaggcccttgcccaggagtgcacgtccagtgcttgacacacacggggtgattattttcggtgcacgcatactcgacgaggaagtcttcgaaggggacgtccaggagcttgctatagtcccgggagtgcaggcggcatatgaaagctgcgaacagaaggagctggaatgcgaagggggtcagagggaacggccacagaatcagcagcctcaccgcgctcagaggtctccccaacaacagccttcgcgcctgcatagaccccagaatcaggaacctcagtcccaagtccgtgagcttggggagcccccaagtgcagctcatccgagagaggggagacacccgggtattagtcccccttag

SEQ ID NO: 62125 - DNA, 873 bp, Artificial Sequence
  derived and/or modified sequence
atggagcgctgttcacgctgccatcgtctgcttctgcttctacctttggtgctgggattatccgccgcaccaggctgggcgggagccccaccagtggatgtcctgcgcgcattacgattcccctctctgccggacggagtgagacgcgcaaaaggtatttgcccagctgacgtggcgtacagagtggcgagacccgcacagctaagtgccccaacgagacaactcttccctgggggtttccccaaagacttcagcctgctgactgtggtgcgtacacggccagggctccaggccccactactaacactgtacagcgcccagggggttaggcagcttggcttggagctgggaagacctgtgcgctttctttacgaggaccaaaccggtcgcccacagcccccaagccagccagtattccggggtctgagcctcgcagatggtaagtggcatagagttgcagtcgccgtgaaagggcaatccgtcactctgatagtagactgcaagaaaagagtgacccggccactgccccgttcagcccgtcctgtccttgacacccatggagtcataattttcggagctcggatactcgacgaagaggtgtttgagggtgatgtgcaggagctggccatcgtgcccggagtgcaagctgcttacgagtcatgcgaacagaaagagttggaatgcgaggggggtcagcgggagcggccacagaatcagcagccacaccgcgctcagaggtctcctcagcagcagccctcgaggcttcatagacctcagaaccaggagccacagagccaggtacgcgaactgggcgagcccccaagtgcagctcatccacgagaggggaggcaccctggaatcagtcccccttag

SEQ ID NO: 62126 - DNA, 873 bp, Artificial Sequence
  derived and/or modified sequence
atggagagatgctccaggtgccaccgtctcttattgcttttacctttggtgttgggtctgtctgcggcacccgggtgggccggcgcccctccagttgacgtcctccgagccctgcgttttccgtccttgccagatggtgtgagacgtgccaaaggcatctgtcccgctgacgtggcatatcgcgtagctagacccgcccagttgtccgctcctactcgtcagttgttccccggcggctttcctaaggatttttccctacttacagtggtacgaactcgcccggggttacaggctccgctgctgacactctactccgcccagggagtcaggcagctaggactagaactgggcagaccggtgagatttctttacgaagatcagactggacgcccacagccgccatcccaaccagtattcagggggctatcactggcagatgggaaatggcatcgcgttgctgtagcggtcaagggtcagagcgtaacactaatcgtcgattgcaagaagagagtgactcggcctctgcccaggtcagccagaccagtgctggacactcacggcgtcatcattttcggggcacgtatattagacgaggaagtcttcgagggcgacgtccaggaactggccatagtacccggtgtacaagctgcctacgagtcctgcgagcagaaggaattagagtgtgaaggtggacagagagagcgcccacagaaccaacagccgcaccgggcccagcgatctccacagcagcagccttcccggctgcaccgaccccaaaatcaagagcctcagtcacaagtcagagagctgggtgagcccccgtcagccgctcatcctagagagggccgccacccgggtatctcacccccatag

SEQ ID NO: 62127 - DNA, 873 bp, Artificial Sequence
  derived and/or modified sequence
atggagcgatgctctaggtgtcatagactgcttctgctgctgcccctggttctgggactttccgcggcacctggttgggcgggggctcctcccgtggacgtgctgagagccctgaggtttccctccctccccgatggcgtgcggcgcgccaagggtatctgcccagccgacgttgcctaccgcgtggccagacccgctcagctttccgccccgaccagacaactcttcccaggcggtttccctaaggattttagcttgctcacggtggtaagaactagaccaggtttgcaagctccacttttaactctttacagcgcacagggcgtcagacaactggggctggaactgggacggccggtcagattcctgtacgaagaccagacaggaaggccccagcccccaagccagcccgtttttagaggcttgtctctcgccgacggcaagtggcatagagtagccgtggccgtgaagggacagtctgttactctcatcgtggactgtaagaagcgcgtgacccgaccattaccaagatctgctcgacctgtgctggacacacacggcgttatcatttttggagcgcgcatcctggacgaagaggtttttgaaggagacgtgcaggagctagccatagtgcctggagtgcaggccgcttacgaatcctgtgagcagaaggaacttgagtgcgaagggggccagagggaaagacctcagaatcaacagccccatagagcccagcgatccccacaacaacaacccagcaggctccaccggcctcagaatcaggaaccgcaaagccaggtcagagaactcggcgagcctccatctgccgcccaccccagggagggacggcacccaggtatcagccccccatag

SEQ ID NO: 62128 - DNA, 873 bp, Artificial Sequence
  derived and/or modified sequence
atggagagatgctccaggtgccaccgtctcttattgcttttacctttggtgttgggtctgtctgcggcacccgggtgggccggcgcccctccagttgacgtcctccgagccctgcgttttccgtccttgccagatggtgtgagacgtgccaaaggcatctgtcccgctgacgtggcatatcgcgtagctagacccgcccagttgtccgctcctactcgtcagttgttccccggcggctttcctaaggatttttccctacttacagtggtacgaactcgcccggggttacaggctccgctgctgacactctactccgcccagggagtcaggcagctaggactagaactgggcagaccggtgagatttctttacgaagatcagactggacgcccacagccgccatcccaaccagtattcagggggctatcactggcagatgggaaatggcatcgcgttgctgtagcggtcaagggtcagagcgtaacactaatcgtcgattgcaagaagagagtgactcggcctctgcccaggtcagccagaccagtgctggacactcacggcgtcatcattttcggggcacgtatattagacgaggaagtcttcgaaggcgacgtccaggaactggccattgtgcctggagtgcaggcagcctatgaatcatgtgaacagaaggagctggaatgcgagggtgggcagagagagaggcctcagaaccagcagccccatagagctcaacgaagcccccaacagcaaccctccaggctccacagaccacaaaaccaggagcctcagtcacaagtgcgcgaactcggcgaaccccctagcgccgcacacccgagggaagggcgccaccccggaatttccccaccatag

SEQ ID NO: 62129 - DNA, 873 bp, Artificial Sequence
  derived and/or modified sequence
atggaacgctgcagtaggtgtcacagactgttactcctgctccccctcgtgctgggtttgtcagccgctcctggctgggctggcgcaccccccgtggatgttttacgagccctgagatttccgtccctgcccgatggcgtgcgtagggcaaaaggaatatgtccagctgacgtcgcctatagagttgcacgccccgctcagctgagtgctccaacccgccaattgttccccggaggcttcccaaaggatttcagcctgcttacagtcgttcgcacaaggccaggcttacaggctcccctcctcactctttatagcgcccagggtgtacggcaattgggtctggagctgggcagaccagtacgcttcctatacgaggaccagactggcagaccccaacctccctcacagccggtgtttagaggcctgagtctggccgacggaaaatggcaccgcgtcgccgtagcagtcaagggccagtccgtcacgctcatagtggactgcaagaagcgcgtgactcgccccctcccccgcagcgcaagaccagtgttagacacgcatggggtgattattttcggagctcgaatactcgacgaagaggtatttgaaggcgatgtacaggagctcgccattgtgccaggcgtccaggctgcgtatgaatcttgtgaacagaaggagctggagtgtgaaggagggcagagagagcgaccccaaaaccagcaaccgcacagagcacaaaggtctccacagcagcagcccagtcggcttcacaggccacagaatcaggaaccccagtcccaggtccgcgagctgggtgagcccccctctgctgcacaccctagagagggacgacaccccggaatttcccccccgtag

SEQ ID NO: 62130 - RNA, 873 nt, Artificial Sequence
  derived and/or modified sequence
auggagagaugcuccaggugccaccgucucuuauugcuuuuaccuuugguguugggucugucugcggcacccgggugggccggcgccccuccaguugacguccuccgagcccugcguuuuccguccuugccagauggugugagacgugccaaaggcaucugucccgcugacguggcauaucgcguagcuagacccgcccaguuguccgcuccuacucgucaguuguuccccggcggcuuuccuaaggauuuuucccuacuuacagugguacgaacucgcccgggguuacaggcuccgcugcugacacucuacuccgcccagggagucaggcagcuaggacuagaacugggcagaccggugagauuucuuuacgaagaucagacuggacgcccacagccgccaucccaaccaguauucagggggcuaucacuggcagaugggaaauggcaucgcguugcuguagcggucaagggucagagcguaacacuaaucgucgauugcaagaagagagugacucggccucugcccaggucagccagaccagugcuggacacucacggcgucaucauuuucggggcacguauauuagacgaggaagucuucgagggcgacguccaggaacuggccauaguacccgguguacaagcugccuacgaguccugcgagcagaaggaauuagagugugaagguggacagagagagcgcccacagaaccaacagccgcaccgggcccagcgaucuccacagcagcagccuucccggcugcaccgaccccaaaaucaagagccucagucacaagucagagagcugggugagcccccgucagccgcucauccuagagagggccgccacccggguaucucacccccauag

SEQ ID NO: 62131 - RNA, 873 nt, Artificial Sequence
  derived and/or modified sequence
auggagcgaugcucuaggugucauagacugcuucugcugcugccccugguucugggacuuuccgcggcaccugguugggcgggggcuccucccguggacgugcugagagcccugagguuucccucccuccccgauggcgugcggcgcgccaaggguaucugcccagccgacguugccuaccgcguggccagacccgcucagcuuuccgccccgaccagacaacucuucccaggcgguuucccuaaggauuuuagcuugcucacggugguaagaacuagaccagguuugcaagcuccacuuuuaacucuuuacagcgcacagggcgucagacaacuggggcuggaacugggacggccggucagauuccuguacgaagaccagacaggaaggccccagcccccaagccagcccguuuuuagaggcuugucucucgccgacggcaaguggcauagaguagccguggccgugaagggacagucuguuacucucaucguggacuguaagaagcgcgugacccgaccauuaccaagaucugcucgaccugugcuggacacacacggcguuaucauuuuuggagcgcgcauccuggacgaagagguuuuugaaggagacgugcaggagcuagccauagugccuggagugcaggccgcuuacgaauccugugagcagaaggaacuugagugcgaagggggccagagggaaagaccucagaaucaacagccccauagagcccagcgauccccacaacaacaacccagcaggcuccaccggccucagaaucaggaaccgcaaagccaggucagagaacucggcgagccuccaucugccgcccaccccagggagggacggcacccagguaucagccccccauag

SEQ ID NO: 62132 - RNA, 873 nt, Artificial Sequence
  derived and/or modified sequence
auggagagaugcuccaggugccaccgucucuuauugcuuuuaccuuugguguugggucugucugcggcacccgggugggccggcgccccuccaguugacguccuccgagcccugcguuuuccguccuugccagauggugugagacgugccaaaggcaucugucccgcugacguggcauaucgcguagcuagacccgcccaguuguccgcuccuacucgucaguuguuccccggcggcuuuccuaaggauuuuucccuacuuacagugguacgaacucgcccgggguuacaggcuccgcugcugacacucuacuccgcccagggagucaggcagcuaggacuagaacugggcagaccggugagauuucuuuacgaagaucagacuggacgcccacagccgccaucccaaccaguauucagggggcuaucacuggcagaugggaaauggcaucgcguugcuguagcggucaagggucagagcguaacacuaaucgucgauugcaagaagagagugacucggccucugcccaggucagccagaccagugcuggacacucacggcgucaucauuuucggggcacguauauuagacgaggaagucuucgaaggcgacguccaggaacuggccauugugccuggagugcaggcagccuaugaaucaugugaacagaaggagcuggaaugcgagggugggcagagagagaggccucagaaccagcagccccauagagcucaacgaagcccccaacagcaacccuccaggcuccacagaccacaaaaccaggagccucagucacaagugcgcgaacucggcgaacccccuagcgccgcacacccgagggaagggcgccaccccggaauuuccccaccauag

SEQ ID NO: 62133 - RNA, 873 nt, Artificial Sequence
  derived and/or modified sequence
auggaacgcugcaguaggugucacagacuguuacuccugcucccccucgugcuggguuugucagccgcuccuggcugggcuggcgcaccccccguggauguuuuacgagcccugagauuuccgucccugcccgauggcgugcguagggcaaaaggaauauguccagcugacgucgccuauagaguugcacgccccgcucagcugagugcuccaacccgccaauuguuccccggaggcuucccaaaggauuucagccugcuuacagucguucgcacaaggccaggcuuacaggcuccccuccucacucuuuauagcgcccaggguguacggcaauugggucuggagcugggcagaccaguacgcuuccuauacgaggaccagacuggcagaccccaaccucccucacagccgguguuuagaggccugagucuggccgacggaaaauggcaccgcgucgccguagcagucaagggccaguccgucacgcucauaguggacugcaagaagcgcgugacucgcccccucccccgcagcgcaagaccaguguuagacacgcauggggugauuauuuucggagcucgaauacucgacgaagagguauuugaaggcgauguacaggagcucgccauugugccaggcguccaggcugcguaugaaucuugugaacagaaggagcuggagugugaaggagggcagagagagcgaccccaaaaccagcaaccgcacagagcacaaaggucuccacagcagcagcccagucggcuucacaggccacagaaucaggaaccccagucccagguccgcgagcugggugagccccccucugcugcacacccuagagagggacgacaccccggaauuucccccccguag

SEQ ID NO: 62134 - protein, 1941 aa, Artificial Sequence
  derived and/or modified sequence
MAQGSGGREGALRTPAGGWHSPPSPDMQELLRSVERDLSIDPRQLAPAPGGTHVVALVPARWLASLRDRRLPLGPCPRAEGLGEAEVRTLLQRSVQRLPAGWTRVEVHGLRKRRLSYPLGGGLPFEDGSCGPETLTRFMQEVAAQNYRNLWRHAYHTYGQPYSHSPAPSAVPALDSVRQALQRVYGCSFLPVGETTQCPSYAREGPCPPRGSPACPSLLRAEALLESPEMLYVVHPYVQFSLHDVVTFSPAKLTNSQAKVLFILFRVLRAMDACHRQGLACGALSLYHIAVDEKLCSELRLDLSAYERPEEDENEEAPVARDEAGIVSQEEQGGQPGQPTGQEELRSLVLDWVHGRISNFHYLMQLNRLAGRRQGDPNYHPVLPWVVDFTTPHGRFRDLRKSKFRLNKGDKQLDFTYEMTRQAFVAGGAGGGEPPHVPHHISDVLSDITYYVYKARRTPRSVLCGHVRAQWEPHEYPASMERMQNWTPDECIPEFYTDPSIFRSIHPDMPDLDVPAWCSSSQEFVAAHRALLESREVSRDLHHWIDLTFGYKLQGKEAVKEKNVCLHLVDAHTHLASYGVVQLFDQPHPQRLAGAPALAPEPPLIPKLLVQTIQETTGREDFTENPGQLPNGVGRPVLEATPCEASWTRDRPVAGEDDLEQATEALDSISLAGKAGDQLGSSSQASPGLLSFSVASASRPGRRNKAAGADPGEGEEGRILLPEGFNPMQALEELEKTGNFLAKGLGGLLEVPEQPRVQPAVPLQCLLHRDMQALGVLLAEMVFATRVRTLQPDAPLWVRFQAVRGLCTRHPKEVPVSLQPVLDTLLQMSGPEVPMGAERGKLDQLFEYRPVSQGLPPPCPSQLLSPFSSVVPFPPYFPALHRFILLYQARRVEDEAQGRELVFALWQQLGAVLKDITPEGLEILLPFVLSLMSEEHTAVYTAWYLFEPVAKALGPKNANKYLLKPLIGAYESPCQLHGRFYLYTDCFVAQLMVRLGLQAFLTHLLPHVLQVLAGAEASQEESKDLAGAAEEEESGLPGAGPGSCAFGEEIPMDGEPPASSGLGLPDYTSGVSFHDQADLPETEDFQAGLYVTESPQPQEAEAVSLGRLSDKSSTSETSLGEERAPDEGGAPVDKSSLRSGDSSQDLKQSEGSEEEEEEEDSCVVLEEEEGEQEEVTGASELTLSDTVLSMETVVAGGSGGDGEEEEEALPEQSEGKEQKILLDTACKMVRWLSAKLGPTVASRHVARNLLRLLTSCYVGPTRQQFTVSSGESPPLSAGNIYQKRPVLGDIVSGPVLSCLLHIARLYGEPVLTYQYLPYISYLVAPGSASGPSRLNSRKEAGLLAAVTLTQKIIVYLSDTTLMDILPRISHEVLLPVLSFLTSLVTGFPSGAQARTILCVKTISLIALICLRIGQEMVQQHLSEPVATFFQVFSQLHELRQQDLKLDPAGRGEGQLPQVVFSDGQQRPVDPALLDELQKVFTLEMAYTIYVPFSCLLGDIIRKIIPNHELVGELAALYLESISPSSRNPASVEPTMPGTGPEWDPHGGGCPQDDGHSGTFGSVLVGNRIQIPNDSRPENPGPLGPISGVGGGGLGSGSDDNALKQELPRSVHGLSGNWLAYWQYEIGVSQQDAHFHFHQIRLQSFPGHSGAVKCVAPLSSEDFFLSGSKDRTVRLWPLYNYGDGTSETAPRLVYTQHRKSVFFVGQLEAPQHVVSCDGAVHVWDPFTGKTLRTVEPLDSRVPLTAVAVMPAPHTSITMASSDSTLRFVDCRKPGLQHEFRLGGGLNPGLVRALAISPSGRSVVAGFSSGFMVLLDTRTGLVLRGWPAHEGDILQIKAVEGSVLVSSSSDHSLTVWKELEQKPTHHYKSASDPIHTFDLYGSEVVTGTVSNKIGVCSLLEPPSQATTKLSSENFRGTLTSLALLPTKRHLLLGSDNGVIRLLA

SEQ ID NO: 62135 - DNA, 5826 bp, Artificial Sequence
  derived and/or modified sequence
atggcccagggcagcggcggcagagagggcgccctgagaacccccgccggcggctggcacagcccccccagccccgacatgcaggagctgctgagaagcgtggagagagacctgagcatcgaccccagacagctggcccccgcccccggcggcacccacgtggtggccctggtgcccgccagatggctggccagcctgagagacagaagactgcccctgggcccctgccccagagccgagggcctgggcgaggccgaggtgagaaccctgctgcagagaagcgtgcagagactgcccgccggctggaccagagtggaggtgcacggcctgagaaagagaagactgagctaccccctgggcggcggcctgcccttcgaggacggcagctgcggccccgagaccctgaccagattcatgcaggaggtggccgcccagaactacagaaacctgtggagacacgcctaccacacctacggccagccctacagccacagccccgcccccagcgccgtgcccgccctggacagcgtgagacaggccctgcagagagtgtacggctgcagcttcctgcccgtgggcgagaccacccagtgccccagctacgccagagagggcccctgcccccccagaggcagccccgcctgccccagcctgctgagagccgaggccctgctggagagccccgagatgctgtacgtggtgcacccctacgtgcagttcagcctgcacgacgtggtgaccttcagccccgccaagctgaccaacagccaggccaaggtgctgttcatcctgttcagagtgctgagagccatggacgcctgccacagacagggcctggcctgcggcgccctgagcctgtaccacatcgccgtggacgagaagctgtgcagcgagctgagactggacctgagcgcctacgagagacccgaggaggacgagaacgaggaggcccccgtggccagagacgaggccggcatcgtgagccaggaggagcagggcggccagcccggccagcccaccggccaggaggagctgagaagcctggtgctggactgggtgcacggcagaatcagcaacttccactacctgatgcagctgaacagactggccggcagaagacagggcgaccccaactaccaccccgtgctgccctgggtggtggacttcaccaccccccacggcagattcagagacctgagaaagagcaagttcagactgaacaagggcgacaagcagctggacttcacctacgagatgaccagacaggccttcgtggccggcggcgccggcggcggcgagcccccccacgtgccccaccacatcagcgacgtgctgagcgacatcacctactacgtgtacaaggccagaagaacccccagaagcgtgctgtgcggccacgtgagagcccagtgggagccccacgagtaccccgccagcatggagagaatgcagaactggacccccgacgagtgcatccccgagttctacaccgaccccagcatcttcagaagcatccaccccgacatgcccgacctggacgtgcccgcctggtgcagcagcagccaggagttcgtggccgcccacagagccctgctggagagcagagaggtgagcagagacctgcaccactggatcgacctgaccttcggctacaagctgcagggcaaggaggccgtgaaggagaagaacgtgtgcctgcacctggtggacgcccacacccacctggccagctacggcgtggtgcagctgttcgaccagccccacccccagagactggccggcgcccccgccctggcccccgagccccccctgatccccaagctgctggtgcagaccatccaggagaccaccggcagagaggacttcaccgagaaccccggccagctgcccaacggcgtgggcagacccgtgctggaggccaccccctgcgaggccagctggaccagagacagacccgtggccggcgaggacgacctggagcaggccaccgaggccctggacagcatcagcctggccggcaaggccggcgaccagctgggcagcagcagccaggccagccccggcctgctgagcttcagcgtggccagcgccagcagacccggcagaagaaacaaggccgccggcgccgaccccggcgagggcgaggagggcagaatcctgctgcccgagggcttcaaccccatgcaggccctggaggagctggagaagaccggcaacttcctggccaagggcctgggcggcctgctggaggtgcccgagcagcccagagtgcagcccgccgtgcccctgcagtgcctgctgcacagagacatgcaggccctgggcgtgctgctggccgagatggtgttcgccaccagagtgagaaccctgcagcccgacgcccccctgtgggtgagattccaggccgtgagaggcctgtgcaccagacaccccaaggaggtgcccgtgagcctgcagcccgtgctggacaccctgctgcagatgagcggccccgaggtgcccatgggcgccgagagaggcaagctggaccagctgttcgagtacagacccgtgagccagggcctgccccccccctgccccagccagctgctgagccccttcagcagcgtggtgcccttccccccctacttccccgccctgcacagattcatcctgctgtaccaggccagaagagtggaggacgaggcccagggcagagagctggtgttcgccctgtggcagcagctgggcgccgtgctgaaggacatcacccccgagggcctggagatcctgctgcccttcgtgctgagcctgatgagcgaggagcacaccgccgtgtacaccgcctggtacctgttcgagcccgtggccaaggccctgggccccaagaacgccaacaagtacctgctgaagcccctgatcggcgcctacgagagcccctgccagctgcacggcagattctacctgtacaccgactgcttcgtggcccagctgatggtgagactgggcctgcaggccttcctgacccacctgctgccccacgtgctgcaggtgctggccggcgccgaggccagccaggaggagagcaaggacctggccggcgccgccgaggaggaggagagcggcctgcccggcgccggccccggcagctgcgccttcggcgaggagatccccatggacggcgagccccccgccagcagcggcctgggcctgcccgactacaccagcggcgtgagcttccacgaccaggccgacctgcccgagaccgaggacttccaggccggcctgtacgtgaccgagagcccccagccccaggaggccgaggccgtgagcctgggcagactgagcgacaagagcagcaccagcgagaccagcctgggcgaggagagagcccccgacgagggcggcgcccccgtggacaagagcagcctgagaagcggcgacagcagccaggacctgaagcagagcgagggcagcgaggaggaggaggaggaggaggacagctgcgtggtgctggaggaggaggagggcgagcaggaggaggtgaccggcgccagcgagctgaccctgagcgacaccgtgctgagcatggagaccgtggtggccggcggcagcggcggcgacggcgaggaggaggaggaggccctgcccgagcagagcgagggcaaggagcagaagatcctgctggacaccgcctgcaagatggtgagatggctgagcgccaagctgggccccaccgtggccagcagacacgtggccagaaacctgctgagactgctgaccagctgctacgtgggccccaccagacagcagttcaccgtgagcagcggcgagagcccccccctgagcgccggcaacatctaccagaagagacccgtgctgggcgacatcgtgagcggccccgtgctgagctgcctgctgcacatcgccagactgtacggcgagcccgtgctgacctaccagtacctgccctacatcagctacctggtggcccccggcagcgccagcggccccagcagactgaacagcagaaaggaggccggcctgctggccgccgtgaccctgacccagaagatcatcgtgtacctgagcgacaccaccctgatggacatcctgcccagaatcagccacgaggtgctgctgcccgtgctgagcttcctgaccagcctggtgaccggcttccccagcggcgcccaggccagaaccatcctgtgcgtgaagaccatcagcctgatcgccctgatctgcctgagaatcggccaggagatggtgcagcagcacctgagcgagcccgtggccaccttcttccaggtgttcagccagctgcacgagctgagacagcaggacctgaagctggaccccgccggcagaggcgagggccagctgccccaggtggtgttcagcgacggccagcagagacccgtggaccccgccctgctggacgagctgcagaaggtgttcaccctggagatggcctacaccatctacgtgcccttcagctgcctgctgggcgacatcatcagaaagatcatccccaaccacgagctggtgggcgagctggccgccctgtacctggagagcatcagccccagcagcagaaaccccgccagcgtggagcccaccatgcccggcaccggccccgagtgggacccccacggcggcggctgcccccaggacgacggccacagcggcaccttcggcagcgtgctggtgggcaacagaatccagatccccaacgacagcagacccgagaaccccggccccctgggccccatcagcggcgtgggcggcggcggcctgggcagcggcagcgacgacaacgccctgaagcaggagctgcccagaagcgtgcacggcctgagcggcaactggctggcctactggcagtacgagatcggcgtgagccagcaggacgcccacttccacttccaccagatcagactgcagagcttccccggccacagcggcgccgtgaagtgcgtggcccccctgagcagcgaggacttcttcctgagcggcagcaaggacagaaccgtgagactgtggcccctgtacaactacggcgacggcaccagcgagaccgcccccagactggtgtacacccagcacagaaagagcgtgttcttcgtgggccagctggaggccccccagcacgtggtgagctgcgacggcgccgtgcacgtgtgggaccccttcaccggcaagaccctgagaaccgtggagcccctggacagcagagtgcccctgaccgccgtggccgtgatgcccgccccccacaccagcatcaccatggccagcagcgacagcaccctgagattcgtggactgcagaaagcccggcctgcagcacgagttcagactgggcggcggcctgaaccccggcctggtgagagccctggccatcagccccagcggcagaagcgtggtggccggcttcagcagcggcttcatggtgctgctggacaccagaaccggcctggtgctgagaggctggcccgcccacgagggcgacatcctgcagatcaaggccgtggagggcagcgtgctggtgagcagcagcagcgaccacagcctgaccgtgtggaaggagctggagcagaagcccacccaccactacaagagcgccagcgaccccatccacaccttcgacctgtacggcagcgaggtggtgaccggcaccgtgagcaacaagatcggcgtgtgcagcctgctggagccccccagccaggccaccaccaagctgagcagcgagaacttcagaggcaccctgaccagcctggccctgctgcccaccaagagacacctgctgctgggcagcgacaacggcgtgatcagactgctggcctag

SEQ ID NO: 62136 - DNA, 5826 bp, Artificial Sequence
  derived and/or modified sequence
atggcacaggggagtggcgggcgggagggcgctttaagaacgccggcgggcgggtggcattccccaccgagccccgatatgcaagagcttctgcggagcgtggagagggacctgagcatagaccccagacagctggcccctgcccctggaggaacgcacgtggtagcattggtaccggctcgctggctcgcctctctgcgcgacagaaggctaccattgggcccttgcccacgcgccgaggggctcggcgaagcagaggtgcggaccctgctacagcggtcagtgcaacgacttccagcaggatggaccagggtggaggtgcacgggctgcgcaagcgacgcctgtcctatccactggggggaggccttccttttgaggacggctcatgcggaccagagaccctgactagattcatgcaagaggtagctgcccaaaattatcgcaacctctggaggcacgcctatcacacctacgggcagccatattctcactctccagcaccatccgcggtccccgctttggactccgtgcgccaggccttgcagagggtgtatggctgctctttcctgcccgtgggagaaacgacccagtgtcccagctatgccagagagggaccatgcccccccaggggcagccccgcttgccccagcctgttacgagcagaggctctgctggaatcacccgaaatgctttacgtcgtccacccctacgtccaattctcgctgcatgatgtcgtgacgttttcccctgcaaagctcacaaattcccaggccaaagtactctttatcctgttccgagtcttgagagccatggatgcctgtcatcgccagggcctggcctgcggtgccctatccctttaccatatcgcggtggacgaaaagctgtgctccgaactgagactggacttgtcagcttacgaacggcccgaggaagatgaaaatgaggaggcccctgtcgccagggacgaagcaggaattgtttcccaggaagaacagggaggacagcccgggcaacccaccggccaggaagaactgagaagtctagtgctggactgggtgcacggacgtatcagtaacttccattatctgatgcagcttaacagactcgcaggcagacggcagggtgatcctaactatcatccagtgctgccctgggtagtcgactttactaccccccatggtcgctttagagacctcagaaagtcaaaattccgtctgaacaaaggagataagcagcttgactttacctacgaaatgacacgccaggcctttgtcgcaggcggcgctggcggaggcgagccgccccacgtcccccatcacatctcggatgtgctctctgatatcacctattatgtctacaaagccagacgcaccccacgaagcgtactttgcggacatgtgagggcacagtgggaaccccatgaatacccagcttccatggaaaggatgcaaaactggacacccgatgaatgcatcccagagttttatactgatcctagcatcttccgaagtatacacccagacatgcctgacttggacgtcccagcatggtgtagttcttcccaggagttcgtagcagctcacagggcactactggagagcagggaagtgtctagggacctgcaccattggatcgatttaacctttggctataagcttcagggaaaggaagctgtaaaggagaaaaatgtctgcctgcatttggtggatgcccatactcacctcgccagctatggcgtcgttcagctctttgatcagcctcacccccaacggttggccggtgcccccgcactggctcctgaaccccctctaatccccaagttgctcgtccagaccattcaggagaccacagggcgtgaggactttactgagaatcccggacagctgccaaatggagtagggcgacccgttctggaagctacaccttgtgaagcttcttggaccagagaccgccccgttgcgggagaagatgaccttgaacaggcaaccgaagctctcgactcaatcagcttggcgggcaaagccggggatcagctggggagcagctcccaggcttctcctgggctcctgtcttttagtgtggctagcgcctcgcgccctggacggcggaacaaagcggctggggctgatccaggagaaggcgaggagggccggatcctgctgcccgaagggtttaaccctatgcaagctctggaggaattagagaagaccggtaactttcttgctaagggtcttggtggtctgttggaagtcccggaacagccgagggtgcagccagcagtccctttgcagtgcctcctgcaccgcgacatgcaggcactgggcgtacttctggccgagatggtctttgctacacgagtgcgtacacttcaacctgacgctcccctgtgggtgagatttcaggcagttcgggggctctgtacacgtcatcctaaggaagttcctgtgtctctccagcccgttctcgatacgctcctccagatgtccggccctgaggtgcccatgggtgcagagaggggcaagctggaccaactgttcgaatacagacctgtttcacagggtctgccgcccccttgccctagtcagcttttgtctcctttctcttccgttgtgccctttcctccgtactttccagccctacataggttcattctcctgtatcaggcgcgacgcgtggaagacgaagctcagggaagggagctggtctttgcactctggcagcagttgggcgctgtactgaaggatattaccccagaaggccttgagattctgctgcctttcgtcctgagcctcatgtctgaggaacataccgccgtctataccgcgtggtacctgttcgagccagtcgcgaaggcgctgggccctaaaaacgctaataagtatctgctgaagccgttgataggtgcctacgagagtccctgtcagcttcacggccgtttttacctgtataccgactgcttcgtggcccagttgatggtccgtttgggcttacaagccttcctgactcacctattaccccatgtactgcaagtgcttgccggcgcggaggcatctcaggaggagtcaaaagatctggcaggcgcggccgaggaggaggagtccggactgcctggcgccggcccgggtagctgcgcattcggagaggagattccaatggacggggagccccccgcttcctcaggattgggattacctgattacacatcaggagtatcctttcatgaccaggcagatctgcccgagaccgaggattttcaggccggactctatgtgactgagtccccccaaccccaggaagccgaggccgtgagcctgggccgtttgtccgacaagagttccacgagtgaaacaagtcttggcgaagagagggccccggatgagggcggcgctccggtggacaagagcagtctgcgtagtggcgattcgtctcaggacttgaagcagtctgaggggagcgaggaggaggaggaggaggaggattcctgtgtggttttggaagaggaggagggcgaacaggaggaggtaacaggtgcgtccgagttgacactctcagatacagtcctgagcatggaaacagttgtcgccggcggctcagggggggatggggaagaagaagaggaggcccttcctgaacagtctgagggcaaggaacagaagatccttctggatactgcctgcaagatggtgaggtggttatcagcaaagcttggtcctaccgttgcctcccgccacgtagcacgtaaccttttgcggctgctgacgagctgctacgttggtcccacacgccagcaattcacagtctctagcggcgagtctccccctctcagcgcgggcaatatttatcagaaaagacctgtgctgggcgacatagtgagcggccctgtgctgagctgtctgctgcacattgccaggctgtatggagagcctgtgttgacctaccaatacttgccttatatctcgtacctggtcgcccctgggtctgctagtggcccttcacggttgaattccagaaaggaggctggactcctggccgccgttacactgacccagaagatcatagtgtatttgtcggatacaaccctcatggatatcctccctcgaatcagtcatgaggtactcctgccagtgttgtcattcttgactagtctcgttacaggcttcccgtccggagcgcaggccaggacaatcctctgtgtgaagaccatctccctgatcgcccttatttgcctacgcataggtcaggagatggtccagcaacatctgtcagagccggtcgcaacattcttccaggtcttttcacagctccacgagctgcgccagcaagatctgaagctggaccccgcgggccggggagagggccagctgccccaggtcgtgttctctgatgggcagcagagacctgtcgacccagcactcctggatgagctgcagaaggtgtttaccttagagatggcttacactatttacgtaccctttagctgccttttgggcgacatcattaggaaaatcatccctaatcacgagctggtcggagaactggctgctctatatcttgagtccatttccccgagcagtcggaatcctgcctcagttgaaccaacgatgcccggtaccggacctgagtgggatccgcacgggggggggtgcccgcaggatgacggtcactccggaacttttggctcagtcctggttggcaatcgcatacaaattcccaacgattctcggcccgaaaacccaggcccattgggccctatatctggggtcggaggtggcggcctcgggagtggatccgacgacaatgcactcaaacaggaattgccgaggagcgtacacggcctgtctggcaattggttagcttactggcagtatgaaattggcgtgtctcagcaggacgctcacttccatttccatcagatcagacttcaatcatttccgggccacagcggagccgtgaagtgtgtggcccctttaagcagcgaagacttcttcctgagcggatccaaagaccgcacagtgaggctgtggccgctctataactatggtgacggaacctccgagacagcacctcgactcgtgtacacccaacatagaaaatctgttttcttcgtgggacagctggaggcccctcagcatgtggtgtcgtgcgatggagctgtccatgtatgggatccattcaccgggaagacattaagaacagtggagccattagactcccgggtccccttgactgcagtggcagtaatgcctgcacctcatactagcatcaccatggcgagctccgactccacactgcgctttgttgattgccgcaaaccgggtttacagcatgaattccgcctagggggaggactgaaccctggtttggttagagccctggccatcagccctagcggtagatccgtggtagctggtttcagctcgggatttatggttttgctcgacacccgtactgggctggtgttaagaggctggcctgcccacgaaggggacattctccaaataaaagcagttgaaggatccgtcctggtctcttcaagctctgatcactctttgacagtgtggaaggagctggaacagaaacctacacaccactacaagtccgccagtgatcccatccatactttcgacctgtatggttctgaggtggtgactggcaccgtgtcaaacaagattggggtgtgttccttgctcgagcctccatctcaggcgaccaccaagttatcttctgagaactttagaggcacgctcacaagccttgctctcttgcctaccaaaaggcatcttctgctgggcagcgataacggggtgatccgcttgctggcgtag

SEQ ID NO: 62137 - DNA, 5826 bp, Artificial Sequence
  derived and/or modified sequence
atggcccagggcagcggcggccgggagggcgccctgcggaccccagctgggggctggcacagcccccccagcccagacatgcaggagctgctgcggtctgtggagcgggacctgagcattgacccccggcagctggccccagcccctgggggcacccacgtggtggccctggtgcctgcccgctggctggccagcctgcgggaccggcggctgcccctgggcccctgccccagggctgagggcctgggggaggccgaggtgaggaccctgctgcagaggtctgtgcagaggctgcctgctggctggaccagggtggaggtgcacggcctgaggaagaggcggctgagctaccccctgggcggcggcctgccctttgaagatggcagctgtggccctgagaccctgacccgcttcatgcaggaggtggccgcccagaactacagaaacctgtggaggcatgcctaccacacctacggccagccctacagccacagccctgcccccagcgctgtgcctgccctggacagcgtgcggcaggccctgcagagggtgtatggctgcagcttcctgcctgtgggggagaccacccagtgccccagctatgcccgggagggcccctgccccccccggggcagccctgcctgccccagcctgctgcgggcagaggccctgctggagagccctgagatgctgtatgtggtgcacccctacgtgcagttcagcctgcatgatgtggtgaccttcagccctgccaagctgaccaacagccaggccaaggtgctcttcatcctcttccgggtgctgcgggccatggatgcctgccaccggcagggcctggcctgtggggccctgagcctgtaccacatcgctgtggatgagaagctgtgcagcgagctgcggctggacctgagcgcctatgaaagaccagaagaagatgaaaatgaggaggcccctgtggccagagatgaggccggcatcgtgtcccaggaggagcagggcggccagcccggccagcccaccggccaggaggagctgcggagcctggtgctggactgggtgcacggccgcatcagcaacttccactacctgatgcagctgaaccggctggccggccggcggcagggcgaccccaactaccaccctgtgctgccctgggtggtggacttcaccacccctcatggccgcttccgggacctgaggaagagcaagttccggctgaacaagggggacaagcagctggacttcacctatgagatgacccggcaggcctttgtggccggcggggccggcggcggggagcccccccacgtgccccaccacatcagtgatgtgctgagtgacatcacctactacgtgtacaaggcccggaggacccccaggtctgtgctgtgtggccacgtgcgggcccagtgggagccccatgagtacccagcctccatggagaggatgcagaactggaccccagatgagtgcatccctgagttctacacagaccccagcatcttccgcagcatccacccagacatgccagacctggatgtgcctgcctggtgcagcagcagccaggagtttgtggccgcccaccgggccctgctggagagccgggaggtgtcccgggacctgcaccactggattgacctgaccttcggctacaagctgcagggcaaggaggccgtgaaggagaagaatgtgtgcctgcacctggtggatgcccacacccacctggccagctatggagtggtgcagctgtttgaccagccccacccccagaggctggccggggccccagccctggcccctgagcccccactcatccccaagctgctggtgcagaccatccaggagaccaccggccgggaggacttcacagagaaccctggccagctgcccaatggagtgggccggcctgtgctggaggccaccccctgtgaggcctcctggacccgggacaggcctgtggccggggaggatgacctggagcaggccacagaggccctggacagcatcagcctggccggcaaggccggggaccagctgggcagcagcagccaggccagccctggcctgctgtccttctctgtggccagcgccagccggcccggcagaagaaacaaggctgctggagctgaccctggagagggggaggagggccgcatcctgctgcctgagggcttcaaccccatgcaggccctggaggagctggagaagacaggcaacttcctggccaagggcctgggcggcctgctggaggtgcctgagcagccccgggtgcagcctgctgtgcccctgcagtgcctgctgcaccgggacatgcaggccctgggcgtgctgctggccgagatggtgtttgccaccagggtgaggaccctgcagccagatgcccccctgtgggtgcgcttccaggccgtgcggggcctgtgcaccaggcaccccaaggaggtgcctgtgtccctgcagcctgtgctggacaccctgctgcagatgagcggccctgaggtgcccatgggcgctgagcggggcaagctggaccagctgtttgagtacagacctgtgtcccagggcctgcccccaccctgccccagccagctgctgagccccttcagctctgtggtgcccttccccccctacttccctgccctgcaccgcttcatcctgctgtaccaggcccggcgggtggaggatgaggcccagggccgggagctggtgtttgccctgtggcagcagctgggcgctgtgctgaaggacatcaccccagagggcctggagatcctgctgccctttgtgctgagcctgatgtctgaggagcacacagctgtgtacacagcctggtacctgtttgagcctgtggccaaggccctgggccccaagaatgccaacaagtacctgctgaagcccctgattggagcctatgagagcccctgccagctgcacggccgcttctacctgtacacagactgctttgtggcccagctgatggtgcggctgggcctgcaggccttcctgacccacctgctgccccacgtgctgcaggtgctggccggggctgaggccagccaggaggagagcaaggacctggccggggctgctgaggaggaggagagcggcctgcctggagctggccctggcagctgtgccttcggggaggagatccccatggatggagagcccccagccagcagcggcctgggcctgcctgactacaccagcggcgtgtccttccatgaccaggccgacctgcctgagacagaggacttccaggccggcctgtatgtgacagagagcccccagccccaggaggccgaggccgtgtccctgggccgcctgagtgacaagagcagcaccagcgagaccagcctgggggaggagcgggccccagatgagggcggggcccctgtggacaagagcagcctgcggagcggggacagcagccaggacctgaagcagagcgagggcagcgaggaggaggaggaggaggaggacagctgtgtggtgctggaggaggaggagggggagcaggaggaggtgactggagccagcgagctgaccctgagtgacacagtgctgtccatggagaccgtggtggccggcggcagcggaggagatggagaggaggaggaggaggccctgcctgagcagagcgagggcaaggagcagaagatcctgctggacacagcctgcaagatggtgcgctggctgagcgccaagctgggccccaccgtggccagccgccacgtggccaggaacctgctgcggctgctgaccagctgctacgtgggccccacccggcagcagttcaccgtgtcctctggagagagcccccccctgtctgctggcaacatctaccagaagaggcctgtgctgggggacatcgtgtctggccctgtgctgagctgcctgctgcacatcgcccggctgtatggagagcctgtgctgacctaccagtacctgccctacatctcctacctggtggcccctggcagcgccagcggccccagccggctgaacagcaggaaggaggccggcctgctggccgctgtgaccctgacccagaagatcatcgtgtacctgagtgacaccaccctgatggacatcctgccccgcatcagccatgaggtgctgctgcctgtgctgtccttcctgaccagcctggtgacaggcttccccagcggggcccaggcccggaccatcctgtgtgtgaagaccatcagcctgattgccctgatctgcctgcgcatcggccaggagatggtgcagcagcacctgtctgagcctgtggccaccttcttccaggtgttcagccagctgcacgagctgcggcagcaggacctgaagctggaccctgctggccgcggggagggccagctgccccaggtggtgttcagtgatggccagcagaggcctgtggaccctgccctgctggatgagctgcagaaggtgttcaccctggagatggcctacaccatctacgtgcccttcagctgcctgctgggggacatcatcaggaagatcatccccaaccacgagctggtgggggagctggccgccctgtacctggagagcatcagccccagcagcaggaacccagcctctgtggagcccaccatgcctggcaccggccctgagtgggacccccatggaggcggctgcccccaggatgatggccacagcggcacctttggatctgtgctggtgggcaaccgcatccagatccccaatgacagcaggccagaaaatcctggccccctgggccccatcagcggcgtgggcggcggcggcctgggcagcggcagtgatgacaatgccctgaagcaggagctgcccaggtctgtgcacggcctgagcggcaactggctggcctactggcagtatgaaattggagtgtcccagcaggatgcccacttccacttccaccagatccggctgcagagcttccctggccacagcggggctgtgaagtgtgtggcccccctgagcagcgaggacttcttcctgagcggcagcaaggacagaacagtgcggctgtggcccctgtacaactatggagatggcaccagcgagacagccccccggctggtgtacacccagcacaggaagtctgtgttctttgtgggccagctggaggccccccagcacgtggtgtcctgtgatggagctgtgcacgtgtgggaccccttcaccgggaagaccctgaggacagtggagcccctggacagccgggtgcccctgacagctgtggccgtgatgcctgccccccacaccagcatcaccatggccagcagtgacagcaccctgcgctttgtggactgcaggaagccaggcctgcagcacgagttccggctgggcggcggcctgaaccctggcctggtgcgggccctggccatcagccccagcggccgctctgtggtggccggcttcagcagcggcttcatggtgctgctggacaccaggacaggcctggtgctgcggggctggccagcccatgaaggagacatcctgcagatcaaggctgtggagggctctgtgctggtgagcagcagcagtgaccacagcctgactgtgtggaaggagctggagcagaagcccacccaccactacaagagcgccagtgaccccatccacacctttgacctgtatggcagcgaggtggtgacaggcaccgtgagcaacaagattggagtgtgcagcctgctggagccccccagccaggccaccaccaagctgagcagcgagaacttccggggcaccctgaccagcctggccctgctgcccaccaagaggcacctgctgctgggcagtgacaacggggtcatccggctgctggcctag

SEQ ID NO: 62138 - DNA, 5826 bp, Artificial Sequence
  derived and/or modified sequence
atggcccagggcagcggcggccgggagggcgccctgcggacccccgccggcggttggcacagtcccccgtctcccgatatgcaggagctactgcgcagcgtggaacgagacctgtccattgaccccagacagctggccccagccccaggaggcacccacgtagtcgctctggtgcccgctcggtggcttgcaagcctccgcgaccgaaggctccctctgggcccttgcccaagggcagaagggctcggggaagccgaggtgcgaactttgctacaaaggagcgtccagaggctcccagcaggatggaccagggtcgaggtgcatggtttgaggaagcgcaggttgtcctatccactcggaggaggtctcccctttgaggacggctcgtgcggcccggagacccttaccaggttcatgcaggaggtggctgctcagaactaccggaacctttggagacacgcctaccatacttacgggcaaccttactctcattcccctgccccctcggctgttccagccctggactctgtgcgccaggcgctgcagcgggtgtacggctgctcctttctgccggtaggcgaaaccacccaatgcccaagctacgcccgcgaagggccttgtccccccagagggtctcccgcctgtccatctctcctgagagccgaggctttgctagagtctcccgagatgttgtacgtggtccatccatacgttcagtttagtcttcacgacgttgtgacattcagcccagctaaactgacgaattcccaggctaaggtcttatttattctattccgggtattgcgggcaatggatgcttgccatagacagggcctggcttgcggcgcgctgagtctgtatcacatagcagtcgacgagaagctgtgtagcgaactccgtctggacctgtcagcatacgagagaccagaggaagacgaaaatgaagaggcacccgtggcacgggatgaggccggaattgtttctcaggaagagcagggaggacagccgggccagcctacaggccaggaagagctacggtcactcgtgctggattgggtgcacgggcggatttccaacttccattacctgatgcaactaaacaggttggcagggcggcgacaaggtgatcccaattaccatcctgtactcccatgggtggtcgacttcactacaccacatggcagattccgggatttgcgcaagtccaagttcaggctaaacaaaggggacaagcaactcgatttcacatacgagatgaccagacaggcgtttgtggctggtggcgcagggggtggcgaacctccacacgttcctcatcacatatccgacgtactgagcgatatcacctactatgtctacaaggcccggaggaccccaaggagtgtgctctgcggccacgtcagggcccagtgggagccacatgagtatcccgccagcatggaacggatgcagaactggacccctgatgagtgtatccccgaattctacacagatccctcgatattccgctctattcacccagacatgccggatctggatgttccagcatggtgtagcagttcccaggaattcgtggctgcgcatagggccctgctagaatccagagaggtatctcgagatctccatcattggattgatcttaccttcggatacaaacttcagggaaaagaggctgttaaagaaaagaacgtctgtctgcacctcgtggacgcacacacccacctggcctcttacggggtagtgcagctatttgatcagccgcaccctcagagattggcaggggccccagctctggcccccgagcccccgctgatcccaaagctccttgtgcaaaccattcaggagactacagggcgcgaggacttcacagagaatccggggcagctccccaacggggtggggaggcccgtattggaagctactccgtgtgaagcttcttggacaagggaccgccccgtggcgggtgaggatgatttggaacaagctactgaggcactcgatagcattagtcttgctggcaaagccggggaccagctgggctcgagctcccaggcctcacccggtctgttgagcttcagtgtcgcatctgcttcacgacccggccgaaggaacaaagctgctggggccgatcctggggagggcgaggaaggtcgaattttactgcccgagggtttcaaccccatgcaggctctcgaagagttggagaagactggtaacttcctggcgaagggtcttggcggcttgcttgaggtgcccgaacaaccacgggtccagccagccgtacctctacagtgtttgcttcaccgcgacatgcaggcactgggcgtgctgctggctgaaatggtgtttgccactagggtcagaacgctgcagcctgatgcgcccttgtgggtgcggtttcaggccgttaggggcctttgcacaagacatcctaaggaggtgccggtttcgcttcaaccagtcctcgatacattgttgcagatgagcggtcccgaggtcccaatgggcgccgaacgcggcaagctggatcagctattcgaatacaggcctgtctcgcaggggctcccacccccctgtccatcacagcttcttagccctttctcatccgtggtcccgtttcccccatatttccccgctctgcacagatttatccttctctaccaggccaggagggtggaggatgaggcacagggtcgggaactggtgttcgccctctggcaacagctcggagctgtgttaaaagacatcactcctgaagggttggagattctgttgcccttcgtcctgtccctgatgtccgaggaacacaccgcagtatacaccgcttggtacctttttgagcccgtggcaaaggccctgggccccaagaatgctaataaatatttactgaagcccttgattggcgcttacgaatctccttgtcagctgcacggccgtttttatctctatactgactgcttcgtcgcacagctgatggtccggttaggcctccaggctttcttgactcatctccttccccacgtcctgcaggttctagccggggcagaagctagccaggaggaaagcaaagacttggccggagcagcggaagaggaagagtccgggttacccggtgccggccccgggtcttgcgcgttcggggaggagattccaatggatggggagccacctgccagctccggtcttggcctcccagattacacatcgggcgtgtccttccatgaccaggccgacttgcctgaaactgaagacttccaggctgggctctatgtcaccgagagtcctcagccacaggaggccgaggccgtctccctcggccgactgagtgataagagttctactagcgaaaccagcctgggcgaagaaagagctcccgatgagggaggcgccccagtcgataaatccagccttagaagcggagattccagtcaggacctgaagcagtctgagggttccgaggaggaggaggaagaggaggatagttgtgtggtcctggaggaagaggaaggagagcaagaggaagtcacaggtgctagcgagctcaccctttccgacaccgtgctgtcgatggaaaccgtggttgccggtggctccggaggagatggggaagaggaggaggaggctctaccggaacagtccgaagggaaggagcaaaagatccttctggataccgcctgcaaaatggttagatggctatctgcaaaactgggccccaccgtggcttctagacacgttgcgcgcaatctactgcggttgctgacttcgtgttacgtgggccctacacggcagcagtttacagtgagtagtggggagtccccgccgctttctgccgggaatatctaccaaaagagaccagtgttaggagatatcgtcagtggcccggttttgagttgccttctgcatattgcccggctgtacggcgagccagttctgacataccaatacctgccttacatatcctatttggtagcccctggatcggcctccgggccctccaggctgaacagccgcaaagaggccgggttattagctgcagttactctaactcagaaaatcatcgtatacctttccgatacaacattaatggatatcctgcctcgcatcagtcacgaggtgttgctgccagtcctgtcttttttaacttctctggtgacaggatttccctctggtgctcaagcccgcaccatcctgtgtgtaaagactatatccttgattgctctaatttgtctccgaattggccaggagatggttcagcagcaccttagcgagcctgttgctaccttcttccaggtgttttcccagctgcatgagctgcggcagcaggacctgaaattggaccccgctggtcgcggcgaaggtcagctcccgcaggtagtattttcggatggacaacagcggcccgtcgaccctgcgcttctagatgagctgcagaaggtatttactctagaaatggcatatacaatctacgtccccttttcttgccttctcggcgatattattcggaagatcatcccaaaccacgaactcgtcggtgagctagcggccctgtatctggagtccatctcgcccagcagtaggaaccctgccagtgttgagccaactatgccgggcacaggacccgaatgggacccccatggggggggctgccctcaggacgacggccacagcgggactttcgggtcagtgttggtgggcaacagaatccagattccaaatgactccagacccgagaaccctggtccgctgggcccaatcagtggagttggtgggggcggtcttgggagtggttctgatgacaatgccctgaaacaggagctgccaagatcagttcatggtttatcaggaaactggctggcatactggcaatacgaaatcggggtttcccagcaggacgcccatttccactttcatcaaattcgcttacagtcatttccgggccactccggtgctgtcaaatgtgtggccccactgtcgtctgaagatttctttctgtcaggttctaaggacagaacggtgaggctgtggcctttgtacaattacggagatgggacctctgaaaccgcccctcggctagtgtacactcagcacaggaagtctgttttttttgttggccaattggaggcaccgcagcacgtggtgagctgcgatggcgcggtacatgtttgggacccgttcaccggaaagacattacgaacagttgagcccctcgattctagggtgcctctgaccgcagtagcagttatgcctgctccccacacttccattaccatggcctcttctgactctactctgaggttcgtggactgtagaaaacctggtctccaacacgagtttagactgggcggagggctaaaccccggcctggttcgtgcgctggctatttcaccaagtgggaggagcgtggtggcgggcttcagttccggctttatggtgctgctagacacacgcacaggtcttgtgctccggggctggcctgcacacgagggagacatcctgcagattaaggcagtggaaggcagcgtgctggtgtcaagtagcagcgaccatagcttaacagtttggaaggaacttgaacagaagccaacccatcattataaaagcgcgagtgatcccatacacacatttgacctgtatggaagcgaggttgtcaccggaacagtgtcaaacaaaatcggcgtgtgcagcctcctggaacctccatcccaggctactactaaattgagcagcgagaacttcagaggaactcttacctcccttgcgttgctacctaccaagagacatctgctgctgggcagcgacaatggggtaataagattgttggcctag

SEQ ID NO: 62139 - DNA, 5825 bp, Artificial Sequence
  derived and/or modified sequence
atggcacagggaagtggcggtagagagggcgctctgcgaactcctgccggaggttggcattcacctccctcgccagatatgcaggaactcctcaggagcgtcgagagagacctgagtattgatccacggcagttagctccagccccaggaggaactcacgtggtcgccctagtgccggctagatggctcgcttctctgcgtgatcggaggctgcctctcggaccctgccctcgtgccgaaggtctcggggaggcagaagtccggacgctgctgcaaagatctgtccaacgtctacctgcaggctggactcgcgttgaagtgcacggcttgcggaagcgtcgtttatcatatcccttgggtggcggactaccctttgaggatggctcttgtggaccagaaaccctgacacgatttatgcaagaagtggccgctcagaattacaggaatctttggcggcatgcttatcacacatacggccagccttacagccacagcccagcccctagtgctgttcccgcactggacagtgtgcggcaagccctgcagcgagtctatgggtgttcttttcttcctgtcggggaaacaacccagtgtccatcgtacgcacgcgagggcccttgcccacctagagggagccccgcttgtccgtcgctgctccgagcagaagctctgctagaaagtccagagatgctgtacgtcgtacacccatacgttcagttcagcctgcatgacgttgtcacatttagtcccgctaagcttaccaactcccaggctaaggtacttttcatcctgttccgggtgctgagggctatggacgcttgtcaccgacaggggttagcatgtggggcactcagcctgtaccatatagcggtggatgaaaaactctgcagtgaattgcggctggatctcagtgcgtacgagcgacctgaggaggacgagaatgaggaggcccctgtggccagagatgaggctgggatcgtgtcgcaggaagaacagggcggacaaccaggccagcccactggacaagaagagctcaggtcccttgtgctagactgggtgcacgggcgaatctccaatttccattacctgatgcaacttaatcgcctggctggccgaagacagggtgaccccaattatcatcccgttctgccgtgggtcgtagatttcacaaccccccatggtaggttcagggaccttcggaaaagcaagttccgtctgaataagggcgacaagcagcttgatttcacatatgagatgacaaggcaggcctttgtagcaggaggcgcaggtggtggcgaaccaccccacgtaccacaccatatatcagacgtgctctctgatattacttactacgtctacaaagcacgacgaacccctcgcagcgtactctgcgggcacgtccgcgctcagtgggagccacatgaatatccggctagcatggaaagaatgcagaactggaccccggatgaatgcatcccggagttctatacggatccgagtatctttagatccatccacccggacatgcctgacttggacgtaccggcttggtgttcctcgagtcaggagtttgttgctgctcaccgggctttgttggaatcccgagaggtaagccgtgacctgcatcactggatagatcttacctttgggtataagctgcagggaaaagaagctgtgaaggaaaagaacgtgtgcctgcacttggttgatgctcacacacatcttgcgagttatggcgttgttcaattgtttgaccagccccacccgcagaggctggcaggtgcgccagctttagctccggaaccccctctcattcccaagttgcttgtccagacaatacaggagaccacaggaagggaggatttcaccgaaaatccaggacaactgcctaacggcgtgggcagacccgtgcttgaggccaccccttgtgaagcttcctggacaagggaccgcccagtggcaggagaggatgatcttgaacaggctacagaggccctggactctatcagccttgctggcaaagccggagatcagttgggatcaagctcacaagcttctccaggcttgctcagcttttcagtcgcatctgcctccagaccaggtagaagaaataaggctgcgggtgctgacccgggtgaaggagaggaaggtcgtatcctgctgcctgaaggatttaaccccatgcaggccctggaagaactggagaagaccggtaacttcttagctaaaggccttgggggtctgctggaggtgccagagcagccccgagtgcagccagcagtacctctgcaatgcctgctccacagggacatgcaggccttgggcgtgctgttggcagaaatggtcttcgcaacacgggtgcggactctgcagccagacgcgccattgtgggtgcgtttccaggcggtccggggactgtgcacgcgccaccctaaggaggttcccgtgtccctacagccagtgttggacaccctgttacaaatgtccgggccagaggtacctatgggggcagaaaggggcaaattggatcagctcttcgaatacaggcctgtaagtcagggtttgccacccccatgccctagtcagctgctttcgccatttagttcagtcgtgcctttccctccatacttccccgcactccacagattcatcctgctgtatcaggcgcgaagagtggaagacgaggcccaagggcgagaactggtgttcgccctgtggcagcagctcggcgctgtgttgaaggacattaccccggagggcctcgaaattctgctcccctttgtgctttccctaatgtcagaagagcacacggccgtctacaccgcctggtacctctttgagcctgtagcgaaagcactgggccctaaaaatgcaaataagtacctgctaaagccactgatcggcgcatatgagagcccttgtcagctgcacggcagattttacttgtataccgactgcttcgtcgcccagctgatggtgagactcggactccaggcctttctgacccacctgctgccacacgtcctgcaggtcttagcaggcgcagaagcctcacaagaagaaagcaaggatctggctggggctgcggaagaggaggagtcagggttgccaggggcaggcccaggcagttgcgccttcggggaggagatccctatggacggcgagcctccggcaagtagtggcctagggctgcccgattacacatcgggcgtgtcgtttcacgaccaggcagatctgcctgaaactgaggattttcaagccggtctgtacgtgacagagtcaccacagcctcaggaggcagaggccgtctcactgggtcgcctcagcgacaaaagctccacatcagaaacttccttgggcgaagaacgagcgcctgatgaggggggagctccagtagacaagagctcattgaggagcggggatagctcccaggacctcaagcaaagtgaagggtccgaggaggaagaggaagaggaggactcctgtgtcgtgctggaagaggaggaaggggagcaggaggaggtgacaggggcttccgagctgactctgagcgataccgtcctttctatggaaacagtagttgctgggggatcaggaggggatggcgaggaggaagaggaagctctgccagagcaaagcgaaggaaaggagcagaagattctgctggatacagcttgtaaaatggtgagatggttatctgccaagctgggacctacagtggcgagtcggcacgtagccagaaacttgctgaggctcctcacgtcttgttatgtagggccaacacgccagcagttcacggtctcaagtggcgagtcacccccactgagcgccggtaacatttatcagaaacgaccagtgttaggagacattgtgtcaggccctgtgctgtcatgcctgttgcatatcgccagattgtatggagagccagtgctcacctatcagtatctgccatatatttcttacctcgtggctcctggcagcgcttctgggccaagcaggttgaactcccgcaaggaagcaggcttgctggccgcagtgaccctgacccagaagatcattgtgtacctttcagacacgaccttaatggatatacttccaaggatctcacatgaagtattactgcctgtgttgtcttttttaacgtccctcgtgacgggcttccctagcggggcacaggctagaacgatcctatgcgtcaaaactatcagcctaattgctctaatctgcctgaggatcggacaagagatggtgcaacagcacctgtcagagcctgtcgctacgttctttcaggtgttctcccagcttcacgaactcaggcagcaggatctaaagctggacccagctggacgaggggaagggcaactgccgcaggtggtttttagcgatggtcaacagaggcccgtcgatcccgctttgctggacgagctgcaaaaggtgtttacactggagatggcctacaccatctacgttccattcagctgcttgctgggagatataatccgaaaaatcattcctaaccacgaactggtcggcgagctggccgcactttacctagagtcaatatccccaagttctaggaacccggcttctgtggaacccaccatgccaggcacaggccctgaatgggacccccatggcggtgggtgccctcaagatgatggccactcggggactttcgggagcgtactggtgggcaacaggattcaaattcctaacgactccaggcctgaaaatcctggtccactcggacctatctctggcgtcggcggtggaggcttgggtagtgggagtgacgacaacgccttaaagcaggaactgccaaggtctgtgcacggcctatctggaaactggttggcttactggcagtacgagatcggagtgagtcaacaggacgcgcactttcacttccaccagattaggctgcagagctttcctggtcattccggcgcagtgaaatgcgtggctcccctctcgagtgaagattttttcctgtctggtagtaaggataggactgtccggctctggcccctgtacaactacggggacggcaccagtgaaaccgcgcctcgtctggtctatacacaacaccggaaatctgtgttttttgtaggccaactcgaggctccgcagcacgtagtgagttgcgacggtgctgtccatgtatgggatccatttacgggcaagacactccgaaccgtggagcccttggatagccgggttcccctaacagctgtagctgttatgccagcaccccatacctcaatcacaatggcgtcgtctgactcgacactccggttcgtcgattgtcgcaagcctggactccagcacgagtttcgcctaggaggcggtctcaaccccggactggtgcgcgcactagccatttcccctagcggcagaagtgtcgtggccggattctcgtccggcttcatggttcttttggacactcggacaggactggtccttcgcggatggccagcccacgagggtgacatcctgcagatcaaggccgttgaagggtctgtgctagtgtccagttccagtgaccacagtctcactgtatggaaggagctcgagcagaaacccacgcatcactacaagtccgcctcagatcctatccatacgtttgatctgtacggctctgaagtggtgacaggtacggtgtctaacaaaattggggtgtgtagcctcctcgagccgccttcccaggctacgacgaagcttagctccgaaaacttcaggggcacgctgacatctttagccctactgccgactaaacgccatctactcctgggaagcgacaatggcgtgatccggctgctcgcata

SEQ ID NO: 62140 - DNA, 3794 bp, Artificial Sequence
  derived and/or modified sequence
aaagagcaggcgaaagccacggcgtctgcgtttgcaatgcatgctggtccgtgtagttctcagcctgacaccgtcgttcccagaacccagcgcgctctgtgctggcgggcgcagaggcctcccaggaggagagcaaggacctggcaggggctgctgaggaggaggagagcgggctgcccggggccgggcctggctcctgtgcttttggggaggagattcccatggatggggagcctcctgcctcctcgggcctggggctcccagactacacgtctggcgtcagcttccacgaccaggctgacctccctgagacagaggacttccaagccgggctctatgtgactgagtctccccagccccaggaggctgaggctgtgagcctgggccggctgagtgacaagagcagcaccagcgagacctccctgggtgaggagcgggctccagacgaggggggtgcccccgtggacaagagcagccttcgatcaggtgacagcagccaggacttgaagcaaagcgagggctccgaggaggaagaggaggaggaggacagctgcgtggtgctagaggaggaggagggggagcaggaggaggtcaccggggcatctgagctcactctgtctgacacggtgctgtccatggagacggttgtggccggcggcagtgggggagatggagaagaagaggaggaggcactgcctgagcagtcagaaggcaaagaacagaagatcctccttgatacagcctgcaagatggtccgctggctgtctgccaagctcggccccacagtggcctctcgccacgtggcccggaacctgctccgcctgctgacgtcttgttatgttggacccactcggcagcagttcacagtgagcagtggcgagagcccaccgctgagcgccggcaacatctaccagaagaggccggtcctgggcgacatcgtgtcagggcctgtgctcagctgcctcctccacatcgcccgcctgtatggggagcctgtcctcacctaccagtacctgccctacatcagctacctggtggccccagggagtgcctcaggccccagccgactgaacagccgtaaggaggcggggctgctggccgcggtgacgctgactcagaagatcatcgtgtacctctcagacaccacactcatggacatcctgccccggatcagccatgaggtcctgctgcccgtgctcagcttcctcacctccctcgtcacggggttcccaagtggggcccaggctcggaccatcctgtgtgtgaaaaccatcagcctcatcgccctcatctgcctgcgcattggacaggagatggtccagcagcacctgagcgagcccgtggccacctttttccaggtcttctctcagctgcatgagcttcggcaacaggatctgaagctggaccctgcgggccgtggtgagggccagctgccacaggtggtcttctctgatgggcagcagcggcccgtggaccccgccctgctggacgagctgcagaaggtgttcaccctggagatggcatacacaatctacgtgcccttctcctgcctgttgggtgacatcatccggaaaatcatccccaaccacgagctggttggggagctggcggcgctgtacttggagagcatcagccccagcagtcgcaaccctgccagcgtggagcccaccatgcccggcaccgggcccgagtgggacccccatggtgggggctgccctcaggatgacggccactcagggacctttgggagcgtcctggtggggaaccgcattcagatccccaatgactctcggcctgagaaccccggaccactgggccccatctcgggggtgggtggcgggggcctgggcagcgggagcgacgacaacgccctgaagcaggagctgccgcggagcgtgcacgggctgagcggaaactggctggcgtactggcagtacgagatcggcgtgagccagcaggatgcccactttcacttccaccagatccgcctgcagagcttcccgggccactcgggggccgtcaagtgcgtggcacccctaagcagcgaggacttcttcctgagcggcagcaaggatcgtaccgtgcgcctctggccgctgtacaactacggcgacgggaccagcgagacggccccacgcctcgtctacacccagcaccgcaagagcgtcttcttcgtgggccagcttgaggccccgcagcacgtggtgagctgtgacggggctgtgcacgtctgggaccccttcacagggaagacccttcgcacagtggagccgctggacagccgggtgcccctgactgcggtggctgtcatgcccgccccccacaccagcatcaccatggccagctctgactctaccctgcgctttgtggactgcaggaagcctggtctgcagcacgagttccgactgggcggtgggctgaaccctgggcttgtccgtgccctggccatcagccccagtggccgtagtgtcgtggccggcttctcctcaggcttcatggtgctcctggacacccgcacaggcctggttctgcgaggctggccagcccacgagggggacattctgcagatcaaggcggtggagggcagcgtcctggtcagctcctcctctgaccattccttgaccgtctggaaggagctggagcagaagcccacccatcactacaagtcagcatccgaccccatccacacctttgacctgtacggcagcgaggtggtcactggcaccgtgtccaacaagattggcgtctgctccctgcttgagccaccctcgcaggccaccacgaagctcagctctgagaacttccgcggcacgctcaccagcctggccttgctgcccactaaacgccacctcctgctgggctcagacaacggggttatccgcctcctggcatagactgaggcaggagctggccgggcaagggtgggaagacatctgcgggcgcgtgtccactcaccctgttccctgagcagcagctccctccagggaggccctgggtcccacgccctgggtgcccacatggcctgccaactagggcctgcaaatggagtgggggagtcctggcccctgaatcaccagagccaccaagcctgccagaggggtctcattcatggcttggggacacagggctcctagcaagcaggaagttaagagcaggaggaagcgttgctaccttcacttctccccagctctgccctctgggtccacatgaggacagggaagctcgggaaggggaagggagactggccctgcccagccggtctctagcccctcagcccccgctgggcactctctgtcccatccctctaggacagggaagctggcctggtccagggcactgatggtgcttggattccagcctaaggaaggctggccgtggtccaggagttaagggcttgggtctggggtttaagtggccacccatccaggccctggccagtgtgggaccgggacgggaaggaagaaggaggctaggagcagggggaaaaggtgcacttggccagtggcgcctgccaggagtgagtccatgcgttgtctgcccacccctaccacagtgtttgtgccttcagctgagggggcagcctctgggccctgaacccctgctggggctccacgaccctgagagaaggggtgagaagaatcatctctgcacctcgggtctctgccagaggaagacttaagcatccctgcgacctcacattctagacagagatgaggtccaggggttggcccctgctgccttctcacaatttgcaatagatgtaaataggaccaataaatcctttggaagagcca

SEQ ID NO: 62141 - DNA, 6733 bp, Artificial Sequence
  derived and/or modified sequence
atggcccagggcagcggggggcgggaaggcgctctcagaaccccggccgggggctggcattccccgccaagcccagacatgcaggagctgctccggagcgtggagagggacctgagcatcgatcccaggcagctggctccggccccggggggcacccacgtggtggccctagtgcctgcgcgctggctggccagcctccgcgatcgccggctgcccctgggaccctgtccccgcgcagagggcctgggagaagcggaagtcaggactctcctgcagcgctctgtgcaaaggctgcctgccggctggacgcgcgtggaggtgcatgggctgcggaagcggagactgtcctaccctctgggcgggggcctgccctttgaggacgggtcctgcggccctgagaccctcactcgcttcatgcaggaggttgccgcccagaattatcgcaacctgtggcgccatgcataccacacttacggccagccgtacagtcacagccctgccccctcagctgtccctgccttggactcagtacggcaggctctgcagagggtctatggttgctccttcctgccagtgggtgaaactacccaatgcccttcatatgccagagaaggcccctgcccccctcggggcagccctgcttgccctagtcttttacgggctgaggccttgctggagtcgccggagatgctgtatgtggtacacccttacgtacagttctccctacatgacgtggtcaccttcagccctgccaagctgaccaacagccaggccaaggtgctgttcattctcttccgcgtgctgagggctatggacgcctgtcaccgccaggggctggcgtgtggggccctgtctttgtatcacatcgcagtggatgagaagctttgcagcgagctgcgactggacctgagtgcttatgagaggcccgaggaggacgagaatgaggaggcccctgtggcaagggatgaggcgggcattgtgtctcaagaggagcagggagggcaacctgggcaacccactggccaggaggaacttcggagcctcgtgctagattgggtccacggccgcatcagcaacttccactacctcatgcagctgaatcggttggcaggtcggcggcagggggaccccaactaccaccccgtgctgccctgggtggtggacttcactacgccccatgggcgcttccgagacctgcgcaagtccaagttccgcctcaacaagggggataagcaactggacttcacgtatgagatgacacggcaggcattcgtagcaggcggggcgggcggcggggaaccccctcatgttccccaccacatctcagacgtgctctccgacatcacgtactatgtgtacaaggctcggcgcacgcctcggtcggtgctctgcggacacgtccgcgcgcagtgggagccccatgagtatccggccagcatggagcggatgcagaactggaccccggatgagtgcattccggagttctacaccgatccctctatcttccgctccatccaccccgacatgcctgacctggatgtgccagcctggtgcagctccagccaggagttcgtagctgcccaccgagccctgctggagagccgcgaggtatcccgggacctgcaccattggatcgacctcacgtttggctataaactccagggtaaggaggctgtcaaggaaaagaatgtgtgtctgcacctggtggacgcccacactcacctggccagctacggggtggtgcagctcttcgatcagccacacccccagcgcctggctggggctcctgcccttgcccccgagcctcccctcatccccaagctgttggtccagaccatccaggagaccacaggccgggaggacttcacggaaaacccgggacagcttccaaatggagtgggccggccagttttagaggccactccctgtgaggctagctggaccagagacaggccggtggcaggagaagacgacttggaacaggccacagaagctctggattccatttcccttgctgggaaagcaggtgaccagctgggctcctccagtcaagcgtcccctggacttctctctttctcagtggcctcagcctcccgtccaggccgcaggaataaagctgctggggcagaccctggggagggtgaggaggggaggattcttcttcccgagggcttcaatcccatgcaggccctggaggagctggagaaaacgggcaacttcttggccaaaggcctagggggcctgttggaggtgcctgagcagccccgggtccagccggctgtgccactgcagtgcctactccacagggacatgcaggcgctgggtgtcctattggcagagatggtgtttgccaccagggtgcggacgctgcagcccgatgcacctttgtgggtacgcttccaggctgtccgagggctctgcacgcgccaccccaaggaggtccctgtgtctttgcagcccgtgctggacacactcctgcagatgagtggccccgaagtccccatgggagcagagaggggcaagctggaccaactgtttgagtacaggcctgtctcccagggcctgcccccaccctgcccaagccagcttctcagccccttcagctccgtggttcccttcccaccctacttcccggcactgcacagattcatcctcctgtaccaggcaaggcgtgtggaggacgaggcccaggggcgcgagctggtgtttgctctgtggcagcagctgggcgcggtgctgaaggacatcacccctgagggcctggagatcctgctgcccttcgtgctctcactcatgtccgaggagcacacagctgtgtacacggcctggtatctgtttgagcctgttgccaaggcactgggccccaaaaatgccaataagtacctcctgaagccgctcattggtgcctacgagagcccctgccagctacacggccgcttctacctgtacacggactgctttgtggcccagctgatggtgcggctgggcctgcaggcatttctcactcacctgctgccccatgtcctgcaggtgctggcgggcgcagaggcctcccaggaggagagcaaggacctggcaggggctgctgaggaggaggagagcgggctgcccggggccgggcctggctcctgtgcttttggggaggagattcccatggatggggagcctcctgcctcctcgggcctggggctcccagactacacgtctggcgtcagcttccacgaccaggctgacctccctgagacagaggacttccaagccgggctctatgtgactgagtctccccagccccaggaggctgaggctgtgagcctgggccggctgagtgacaagagcagcaccagcgagacctccctgggtgaggagcgggctccagacgaggggggtgcccccgtggacaagagcagccttcgatcaggtgacagcagccaggacttgaagcaaagcgagggctccgaggaggaagaggaggaggaggacagctgcgtggtgctagaggaggaggagggggagcaggaggaggtcaccggggcatctgagctcactctgtctgacacggtgctgtccatggagacggttgtggccggcggcagtgggggagatggagaagaagaggaggaggcactgcctgagcagtcagaaggcaaagaacagaagatcctccttgatacagcctgcaagatggtccgctggctgtctgccaagctcggccccacagtggcctctcgccacgtggcccggaacctgctccgcctgctgacgtcttgttatgttggacccactcggcagcagttcacagtgagcagtggcgagagcccaccgctgagcgccggcaacatctaccagaagaggccggtcctgggcgacatcgtgtcagggcctgtgctcagctgcctcctccacatcgcccgcctgtatggggagcctgtcctcacctaccagtacctgccctacatcagctacctggtggccccagggagtgcctcaggccccagccgactgaacagccgtaaggaggcggggctgctggccgcggtgacgctgactcagaagatcatcgtgtacctctcagacaccacactcatggacatcctgccccggatcagccatgaggtcctgctgcccgtgctcagcttcctcacctccctcgtcacggggttcccaagtggggcccaggctcggaccatcctgtgtgtgaaaaccatcagcctcatcgccctcatctgcctgcgcattggacaggagatggtccagcagcacctgagcgagcccgtggccacctttttccaggtcttctctcagctgcatgagcttcggcaacaggatctgaagctggaccctgcgggccgtggtgagggccagctgccacaggtggtcttctctgatgggcagcagcggcccgtggaccccgccctgctggacgagctgcagaaggtgttcaccctggagatggcatacacaatctacgtgcccttctcctgcctgttgggtgacatcatccggaaaatcatccccaaccacgagctggttggggagctggcggcgctgtacttggagagcatcagccccagcagtcgcaaccctgccagcgtggagcccaccatgcccggcaccgggcccgagtgggacccccatggtgggggctgccctcaggatgacggccactcagggacctttgggagcgtcctggtggggaaccgcattcagatccccaatgactctcggcctgagaaccccggaccactgggccccatctcgggggtgggtggcgggggcctgggcagcgggagcgacgacaacgccctgaagcaggagctgccgcggagcgtgcacgggctgagcggaaactggctggcgtactggcagtacgagatcggcgtgagccagcaggatgcccactttcacttccaccagatccgcctgcagagcttcccgggccactcgggggccgtcaagtgcgtggcacccctaagcagcgaggacttcttcctgagcggcagcaaggatcgtaccgtgcgcctctggccgctgtacaactacggcgacgggaccagcgagacggccccacgcctcgtctacacccagcaccgcaagagcgtcttcttcgtgggccagcttgaggccccgcagcacgtggtgagctgtgacggggctgtgcacgtctgggaccccttcacagggaagacccttcgcacagtggagccgctggacagccgggtgcccctgactgcggtggctgtcatgcccgccccccacaccagcatcaccatggccagctctgactctaccctgcgctttgtggactgcaggaagcctggtctgcagcacgagttccgactgggcggtgggctgaaccctgggcttgtccgtgccctggccatcagccccagtggccgtagtgtcgtggccggcttctcctcaggcttcatggtgctcctggacacccgcacaggcctggttctgcgaggctggccagcccacgagggggacattctgcagatcaaggcggtggagggcagcgtcctggtcagctcctcctctgaccattccttgaccgtctggaaggagctggagcagaagcccacccatcactacaagtcagcatccgaccccatccacacctttgacctgtacggcagcgaggtggtcactggcaccgtgtccaacaagattggcgtctgctccctgcttgagccaccctcgcaggccaccacgaagctcagctctgagaacttccgcggcacgctcaccagcctggccttgctgcccactaaacgccacctcctgctgggctcagacaacggggttatccgcctcctggcatagactgaggcaggagctggccgggcaagggtgggaagacatctgcgggcgcgtgtccactcaccctgttccctgagcagcagctccctccagggaggccctgggtcccacgccctgggtgcccacatggcctgccaactagggcctgcaaatggagtgggggagtcctggcccctgaatcaccagagccaccaagcctgccagaggggtctcattcatggcttggggacacagggctcctagcaagcaggaagttaagagcaggaggaagcgttgctaccttcacttctccccagctctgccctctgggtccacatgaggacagggaagctcgggaaggggaagggagactggccctgcccagccggtctctagcccctcagcccccgctgggcactctctgtcccatccctctaggacagggaagctggcctggtccagggcactgatggtgcttggattccagcctaaggaaggctggccgtggtccaggagttaagggcttgggtctggggtttaagtggccacccatccaggccctggccagtgtgggaccgggacgggaaggaagaaggaggctaggagcagggggaaaaggtgcacttggccagtggcgcctgccaggagtgagtccatgcgttgtctgcccacccctaccacagtgtttgtgccttcagctgagggggcagcctctgggccctgaacccctgctggggctccacgaccctgagagaaggggtgagaagaatcatctctgcacctcgggtctctgccagaggaagacttaagcatccctgcgacctcacattctagacagagatgaggtccaggggttggcccctgctgccttctcacaatttgcaatagatgtaaataggaccaataaatcctttggaagagccatggggtg

SEQ ID NO: 62142 - protein, 582 aa, Artificial Sequence
  derived and/or modified sequence
MWVLLRSGYPLRILLPLRGEWMGRRGLPRNLAPGPPRRRYRKETLQALDMPVLPVTATEIRQYLRGHGIPFQDGHSCLRALSPFAESSQLKGQTGVTTSFSLFIDKTTGHFLCMTSLAEGSWEDFQASVEGRGDGAREGFLLSKAPEFEDSEEVRRIWNRAIPLWELPDQEEVQLADTMFGLTKVTDDTLKRFSVRYLRPARSLVFPWFSPGGSGLRGLKLLEAKCQGDGVSYEETTIPRPSAYHNLFGLPLISRRDAEVVLTSRELDSLALNQSTGLPTLTLPRGTTCLPPALLPYLEQFRRIVFWLGDDLRSWEAAKLFARKLNPKRCFLVRPGDQQPRPLEALNGGFNLSRILRTALPAWHKSIVSFRQLREEVLGELSNVEQAAGLRWSRFPDLNRILKGHRKGELTVFTGPTGSGKTTFISEYALDLCSQGVNTLWGSFEISNVRLARVMLTQFAEGRLEDQLDKYDHWADRFEDLPLYFMTFHGQQSIRTVIDTMQHAVYVYDICHVIIDNLQFMMGHEQLSTDRIAAQDYIIGVFRKFATDNNCHVTLVIHPRKEDDDKELQTASIFGSAKVSGL

SEQ ID NO: 62143 - DNA, 1749 bp, Artificial Sequence
  derived and/or modified sequence
atgtgggtgttactacggagcggatatcctctccgaatcttactcccactgcgcggcgagtggatgggaagaaggggactgcccaggaacctcgctcctgggcccccgcggcgccgataccggaaagaaacccttcaagccctagatatgccagttcttcccgtcacggcgacagagattcgccagtacttgaggggccatggcatccctttccaggacgggcactcctgcctgagagcactgagccctttcgccgagagttcccaacttaagggccagaccggcgtgacgacgtcctttagtctttttatcgacaagacaactggacacttcctgtgtatgacttcactcgccgaggggtcttgggaggattttcaagcctcggtagaaggccgaggagacggcgctcgggaaggcttcctcctgtctaaggctcccgagttcgaggactctgaggaggtgaggagaatctggaaccgggccattcctctttgggagctccccgaccaggaggaggtgcaactggctgatactatgtttggcctgaccaaggtaacagacgataccctaaaacgattctctgtgcgatacctgagacccgcaagaagtctggtcttcccctggttttcacccggcgggtctggcctgcgcggtttaaagttacttgaagccaagtgtcagggagacggggttagctatgaagaaactactatccctagacccagcgcatatcataacttgttcggtcttccgctgatatcaaggagagacgccgaggtcgtgttgacctcaagagagctggacagtctcgctctcaatcaatccacgggtctgccgacattaaccctcccacggggcaccacctgtctgccccccgccctgctgccttaccttgaacagtttaggcggatcgtgttctggcttggggacgacctccggtcctgggaggcggccaaactgttcgcgagaaagctaaaccctaaacgatgtttcctggtcagacccggggaccaacagccaagaccactggaagccctgaacgggggcttcaatctctccagaatcctgcgtaccgccctgcctgcttggcacaaatcgattgtgagctttcgccaactgcgagaggaagtactcggagaactatctaacgtggaacaggccgcaggactgagatggtctagattccccgatcttaaccgtatcttgaagggccaccgcaagggggaactcacagtttttacaggccccactggcagcggcaaaaccacttttatatctgaatacgctctggacttgtgctcccagggagtgaatactctgtgggggtccttcgagatcagcaacgtgcgactagctcgcgttatgctgacccaatttgctgagggaaggctggaggaccagctggataagtacgaccactgggcagaccggttcgaggacctccccctttactttatgacatttcacggccagcagagcattcgaactgtcattgacaccatgcagcatgccgtctacgtttatgacatttgtcacgttattatcgacaaccttcagttcatgatggggcatgaacagctttccactgatcgaattgcggctcaggattatattattggtgtgttccgcaaattcgctacggataataactgccacgtgacactagttatacacccacgcaaggaggacgatgacaaggaactgcaaactgcctcgattttcggaagtgcaaaagtgagcggactgtag

SEQ ID NO: 62144 - DNA, 1749 bp, Artificial Sequence
  derived and/or modified sequence
atgtgggtgctgctgcggagcggctaccccctgcgcatcctgctgcccctgcggggggagtggatgggccggcggggcctgcccaggaacctggcccctggccccccaagaagacgctacaggaaggagaccctgcaggccctggacatgcctgtgctgcctgtgacagccacagagatccggcagtacctgcggggccacggcatccccttccaggacggccacagctgcctgcgggccctgagcccctttgctgagagcagccagctgaagggccagacaggagtgaccaccagcttcagcctcttcatcgacaagaccaccggccacttcctgtgcatgaccagcctggccgagggctcctgggaggacttccaggcctctgtggagggcagaggagatggagcccgggagggcttcctgctgagcaaggcccctgagtttgaagattctgaggaggtgcggcgcatctggaacagagccatccccctgtgggagctgcctgaccaggaggaggtgcagctggccgacaccatgtttggcctgaccaaggtgacagatgacaccctgaagcgcttctctgtgcgctacctgcggcctgcccggagcctggtgttcccctggttcagccctgggggcagcggcctgcggggcctgaagctgctggaggccaagtgccagggagatggagtgtcctatgaggagaccaccatcccccggcccagcgcctaccacaacctgtttggcctgcccctcatcagcagaagagatgctgaggtggtgctgaccagccgggagctggacagcctggccctgaaccagagcacaggcctgcccaccctgaccctgccccggggcaccacctgcctgcccccagccctgctgccctacctggagcagttccgccgcatcgtgttctggctgggagatgacctgcgctcctgggaggccgccaagctgtttgccaggaagctgaaccccaagcgctgcttcctggtgcggcctggggaccagcagccccggcccctggaggccctgaatggaggcttcaacctgagccgcatcctgaggacagccctgcctgcctggcacaagagcatcgtgtccttccggcagctgcgggaggaggtgctgggggagctgagcaatgtggagcaggccgccggcctgcgctggagccgcttcccagacctgaaccgcatcctgaagggccacaggaaaggagagctgactgtgttcaccggccccactggaagtggcaagaccaccttcatcagtgaatatgccctggacctgtgcagccagggcgtgaacaccctgtggggcagctttgagatcagcaatgtgcggctggcccgggtgatgctgacccagtttgctgagggccgcctggaggaccagctggacaagtatgaccactgggccgacagatttgaggacctgcccctgtacttcatgaccttccacggccagcagagcatccgcaccgtcatcgacaccatgcagcacgctgtgtatgtgtatgacatctgccacgtgatcatcgacaacctgcagttcatgatgggccacgagcagctgagcacagacagaattgctgcccaggactacatcattggagtcttcaggaagtttgccacagacaacaactgccacgtgaccctggtgatccaccccaggaaggaggatgatgacaaggagctgcagacagccagcatcttcggcagcgccaaggtgtctggcctgtag

SEQ ID NO: 62145 - DNA, 1749 bp, Artificial Sequence
  derived and/or modified sequence
atgtgggtgctgctgcggagcggctaccccctgcggatcctgctgccactgcggggcgaatggatgggacgtcgcgggctgcctcggaatcttgctccagggcctccacgtaggcgctaccgaaaagagaccctccaggcgctcgatatgcccgtgctccctgtcactgccactgagatcagacaatacttacgtggtcatggtattccgtttcaggacgggcacagttgcctgcgggccctctctccgtttgcagaatcatcccagttaaaaggacaaacaggggtgacaacaagtttttccctgttcattgataagacgacgggacatttcttatgtatgaccagcttggctgaaggcagctgggaagacttccaagcatcagtagaagggaggggtgacggcgccagggaaggcttcctgttgagtaaagcccccgagttcgaagattccgaggaggttcggagaatatggaatagagctattccactttgggagctgccggatcaggaggaagtccaattggcagacacgatgttcggtctgacaaaggtgacagacgatacgctgaagaggttttctgtccgatatttaaggcctgcaagaagtttagttttcccctggttcagccccggcggcagcggcctgcgtggcttaaagctgctggaagcgaagtgtcagggggacggcgtttcttatgaggaaacaactatcccccgcccttccgcctatcacaatttattcggcctgccactcataagtaggcgggatgcagaggtggtgctgacatcccgagagctggactccctggctcttaatcaatccaccgggcttcctactcttaccctgcctagggggacgacctgccttccgcctgcactgttaccctacttggagcagttccgtcggatcgtgttttggctcggagacgacctccggtcatgggaagctgccaaattgtttgcacgaaagctgaatcctaagcgatgcttcctcgtgaggccaggtgatcagcagcccagacctttggaggcactgaatggaggcttcaacctgtcccgcatacttcgcactgccttgcctgcatggcacaaaagcattgtgtcatttaggcagctgcgagaggaggtgctcggggaactgagcaacgtcgagcaggccgccggcctcaggtggagtagatttcctgatcttaataggatactgaaaggacaccgaaaaggggaactcaccgtcttcaccggccctactggtagcggcaaaactaccttcatctctgaatatgcactggatctctgtagccagggagtcaacactctttgggggtctttcgaaatatcaaacgtaaggcttgctcgggtgatgttaactcagtttgcggaggggaggttggaagaccaattggacaagtacgatcactgggctgaccggttcgaggatctgcctctgtacttcatgacgttccatggccagcagtccatcagaacagtgatcgataccatgcaacacgccgtgtacgtctacgatatctgccacgtgatcatcgataatctacagtttatgatgggacatgaacaactttccaccgaccggatcgctgctcaggactatatcattggagtgtttcggaagtttgcaacagacaataattgtcatgttacactcgtgattcacccccggaaggaggacgatgataaggaactgcagacagcaagcatcttcggctcggccaaggtgagtggtttgtag

SEQ ID NO: 62146 - DNA, 1749 bp, Artificial Sequence
  derived and/or modified sequence
atgtgggtcttattgaggagcggttatccattgaggattttactcccgcttcgcggagaatggatgggacgacggggactccctagaaatctggcccctggcccacccaggcggaggtacaggaaagaaacgttacaagccctcgatatgccagttctgcctgtgactgctactgaaattcgacagtatcttcgcggacatggcatacccttccaggacgggcattcctgccttcgggcattaagcccattcgcagagtccagtcaactcaaaggacagaccggggtgactacctcattttcattgtttattgacaagaccactggacattttctctgcatgacctctctggctgagggaagctgggaagattttcaggcttcagtggagggacgcggtgatggagccagggagggttttctgctatctaaagcccctgaattcgaagatagcgaagaggttcggcgaatctggaacagagcaatacccctgtgggaactgcccgaccaagaggaggtacagctggctgacaccatgttcggcctgaccaaggtgactgacgataccttaaaacgcttttccgtgcgatacctccgacccgcacgcagtctcgtgttcccatggttctcccccggtggaagtgggctacggggtctgaaacttctggaagcaaagtgccaaggtgatggggtctcttatgaagagacaactataccgaggccgtctgcatatcacaatctttttggcctcccgttgatcagcaggagagatgccgaagtggtgctgacgagcagagagctggactcactcgctctgaaccaaagcactggactgcctaccctaaccttgccacggggaaccacctgccttcctcccgctctgcttccctatttggaacagtttcgcaggattgttttctggctgggggacgacctccgcagctgggaagccgcaaaattgttcgcacggaagctgaatcccaagcggtgcttcttggtacggccaggcgatcagcagccccgacctctggaagccctgaatggaggctttaacctgtctcggattttgaggactgcactgcctgcctggcacaaatctattgtctcatttcggcagctgcgcgaagaggtgctcggagagctgagcaatgttgagcaagcagctggactccggtggagtcggtttccagatcttaacaggattctcaagggacacaggaagggcgagctgaccgtattcacaggcccaactgggagcggcaaaactacatttatcagtgagtatgcactggatctgtgctcccaaggagtgaatactctgtggggtagctttgagatctctaacgtcagactcgctagagtgatgttgactcaattcgctgagggtcggttagaggatcagctggacaaatatgatcattgggcagatcggtttgaggatcttcccctctatttcatgactttccacggccagcaatctatccgaacagtgatcgacaccatgcaacatgccgtttatgtgtacgatatatgccacgtgatcatagacaacctacagttcatgatgggccacgagcagctgagcaccgaccgcattgctgctcaggactacattatcggcgtgttccgcaaatttgccacggataataactgccacgtcacactggtgatccatcctaggaaagaggatgatgacaaagaactgcagaccgctagtatcttcggctcagccaaggttagtgggctgtag

SEQ ID NO: 62147 - DNA, 3175 bp, Artificial Sequence
  derived and/or modified sequence
tgggcatatgtgtgaagcagcaacgtagaggggctgaagaggagaaattcatggagagaaagaatgcacctagagtgagctctgcagagtgctgcgtgggatatccctagagtttggtctagtgaaggcacgctaaccaggcacctaaggcatttcaagtagtgacttcccacatttggctaggaatgtgggtcctcctccgaagtgggtaccccctccgtatcttgttacccctgcgtggggagtggatgggtcggaggggcctgccccgaaacttggccccaggccctcctcgcagacgttacaggaaggagactctccaagccttggatatgccagtgttgcctgtaactgcaactgaaatccgccagtatttgcgggggcatgggatccccttccaggatggtcacagttgcctgcgggcactgagcccctttgcagagtcttcacagctcaaaggccagactggtgttaccacttccttcagcctcttcattgacaagaccacaggccactttctctgcatgaccagcctagcagaagggagctgggaagacttccaggccagcgtggaggggcgaggggatggggccagggaggggtttctgcttagcaaggcaccagaatttgaggacagcgaggaggtccggaggatctggaaccgagcaatacctctctgggagctgcctgatcaggaggaggttcagctggctgatacaatgtttggccttaccaaggttacagatgacacactcaagcgtttcagtgtgcgatatctgcgacctgctcgcagtcttgtcttcccttggttctcccctgggggctcaggattacgaggcctgaagctcctagaggctaaatgccagggggatggagtgagctacgaggaaaccactattccccgacccagcgcctaccacaatctgtttggattaccactgattagtcgtcgagatgctgaggtggtactgacgagtcgtgagcttgacagcctggccttgaaccagtccacggggctgcctacccttactctaccccgaggaacgacctgcttaccccctgccttactcccttacctggaacagttccggcggattgtattctggttgggggatgaccttcggtcctgggaagccgccaagttgtttgcacgaaaactgaaccccaaacgatgcttcttggtgcgaccaggagaccagcaaccccgtcccctggaggccctgaacggaggcttcaatctttctcgtattcttcgtaccgccctgcctgcctggcacaagtccatcgtatctttccggcagcttcgggaggaggtgctaggagaactgtcaaatgtggagcaagcagctggcctccgctggagccgctttccagacctcaatcgtatcttgaagggacatcgaaagggcgagctgacggtcttcacagggccaacaggcagtggaaagacgacattcatcagtgagtatgccctggatttgtgttcccagggggtgaacacactgtggggtagcttcgagatcagcaatgtgagactagcccgggtcatgctgacacagtttgccgaggggcggctggaagatcaactggacaaatatgatcactgggctgaccgctttgaggacctgcccctctatttcatgactttccatggacagcaaagcatcaggactgtaatagatacaatgcaacatgcagtctacgtctatgacatttgtcatgtgatcatcgacaacctgcagttcatgatgggtcacgagcagctgtccacagacaggatcgcagctcaagactacatcatcggggtctttcggaagtttgcaacagacaataactgccatgtgacactggtcattcacccccggaaagaggatgatgacaaggaactgcagacagcgtccatttttggctcagccaaagtgagtggcctttagcggagctcaagctttggaaaatagagtgggcaagccaggaagcagacaatgttctgatcctgcaggacaggaagctggtaaccgggccagggaaacggtatctgcaggtgtccaagaaccgctttgatggagatgtaggtgtcttcccgcttgagttcaacaagaactccctcaccttctccattccaccaaagaacaaggcccggctcaagaagatcaaggatgacactggaccagtggccaaaaagccctcttctggcaaaaagggggctacgacacagaactctgagatttgctcaggccaggcccccactcccgaccagccagacacctccaagcgttcaaagtgaaggccgtgcagagctggtcactgaaatgagcctgataggataggctggagcataaaactctgcaagggctcctctatcctgtggtcctgagctgtgtgcccttctcagtctgaggggcctaacctagagcaggtttccatagtgagaaaattcaatgtagcagactactgagaaactactgtgttgctcaggctttgtttgaggtcctgtatatacagcactgaaaagagagataaagtccctgcctgcatgcattctggcggaagagacaagcaagcaatgaacaaattagcagaaaacctagttttagtgaaaaatgctgtaaagaaaatagaaatgcgatagagtgctggcaggctagtgtagataagtggtctgaaaaggtgtctctgagccgagggcatgtgagctggggcctaaacaactagaaggagagagccacgtgaacatccggcgaaggggacccaggcagagagaaaaggaaatccaagccctgaggtaggaatgagcaggtcagattcaaggcagtgaggtcaggccgcatgaacctggaggggaatcggggacttcatgcgaaactccagcctaggctttcaaagtcaaagggtgatacagtgggtaccaagctcctctgctccccactttgtagagcctagcatgaggtggcatgtactagaattggatcctaggtgcttagccctgcaatatcagggcctcactggtgggagctgcctcgggctgggttgcttggtcatagagccatagaaggaagctgtcagcccggagtgcctgccacctagacactgatgccattgtgtgctgcctcaagactgctggagtcaggacattttatagagccttttccagttttactaaaaaatttttccattg

SEQ ID NO: 62148 - DNA, 1749 bp, Artificial Sequence
  derived and/or modified sequence
atgtgggtgctgctgagaagcggctaccccctgagaatcctgctgcccctgagaggcgagtggatgggcagaagaggcctgcccagaaacctggcccccggcccccccagaagaagatacagaaaggagaccctgcaggccctggacatgcccgtgctgcccgtgaccgccaccgagatcagacagtacctgagaggccacggcatccccttccaggacggccacagctgcctgagagccctgagccccttcgccgagagcagccagctgaagggccagaccggcgtgaccaccagcttcagcctgttcatcgacaagaccaccggccacttcctgtgcatgaccagcctggccgagggcagctgggaggacttccaggccagcgtggagggcagaggcgacggcgccagagagggcttcctgctgagcaaggcccccgagttcgaggacagcgaggaggtgagaagaatctggaacagagccatccccctgtgggagctgcccgaccaggaggaggtgcagctggccgacaccatgttcggcctgaccaaggtgaccgacgacaccctgaagagattcagcgtgagatacctgagacccgccagaagcctggtgttcccctggttcagccccggcggcagcggcctgagaggcctgaagctgctggaggccaagtgccagggcgacggcgtgagctacgaggagaccaccatccccagacccagcgcctaccacaacctgttcggcctgcccctgatcagcagaagagacgccgaggtggtgctgaccagcagagagctggacagcctggccctgaaccagagcaccggcctgcccaccctgaccctgcccagaggcaccacctgcctgccccccgccctgctgccctacctggagcagttcagaagaatcgtgttctggctgggcgacgacctgagaagctgggaggccgccaagctgttcgccagaaagctgaaccccaagagatgcttcctggtgagacccggcgaccagcagcccagacccctggaggccctgaacggcggcttcaacctgagcagaatcctgagaaccgccctgcccgcctggcacaagagcatcgtgagcttcagacagctgagagaggaggtgctgggcgagctgagcaacgtggagcaggccgccggcctgagatggagcagattccccgacctgaacagaatcctgaagggccacagaaagggcgagctgaccgtgttcaccggccccaccggcagcggcaagaccaccttcatcagcgagtacgccctggacctgtgcagccagggcgtgaacaccctgtggggcagcttcgagatcagcaacgtgagactggccagagtgatgctgacccagttcgccgagggcagactggaggaccagctggacaagtacgaccactgggccgacagattcgaggacctgcccctgtacttcatgaccttccacggccagcagagcatcagaaccgtgatcgacaccatgcagcacgccgtgtacgtgtacgacatctgccacgtgatcatcgacaacctgcagttcatgatgggccacgagcagctgagcaccgacagaatcgccgcccaggactacatcatcggcgtgttcagaaagttcgccaccgacaacaactgccacgtgaccctggtgatccaccccagaaaggaggacgacgacaaggagctgcagaccgccagcatcttcggcagcgccaaggtgagcggcctgtag

SEQ ID NO: 62149 - protein, 475 aa, Artificial Sequence
  derived and/or modified sequence
MAAKSQPNIPKAKSLDGVTNDRTASQGQWGRAWEVDWFSLASVIFLLLFAPFIVYYFIMACDQYSCALTGPVVDIVTGHARLSDIWAKTPPITRKAAQLYTLWVTFQVLLYTSLPDFCHKFLPGYVGGIQEGAVTPAGVVNKYQINGLQAWLLTHLLWFANAHLLSWFSPTIIFDNWIPLLWCANILGYAVSTFAMVKGYFFPTSARDCKFTGNFFYNYMMGIEFNPRIGKWFDFKLFFNGRPGIVAWTLINLSFAAKQRELHSHVTNAMVLVNVLQAIYVIDFFWNETWYLKTIDICHDHFGWYLGWGDCVWLPYLYTLQGLYLVYHPVQLSTPHAVGVLLLGLVGYYIFRVANHQKDLFRRTDGRCLIWGRKPKVIECSYTSADGQRHHSKLLVSGFWGVARHFNYVGDLMGSLAYCLACGGGHLLPYFYIIYMAILLTHRCLRDEHRCASKYGRDWERYTAAVPYRLLPGIF

SEQ ID NO: 62150 - protein, 108 aa, Artificial Sequence
  derived and/or modified sequence
MAAKSQPNIPKAKSLDGVTNDRTASQGQWGRAWEVDWFSLASVIFLLLFAPFIVYYFIMACDQYSCALTGPVVDIVTGHARLSDIWAKTPPITRKAAQLYTLWVTFQV

SEQ ID NO: 62151 - protein, 164 aa, Artificial Sequence
  derived and/or modified sequence
MAAKSQPNIPKAKSLDGVTNDRTASQGQWGRAWEVDWFSLASVIFLLLFAPFIVYYFIMACDQYSCALTGPVVDIVTGHARLSDIWAKTPPITRKAAQLYTLWVTFQVLLYTSLPDFCHKFLPGYVGGIQEGAVTPAGVVNKYQINGLQAWLLTHLLWFANAHL

SEQ ID NO: 62152 - protein, 91 aa, Artificial Sequence
  derived and/or modified sequence
MAAKSQPNIPKAKSLDGVTNDRTASQGQWGRAWEVDWFSLASVIFLLLFAPFIVYYFIMACDQYSCALTGPVVDIVTGHARLSDIWAKTPP

SEQ ID NO: 62153 - protein, 105 aa, Artificial Sequence
  derived and/or modified sequence
MAAKSQPNIPKAKSLDGVTNDRTASQGQWGRAWEVDWFSLASVIFLLLFAPFIVYYFIMACDQYSCALTGPVVDIVTGHARLSDIWAKTPPITRKAAQLYTLWVT

SEQ ID NO: 62154 - DNA, 1428 bp, Artificial Sequence
  derived and/or modified sequence
atggccgccaagagccaacctaacattccaaaagctaaatctctggacggagttaccaacgatcggaccgccagtcaaggacagtggggcagagcatgggaggtggattggtttagcttggcctcggtgatcttccttctcctgtttgcacccttcattgtctactatttcatcatggcatgtgatcagtattcctgcgcacttacaggccctgtggtggacatcgttaccggtcacgcccgactgagcgatatctgggctaaaactcctccaatcaccaggaaagccgctcagctctacactctgtgggtaacctttcaggtattactgtacacgtcacttcccgacttttgtcacaagttcctgccggggtacgttggcggaattcaggaaggggctgtgactcccgcaggtgttgttaacaaatatcaaataaacggactgcaagcctggttactaactcacctcctctggttcgcaaatgctcatttattatcgtggttctctcctaccatcatattcgataactggattcccttactgtggtgcgccaacatcctgggctatgcagtctcgacatttgccatggtgaaaggctacttctttcctactagcgcacgcgactgtaagttcacggggaattttttctacaattacatgatggggatagaatttaatccaaggattggcaagtggtttgacttcaagttgtttttcaacggcaggcccggaattgtcgcctggactctgattaacttatctttcgctgctaagcaacgggagcttcattctcatgttaccaatgcgatggttctcgtgaatgtcctgcaagcgatttacgtgatcgattttttctggaatgagacatggtatcttaagactattgacatatgtcatgatcactttgggtggtatctgggctggggggattgtgtgtggttaccctacctctacactctgcagggcctgtacttggtgtatcatcccgtgcagcttagtaccccccacgctgtgggcgtcttgctgctgggattggtcggctattatatttttagagtagccaaccaccaaaaagacctgtttcgacggaccgacggacgttgtctgatttggggccggaagcctaaggttatcgaatgtagttatacgagtgccgatgggcagcggcaccactctaagctcctggtaagcgggttctggggcgtggccagacactttaactacgttggcgatctgatggggagtctggcatactgtctggcctgtggcggcggacacctgctaccatacttttacatcatctacatggcaatcttacttacccaccggtgcctgagggacgaacatcgttgcgcgtcaaaatacgggcgtgattgggagcgctacaccgctgctgtgccctaccgactgctccccggaattttctag

SEQ ID NO: 62155 - DNA, 1428 bp, Artificial Sequence
  derived and/or modified sequence
atggccgctaaatcacaacctaacatccctaaagccaaatcattagacggagtgaccaacgacagaactgcgtcacagggacagtggggacgggcctgggaagtagattggttttccctggctagtgtcatttttctcttactgttcgcccctttcatagtgtactactttattatggcctgtgaccagtatagttgtgcgctgaccggaccggttgtcgacatagtgactggacacgccaggctgtcggacatttgggccaaaactccccctatcacgaggaaggccgctcaactctatactctgtgggtgacattccaggtactactctatacgtctctcccagacttttgtcataaatttctcccagggtacgtgggcggaatacaggagggtgctgtaactccagcaggtgtggttaataagtaccagattaatggactgcaagcatggcttctgacccacctgctgtggttcgccaacgcccatctactttcatggttcagtccaacaattatttttgacaattggatcccgcttctgtggtgcgccaatatcctgggctatgccgtgtctacattcgccatggtcaagggctacttttttccaacgtcggcacgggactgtaagtttactggcaactttttttacaactacatgatgggtattgagttcaacccccgcatcggaaaatggtttgattttaagttattcttcaatggccgcccaggaatagtagcgtggaccctgatcaatctctccttcgccgcaaagcagcgtgagctgcacagccatgttacaaacgcgatggtcctggttaatgtgctgcaggctatctacgtgattgactttttctggaatgaaacatggtacctcaagacaattgatatttgccacgaccattttggctggtacctgggttggggcgattgtgtctggctgccttacctgtacacgttacagggactctacctggtctaccatcctgtgcagcttagcacccctcacgctgtgggagtcttgctgctgggccttgtagggtattacatctttcgtgtagccaatcatcaaaaggatctctttcgccggaccgatgggcgctgcctcatctgggggagaaagcctaaagtaattgaatgtagttacacttctgccgacgggcagagacatcacagcaagctgcttgtcagtggcttttggggagtcgcccgccacttcaactatgtcggcgatctcatgggtagcttggcatattgtctggcctgcggaggcggccacctgctcccttacttctacattatctatatggcaatcttgctgacacacagatgtcttcgggacgagcaccggtgtgcctccaagtatggaagggactgggagaggtacacggctgccgtaccttatcggctgttacccgggatcttttag

SEQ ID NO: 62156 - DNA, 1428 bp, Artificial Sequence
  derived and/or modified sequence
atggccgccaagagccagcccaacatccccaaggccaagagcctggatggagtgaccaatgacagaacagccagccagggccagtggggccgggcctgggaggtggactggttcagcctggccagcgtcatcttcctgctgctgtttgcccccttcatcgtgtactacttcatcatggcctgtgaccagtacagctgtgccctgactggacctgtggtggacatcgtgactggacatgcccggctgagtgacatctgggccaagaccccacccatcaccaggaaggccgcccagctgtacaccctgtgggtgaccttccaggtgctgctgtacaccagcctgcctgacttctgccacaagttcctgcccggctacgtgggcggcatccaggagggcgctgtgaccccagctggggtggtgaacaagtaccagatcaatggcctgcaggcctggctgctgacccacctgctgtggtttgccaatgcccacctgctgtcctggttcagccccaccatcatctttgacaactggatccccctgctgtggtgtgccaacatcctgggctatgctgtgtccacctttgccatggtgaagggctacttcttccccaccagcgcccgggactgcaagttcaccggcaacttcttctacaactacatgatgggcatcgagttcaaccccagaattggcaagtggtttgacttcaagctgttcttcaacggccggcccggcatcgtggcctggaccctcatcaacctgagctttgctgccaagcagcgggagctgcacagccacgtgaccaatgccatggtgctggtgaatgtgctgcaggccatctacgtgattgacttcttctggaatgagacctggtacctgaagaccatcgacatctgccacgaccacttcggctggtacctgggctggggagactgtgtgtggctgccctacctgtacaccctgcagggcctgtacctggtgtaccaccctgtgcagctgagcacccctcatgctgtgggcgtgctgctgctgggcctggtgggctactacatcttccgggtggccaaccaccagaaggacctcttccggaggacagatggccgctgcctgatctggggcaggaagcccaaggtgattgaatgttcctacaccagcgcagatggccagaggcaccacagcaagctgctggtgtctggcttctggggcgtggcccggcacttcaactacgtgggggacctgatgggcagcctggcctactgcctggcctgtggcggcggccacctgctgccctacttctacatcatctacatggccatcctgctgacccaccgctgcctgagagatgagcaccgctgtgccagcaaatatggccgggactgggagcgctacacagctgctgtgccctaccgcctgctgcccggcatcttctag

SEQ ID NO: 62157 - DNA, 1428 bp, Artificial Sequence
  derived and/or modified sequence
atggccgccaagagccagcccaacatccccaaggccaagagcctggacggggtgactaacgaccggactgcgtcgcaggggcagtggggccgcgcttgggaggttgactggttctcgctggcttcagtgatcttcctgctgctcttcgcacccttcatcgtttattacttcatcatggcatgcgatcagtatagttgtgctctgaccggaccagtcgtagatatagtgacgggccatgcaaggctgtcagacatctgggccaaaacaccacccataaccagaaaagcagctcagctctatactctgtgggtgacctttcaggtcctcttgtacacctccctaccagacttttgtcacaaattcttgcccggatacgttgggggtatacaagagggagccgtcacaccggccggagttgtgaacaaataccagatcaacggacttcaggcctggcttctcacacacctcttgtggtttgcaaatgctcatttactgtcttggttttcccctaccatcatctttgacaactggatccccttactgtggtgcgccaacatcctgggctatgccgtcagtacgttcgccatggttaagggctattttttccctacttccgctcgcgactgcaagttcaccgggaacttcttctacaattacatgatggggattgagttcaatcctcggatagggaaatggtttgacttcaaattattcttcaacgggaggcccggcattgtggcctggactttaatcaatctctcttttgcagcgaaacaacgcgagcttcactcccatgtgactaacgctatggtattggtgaacgttcttcaagccatctacgtgatcgattttttttggaatgaaacgtggtatttgaaaacaattgacatatgtcatgatcactttgggtggtacctcgggtggggcgactgcgtgtggctcccatacctatatactctgcagggactgtacctggtttatcaccccgtccagctgtcaacccctcacgctgttggagtgcttctgctgggtctggtgggatattatatttttagggttgccaatcaccagaaggacttattcaggcggactgacggcagatgcctgatttggggcaggaagcctaaagtgatcgaatgttcttatacctcggctgacggacagaggcatcacagcaaactcctggtgagcggtttttggggcgttgctagacacttcaactacgtgggagacctgatgggttcccttgcctattgtctggcatgcggtggggggcatttactgccctatttttacatcatttatatggccatcctcctgacgcacaggtgccttcgagacgaacaccgctgtgccagcaaatatggccgtgactgggagaggtacacagcggctgtaccttaccgtcttttgcccggtatattttag

SEQ ID NO: 62158 - DNA, 1428 bp, Artificial Sequence
  derived and/or modified sequence
atggccgccaagagccagcccaacatccccaaggccaagagcctggacggtgtcacgaacgaccggaccgcgagccagggacaatgggggcgggcttgggaggtcgattggttctctcttgcctctgtgatcttcctgctgctgtttgccccctttatcgtctattacttcatcatggcctgcgatcaatattcctgtgccttgaccggaccagtcgtggacatcgtgaccggtcatgcccgcctaagcgacatctgggcgaagacaccaccaataactaggaaggccgctcagttatacactctctgggtgacctttcaggtcctcttgtacacctccttacccgacttctgtcataaattcttgccaggctatgtcggaggcatccaggaaggggcagtgacacccgcaggcgtggtgaataagtaccaaatcaatgggttgcaagcttggctgcttacgcacctgctgtggtttgctaacgctcacctcctgtcttggttctcccccacaattattttcgataactggatccccctgctctggtgcgctaacatcctaggatatgccgtatcgactttcgccatggtgaagggctacttcttcccaacgtcagctcgggactgtaaattcacaggcaatttcttctataactacatgatgggcattgagttcaacccacgcatcgggaagtggttcgactttaagcttttctttaatgggcggcccgggatcgtggcatggactttgataaatctgagctttgctgccaagcaaagagagcttcacagtcatgtcacaaatgccatggtcctcgtgaacgtgcttcaagccatctacgtgatcgacttcttttggaatgagacctggtacttgaagaccatagatatatgccatgatcacttcgggtggtacctcggttggggcgattgtgtgtggttaccttacctatatacgctccagggcctgtatctggtgtatcaccctgtccagctttccacccctcatgctgttggcgtgctgctcctcggtcttgttggttactacatatttcgcgtcgcaaaccatcagaaggaccttttcaggcggacggatggacgctgccttatatggggacgaaagcctaaggtgattgaatgtagttacactagtgccgacgggcagcgccatcatagtaaacttctcgtgagcggtttctggggagttgcaaggcatttcaattacgtgggcgatctgatgggaagccttgcttattgcctggcctgtggggggggccatttgcttccatacttttacatcatttacatggcgattctgctcactcatcgctgtttaagagacgagcaccggtgtgcctccaagtacggccgggattgggaacgatatactgcagctgtcccctaccggcttctgcccggaatcttctag

SEQ ID NO: 62159 - DNA, 1428 bp, Artificial Sequence
  derived and/or modified sequence
atggcagccaagtcccagccgaatatcccaaaggccaagagcttagatggggtcacaaacgaccggacagcctcacaggggcaatggggccgagcttgggaagtggattggttcagtttggctagcgtgattttcttgctgctgttcgcaccatttatcgtctactatttcatcatggcctgtgatcaatactcatgcgccctcactgggcctgtcgtggacattgttactgggcacgcccgtctgtccgatatatgggccaagactcctcccatcacgcgcaaggcggctcagctctatacgctctgggtcacctttcaggtcctgctctatactagtctgccggacttctgccacaaatttttacctggctatgtaggcggaatacaagaaggcgcagtaacacccgcaggggttgtgaataagtaccagatcaacggcctccaggcatggctcctcacacatctgctttggttcgctaatgcacacctcttatcgtggttctctcctactattattttcgataattggattcctttgctctggtgtgccaacatactgggatatgctgtgtccacattcgccatggtgaagggctatttcttccctaccagtgccagagattgtaagttcactggaaattttttctacaattacatgatggggatcgaatttaatcccaggatagggaaatggttcgattttaagctcttctttaatgggaggcctggcattgtggcatggacactgatcaatctgtcttttgcggctaagcagcgggaactgcactctcacgtcacaaacgcgatggtgctggtaaatgttttacaggccatttacgtgatagactttttttggaatgagacttggtatctgaagacaattgacatctgtcacgatcatttcgggtggtatctgggatggggcgattgcgtgtggctgccctacctgtatactcttcagggcctctatctcgtctaccaccctgtccagctgagcacccctcatgccgtgggcgtattactactgggcttggtgggctattacatttttagagtcgcgaatcatcaaaaggacctgtttagacgcacagatggaaggtgtctcatctggggcaggaaacccaaggtgatagagtgctcttacacctccgccgacggacagcggcaccatagtaagctactcgtgtctgggttctggggggttgccagacactttaactatgtgggagatctgatgggcagtctagcctattgtctggcctgcggcggaggacatcttttgccatacttttacatcatctacatggctattctgctcacgcaccgctgcctgcgggatgagcatcgctgtgcctccaagtatggaagagattgggagcgatacacggccgcagtcccgtataggctgctgccagggatattttag

SEQ ID NO: 62160 - DNA, 1428 bp, Artificial Sequence
  derived and/or modified sequence
atggcagctaaatcccaaccgaacatcccaaaggccaagtctctcgatggtgtcaccaatgatcgtaccgcgagccaggggcagtgggggcgtgcctgggaagtcgactggttttcattggcttctgttatctttctactgctgtttgccccatttatagtgtattacttcatcatggcgtgtgatcagtactcgtgcgccctaacaggcccagttgtggatattgtcaccgggcacgccagactcagcgatatatgggcaaagacgccgcctataacccgaaaggccgctcagctctatacactctgggtcacattccaggtccttctgtacacgtccctgcccgacttctgccacaaattcctaccaggctatgtgggcggtattcaggagggagcggtgaccccagccggagtggtcaacaagtaccagatcaatgggttgcaggcttggctcctcactcatctgctctggtttgccaacgctcacttactttcctggttttctcccacaatcatcttcgataactggattccgctactgtggtgtgccaatatactggggtacgctgtttccactttcgccatggtaaagggctactttttcccaacgagtgccagggactgcaagttcaccggcaattttttctataactacatgatgggtatcgaattcaatcctagaatcggcaagtggttcgatttcaagctattttttaacgggagaccaggaattgtcgcttggacgctgatcaatctttcgttcgccgcaaagcagagagaattgcatagtcacgtgacaaacgccatggtgctggtcaacgtgttgcaggccatctacgtcattgattttttttggaacgaaacgtggtacctgaaaacaatcgacatctgtcatgatcattttggatggtatcttgggtggggggactgcgtgtggttaccctacctgtatacgcttcaaggactttacttggtgtatcaccccgtgcaactgagcacgccacatgcagtaggcgtactcctcctgggacttgtaggctactacattttccgcgtcgcaaatcaccagaaagatctgttccgcaggaccgacggccgttgcctgatatggggtcgtaagcctaaagttattgaatgtagctacacatccgcggatgggcagcgtcaccacagcaaacttttagtctctggtttctggggcgttgccaggcattttaattatgtgggtgacttaatgggaagcttggcctattgcctcgcctgtggtggaggacatctgttaccatatttctatataatatatatggccatccttctgactcacagatgccttcgcgacgagcatcggtgtgcttccaaatacgggcgagattgggaaaggtatacggcggctgtaccttatcgcctccttcccggaatcttctag

SEQ ID NO: 62161 - DNA, 2666 bp, Artificial Sequence
  derived and/or modified sequence
aggcaatcgctgacatcatccgggggcgggcgcccctgccctgcgggtgactccgacccctggctagagggtaggcggcgtggagcagcgcgcgcaagcgaggccaggggaaggtgggcgcaggtgaggggccgaggtgtgcgcaggactttagccggttgagaaggatcaagcaggcatttggagcacaggtgtctagaaacttttaaggggccggttcaagaaggaaaagttcccttctgctgtgaaactatttggcaagaggctggagggcccaatggctgcaaaatcgcaacccaacattcccaaagccaagagtctagatggcgtcaccaatgacagaaccgcatctcaagggcagtggggccgtgcctgggaggtggactggttttcactggcgagcgtcatcttcctactgctgttcgcccccttcatcgtctactacttcatcatggcttgtgaccagtacagctgcgccctgactggccctgtggtggacatcgtcaccggacatgctcggctctcggacatctgggccaagactccacctataacgaggaaagccgcccagctctataccttgtgggtcaccttccaggtgcttctgtacacgtctctccctgacttctgccataagtttctacccggctacgtaggaggcatccaggagggggccgtgactcctgcaggggttgtgaacaagtatcagatcaatggcctgcaagcctggctcctcacgcacctgctctggtttgcaaacgctcatctcctgtcctggttctcgcccaccatcatcttcgacaactggatcccactgctgtggtgcgccaacatccttggctatgccgtctccaccttcgccatggtcaagggctacttcttccccaccagcgccagagactgcaaattcacaggcaatttcttttacaactacatgatgggcatcgagtttaaccctcggatcgggaagtggtttgacttcaagctgttcttcaatgggcgccccgggatcgtcgcctggaccctcatcaacctgtccttcgcagcgaagcagcgggagctccacagccatgtgaccaatgccatggtcctggtcaacgtcctgcaggccatctacgtgattgacttcttctggaacgaaacctggtacctgaagaccattgacatctgccatgaccacttcgggtggtacctgggctggggcgactgtgtctggctgccttatctttacacgctgcagggtctgtacttggtgtaccaccccgtgcagctgtccaccccgcacgccgtgggcgtcctgctgctgggcctggtgggctactacatcttccgggtggccaaccaccagaaggacctgttccgccgcacggatgggcgctgcctcatctggggcaggaagcccaaggtcatcgagtgctcctacacatccgccgatgggcagaggcaccacagcaagctgctggtgtcgggcttctggggcgtggcccgccacttcaactacgtcggcgacctgatgggcagcctggcctactgcctggcctgtggcggcggccacctgctgccctacttctacatcatctacatggccatcctgctgacccaccgctgcctccgggacgagcaccgctgcgccagcaagtacggccgggactgggagcgctacaccgccgcagtgccttaccgcctgctgcctggaatcttctaagggcacgccctagggagaagccctgtggggctgtcaagagcgtgttctgccaggtccatgggggctggcatcccagctccaactcgaggagcctcagtttcctcatctgtaaactggagagagcccagcacttggcaggtgtccagtacctaatcacgctctgttccttgcttttgccttcaagggaattccgagtgtccagcactgccgtattgccagcacagacggattttctctaatcagtgtccctggggcaggaggatgacccagtcacctttactagtcctttggagacaatttacctgtattaggagcccaggccacgctacactctgcccacactggtgagcaggaggtcttcccacgccctgtcattaggctgcatttactcttgctaaataaaagtgggagtggggcgtgcgcgttatccatgtattgcctttcagctctagatccccctcccctgcctgctctgcagtcgtgggtggggcccgtgcgccgtttctccttggtagcgtgcacggtgttgaactgggacactggggagaaaggggctttcatgtcgtttccttcctgctcctgctgcacagctgccaggagtgctctgcctggagtctgcagacctcagagaggtcccagcaccggctgtggcctttcaggtgtaggcaggtgggctctgcttcccgattccctgtgagcgcccaccctctcgaaagaattttctgcttgccctatgactgtgcagactctggctcgagcaacccggggaacttcaccctcaggggcctcccacaccttctccagcgaggaggtctcagtcccagcctcgggagggcacctccttttctgtgctttcttccctgaggcattcttcctcatccctagggtgttgtgtagaactctttttaaactctatgctccgagtagagttcatctttatattaaacttcccctgttcaaa

SEQ ID NO: 62162 - DNA, 2601 bp, Artificial Sequence
  derived and/or modified sequence
gcgggtgactccgacccctggctagagggtaggcggcgtggagcagcgcgcgcaagcgaggccaggggaaggtgggcgcaggactttagccggttgagaaggatcaagcaggcatttggagcacaggtgtctagaaacttttaaggggccggttcaagaaggaaaagttcccttctgctgtgaaactatttggcaagaggctggagggcccaatggctgcaaaatcgcaacccaacattcccaaagccaagagtctagatggcgtcaccaatgacagaaccgcatctcaagggcagtggggccgtgcctgggaggtggactggttttcactggcgagcgtcatcttcctactgctgttcgcccccttcatcgtctactacttcatcatggcttgtgaccagtacagctgcgccctgactggccctgtggtggacatcgtcaccggacatgctcggctctcggacatctgggccaagactccacctataacgaggaaagccgcccagctctataccttgtgggtcaccttccaggtgcttctgtacacgtctctccctgacttctgccataagtttctacccggctacgtaggaggcatccaggagggggccgtgactcctgcaggggttgtgaacaagtatcagatcaatggcctgcaagcctggctcctcacgcacctgctctggtttgcaaacgctcatctcctgtcctggttctcgcccaccatcatcttcgacaactggatcccactgctgtggtgcgccaacatccttggctatgccgtctccaccttcgccatggtcaagggctacttcttccccaccagcgccagagactgcaaattcacaggcaatttcttttacaactacatgatgggcatcgagtttaaccctcggatcgggaagtggtttgacttcaagctgttcttcaatgggcgccccgggatcgtcgcctggaccctcatcaacctgtccttcgcagcgaagcagcgggagctccacagccatgtgaccaatgccatggtcctggtcaacgtcctgcaggccatctacgtgattgacttcttctggaacgaaacctggtacctgaagaccattgacatctgccatgaccacttcgggtggtacctgggctggggcgactgtgtctggctgccttatctttacacgctgcagggtctgtacttggtgtaccaccccgtgcagctgtccaccccgcacgccgtgggcgtcctgctgctgggcctggtgggctactacatcttccgggtggccaaccaccagaaggacctgttccgccgcacggatgggcgctgcctcatctggggcaggaagcccaaggtcatcgagtgctcctacacatccgccgatgggcagaggcaccacagcaagctgctggtgtcgggcttctggggcgtggcccgccacttcaactacgtcggcgacctgatgggcagcctggcctactgcctggcctgtggcggcggccacctgctgccctacttctacatcatctacatggccatcctgctgacccaccgctgcctccgggacgagcaccgctgcgccagcaagtacggccgggactgggagcgctacaccgccgcagtgccttaccgcctgctgcctggaatcttctaagggcacgccctagggagaagccctgtggggctgtcaagagcgtgttctgccaggtccatgggggctggcatcccagctccaactcgaggagcctcagtttcctcatctgtaaactggagagagcccagcacttggcaggtgtccagtacctaatcacgctctgttccttgcttttgccttcaagggaattccgagtgtccagcactgccgtattgccagcacagacggattttctctaatcagtgtccctggggcaggaggatgacccagtcacctttactagtcctttggagacaatttacctgtattaggagcccaggccacgctacactctgcccacactggtgagcaggaggtcttcccacgccctgtcattaggctgcatttactcttgctaaataaaagtgggagtggggcgtgcgcgttatccatgtattgcctttcagctctagatccccctcccctgcctgctctgcagtcgtgggtggggcccgtgcgccgtttctccttggtagcgtgcacggtgttgaactgggacactggggagaaaggggctttcatgtcgtttccttcctgctcctgctgcacagctgccaggagtgctctgcctggagtctgcagacctcagagaggtcccagcaccggctgtggcctttcaggtgtaggcaggtgggctctgcttcccgattccctgtgagcgcccaccctctcgaaagaattttctgcttgccctatgactgtgcagactctggctcgagcaacccggggaacttcaccctcaggggcctcccacaccttctccagcgaggaggtctcagtcccagcctcgggagggcacctccttttctgtgctttcttccctgaggcattcttcctcatccctagggtgttgtgtagaactctttttaaactctatgctccgagtagagttcatctttatattaaacttcccctgttcaaa

SEQ ID NO: 62163 - DNA, 1428 bp, Artificial Sequence
  derived and/or modified sequence
atggccgccaagagccagcccaacatccccaaggccaagagcctggacggcgtgaccaacgacagaaccgccagccagggccagtggggcagagcctgggaggtggactggttcagcctggccagcgtgatcttcctgctgctgttcgcccccttcatcgtgtactacttcatcatggcctgcgaccagtacagctgcgccctgaccggccccgtggtggacatcgtgaccggccacgccagactgagcgacatctgggccaagaccccccccatcaccagaaaggccgcccagctgtacaccctgtgggtgaccttccaggtgctgctgtacaccagcctgcccgacttctgccacaagttcctgcccggctacgtgggcggcatccaggagggcgccgtgacccccgccggcgtggtgaacaagtaccagatcaacggcctgcaggcctggctgctgacccacctgctgtggttcgccaacgcccacctgctgagctggttcagccccaccatcatcttcgacaactggatccccctgctgtggtgcgccaacatcctgggctacgccgtgagcaccttcgccatggtgaagggctacttcttccccaccagcgccagagactgcaagttcaccggcaacttcttctacaactacatgatgggcatcgagttcaaccccagaatcggcaagtggttcgacttcaagctgttcttcaacggcagacccggcatcgtggcctggaccctgatcaacctgagcttcgccgccaagcagagagagctgcacagccacgtgaccaacgccatggtgctggtgaacgtgctgcaggccatctacgtgatcgacttcttctggaacgagacctggtacctgaagaccatcgacatctgccacgaccacttcggctggtacctgggctggggcgactgcgtgtggctgccctacctgtacaccctgcagggcctgtacctggtgtaccaccccgtgcagctgagcaccccccacgccgtgggcgtgctgctgctgggcctggtgggctactacatcttcagagtggccaaccaccagaaggacctgttcagaagaaccgacggcagatgcctgatctggggcagaaagcccaaggtgatcgagtgcagctacaccagcgccgacggccagagacaccacagcaagctgctggtgagcggcttctggggcgtggccagacacttcaactacgtgggcgacctgatgggcagcctggcctactgcctggcctgcggcggcggccacctgctgccctacttctacatcatctacatggccatcctgctgacccacagatgcctgagagacgagcacagatgcgccagcaagtacggcagagactgggagagatacaccgccgccgtgccctacagactgctgcccggcatcttctag

SEQ ID NO: 62164 - protein, 813 aa, Artificial Sequence
  derived and/or modified sequence
MAKPLTDQEKRRQISIRGIVGVENVAELKKSFNRHLHFTLVKDRNVATTRDYYFALAHTVRDHLVGRWIRTQQHYYDKCPKLGLDIEELEEIEEDAGLGNGGLGRLAACFLDSMATLGLAAYGYGIRYEYGIFNQKIRDGWQVEEADDWLRYGNPWEKSRPEFMLPVHFYGKVEHTNTGTKWIDTQVVLALPYDTPVPGYMNNTVNTMRLWSARAPNDFNLRDFNVGDYIQAVLDRNLAENISRVLYPNDNFFEGKELRLKQEYFVVAATLQDIIRRFKASKFGSTRGAGTVFDAFPDQVAIQLNDTHPALAIPELMRIFVDIEKLPWSKAWELTQKTFAYTNHTVLPEALERWPVDLVEKLLPRHLEIIYEINQKHLDRIVALFPKDVDRLRRMSLIEEEGSKRINMAHLCIVGSHAVNGVAKIHSDIVKTKVFKDFSELEPDKFQNKTNGITPRRWLLLCNPGLAELIAEKIGEDYVKDLSQLTKLHSFLGDDVFLRELAKVKQENKLKFSQFLETEYKVKINPSSMFDVQVKRIHEYKRQLLNCLHVITMYNRIKKDPKKLFVPRTVIIGGKAAPGYHMAKMIIKLITSVADVVNNDPMVGSKLKVIFLENYRVSLAEKVIPATDLSEQISTAGTEASGTGNMKFMLNGALTIGTMDGANVEMAEEAGEENLFIFGMRIDDVAALDKKGYEAKEYYEALPELKLVIDQIDNGFFSPKQPDLFKDIINMLFYHDRFKVFADYEAYVKCQDKVSQLYMNPKAWNTMVLKNIAASGKFSSDRTIKEYAQNIWNVEPSDLKISLSNESNKVNGN

SEQ ID NO: 62165 - DNA, 2442 bp, Artificial Sequence
  derived and/or modified sequence
atggccaagcccctgaccgaccaggagaagagaagacagatcagcatcagaggcatcgtgggcgtggagaacgtggccgagctgaagaagagcttcaacagacacctgcacttcaccctggtgaaggacagaaacgtggccaccaccagagactactacttcgccctggcccacaccgtgagagaccacctggtgggcagatggatcagaacccagcagcactactacgacaagtgccccaagctgggcctggacatcgaggagctggaggagatcgaggaggacgccggcctgggcaacggcggcctgggcagactggccgcctgcttcctggacagcatggccaccctgggcctggccgcctacggctacggcatcagatacgagtacggcatcttcaaccagaagatcagagacggctggcaggtggaggaggccgacgactggctgagatacggcaacccctgggagaagagcagacccgagttcatgctgcccgtgcacttctacggcaaggtggagcacaccaacaccggcaccaagtggatcgacacccaggtggtgctggccctgccctacgacacccccgtgcccggctacatgaacaacaccgtgaacaccatgagactgtggagcgccagagcccccaacgacttcaacctgagagacttcaacgtgggcgactacatccaggccgtgctggacagaaacctggccgagaacatcagcagagtgctgtaccccaacgacaacttcttcgagggcaaggagctgagactgaagcaggagtacttcgtggtggccgccaccctgcaggacatcatcagaagattcaaggccagcaagttcggcagcaccagaggcgccggcaccgtgttcgacgccttccccgaccaggtggccatccagctgaacgacacccaccccgccctggccatccccgagctgatgagaatcttcgtggacatcgagaagctgccctggagcaaggcctgggagctgacccagaagaccttcgcctacaccaaccacaccgtgctgcccgaggccctggagagatggcccgtggacctggtggagaagctgctgcccagacacctggagatcatctacgagatcaaccagaagcacctggacagaatcgtggccctgttccccaaggacgtggacagactgagaagaatgagcctgatcgaggaggagggcagcaagagaatcaacatggcccacctgtgcatcgtgggcagccacgccgtgaacggcgtggccaagatccacagcgacatcgtgaagaccaaggtgttcaaggacttcagcgagctggagcccgacaagttccagaacaagaccaacggcatcacccccagaagatggctgctgctgtgcaaccccggcctggccgagctgatcgccgagaagatcggcgaggactacgtgaaggacctgagccagctgaccaagctgcacagcttcctgggcgacgacgtgttcctgagagagctggccaaggtgaagcaggagaacaagctgaagttcagccagttcctggagaccgagtacaaggtgaagatcaaccccagcagcatgttcgacgtgcaggtgaagagaatccacgagtacaagagacagctgctgaactgcctgcacgtgatcaccatgtacaacagaatcaagaaggaccccaagaagctgttcgtgcccagaaccgtgatcatcggcggcaaggccgcccccggctaccacatggccaagatgatcatcaagctgatcaccagcgtggccgacgtggtgaacaacgaccccatggtgggcagcaagctgaaggtgatcttcctggagaactacagagtgagcctggccgagaaggtgatccccgccaccgacctgagcgagcagatcagcaccgccggcaccgaggccagcggcaccggcaacatgaagttcatgctgaacggcgccctgaccatcggcaccatggacggcgccaacgtggagatggccgaggaggccggcgaggagaacctgttcatcttcggcatgagaatcgacgacgtggccgccctggacaagaagggctacgaggccaaggagtactacgaggccctgcccgagctgaagctggtgatcgaccagatcgacaacggcttcttcagccccaagcagcccgacctgttcaaggacatcatcaacatgctgttctaccacgacagattcaaggtgttcgccgactacgaggcctacgtgaagtgccaggacaaggtgagccagctgtacatgaaccccaaggcctggaacaccatggtgctgaagaacatcgccgccagcggcaagttcagcagcgacagaaccatcaaggagtacgcccagaacatctggaacgtggagcccagcgacctgaagatcagcctgagcaacgagagcaacaaggtgaacggcaactag

SEQ ID NO: 62166 - DNA, 2442 bp, Artificial Sequence
  derived and/or modified sequence
atggcaaaacccctcactgaccaggaaaagcgaagacagatctctattagaggcatcgtcggggtagaaaacgtggctgagctcaagaaatcattcaacaggcacctacacttcacgttggtgaaggaccggaacgtagccactaccagggattactacttcgccttggcccatacggtccgcgaccatttggtgggccgctggataagaacgcagcagcattactacgacaaatgcccaaaactcgggctggatatcgaggaactagaggagatagaggaggatgctggactgggcaatggcggcctaggcagacttgctgcatgctttctcgatagcatggccactcttgggctggccgcgtacgggtacgggatcagatacgaatatggcatctttaatcagaaaatccgcgatggctggcaggtggaagaggccgatgactggcttagatacggcaacccatgggagaagtcacgacccgagttcatgttgcctgtgcatttctacggcaaagtggaacatacaaacactggtacgaagtggattgatacccaggtggtcctggccctcccctatgatacgccagtccccggctatatgaacaatacagtgaatacgatgagactctggtctgctcgcgcacccaatgactttaatctgagggattttaatgttggggactacattcaagccgtacttgatagaaacttggccgaaaacattagccgtgtgttgtatcccaacgacaacttcttcgagggcaaagaactgagattgaagcaggaatattttgtcgtggctgctacattacaggacattatcagaaggtttaaggccagcaagtttggttccacgagaggcgctggtacagtgtttgatgcatttcccgatcaagtggccatccagctgaatgacactcaccctgccctcgccatccccgagctaatgagaatctttgtcgatatcgagaagctgccctggtctaaggcatgggagctcacgcagaagacgtttgcatacactaaccacactgtgctgccagaggcattagaacgctggccggtagatttggtagagaagctgttgccaaggcacttggagatcatatatgagataaatcagaaacacctggatcggattgtcgcactattccctaaggacgtggaccgtttgaggcgaatgtcattgatcgaggaggaaggctcaaagagaattaatatggcccacctctgtattgtgggtagtcacgccgtgaacggcgtcgccaaaatccactcagacatcgtaaagacaaaagtttttaaagacttcagcgagttagagcctgacaaattccagaataagactaacgggataactcctcggcgctggctgttgctgtgtaatccaggcctggcggagctcatcgccgaaaaaatcggagaggattacgtgaaagatctctcgcagctgaccaagctgcattcatttctgggtgatgacgtttttctgcgcgagttggccaaagtcaagcaggagaataaacttaagttttctcaatttttagagaccgagtacaaagtcaagataaaccccagttcgatgttcgatgttcaggtcaagagaatccacgagtacaagaggcagctgctcaattgcctgcacgtcatcacaatgtacaataggataaagaaagaccccaagaaactgttcgtccctaggacggtcattatcggcggtaaggctgctcctggctaccatatggccaagatgattatcaagcttatcacctcagtggcagatgtagtgaataacgaccctatggttggctctaaactcaaagttatcttcctggaaaactatcgggtgagcctagcagagaaggtgatcccagctaccgatctcagcgagcagatttccaccgcagggacagaggccagtgggaccgggaacatgaagtttatgcttaatggcgccctgacaattgggacaatggatggagccaatgtggaaatggcagaggaggcaggagaggagaacctgttcatttttggaatgaggattgatgacgtggcagccctggacaagaagggatatgaggcgaaggaatactatgaggcactgccagagctcaagttggttatcgaccagatcgataatggattcttttcacctaaacagccagatctttttaaggatatcatcaacatgctgttctatcatgaccgatttaaagtattcgctgattacgaagcttacgtgaagtgccaggacaaggtttcacaattatacatgaaccctaaggcgtggaataccatggtattgaagaacatagctgccagcgggaagttctctagcgaccggactatcaaggaatatgcccagaatatttggaatgtcgagccttccgatctgaagatctctctttctaacgaatcaaataaggtaaacggcaactag

SEQ ID NO: 62167 - DNA, 2442 bp, Artificial Sequence
  derived and/or modified sequence
atggccaagcccctgacagaccaggagaagaggcggcagatcagcatccggggcatcgtgggcgtggagaatgtggccgagctgaagaagagcttcaacagacacctgcacttcaccctggtgaaggacagaaatgtggccaccacccgggactactactttgccctggcccacacagtgcgggaccacctggtgggccgctggatccgcacccagcagcactactatgacaagtgccccaagctgggcctggacatcgaggagctggaggagattgaggaggatgctggcctgggcaatggaggcctgggccgcctggccgcctgcttcctggacagcatggccaccctgggcctggccgcctacggctacggcatccgctatgaatatggcatcttcaaccagaagatcagagatggctggcaggtggaggaggctgatgactggctgcgctatggcaacccctgggagaagagcaggcctgagttcatgctgcctgtgcacttctacggcaaggtggagcacaccaacacaggcaccaagtggattgacacccaggtggtgctggccctgccctatgacacccctgtgcccggctacatgaacaacacagtgaacaccatgaggctgtggagcgcccgggccccaaatgacttcaacctgcgggacttcaacgtgggggactacatccaggccgtgctggacaggaacctggccgagaacatcagccgggtgctgtacccaaatgacaacttctttgagggcaaggagctgcggctgaagcaggagtactttgtggtggccgccaccctgcaggacatcatccgccgcttcaaggccagcaagtttggcagcaccagaggagctggcaccgtgtttgatgccttcccagaccaggtggccatccagctgaatgacacccacccagccctggccatccctgagctgatgaggatctttgtggacatcgagaagctgccctggagcaaggcctgggagctgacccagaagacctttgcctacaccaaccacacagtgctgcctgaggccctggagcgctggcctgtggacctggtggagaagctgctgcccaggcacctggagatcatctatgagatcaaccagaagcacctggacagaattgtggccctcttccccaaggatgtggaccggctgcggaggatgagcctcatcgaggaggagggcagcaagaggatcaacatggcccacctgtgcatcgtgggcagccatgctgtgaatggagtggccaagatccacagcgacatcgtgaagaccaaggtgttcaaggacttcagcgagctggagccagacaagttccagaacaagaccaacggcatcaccccccggcgctggctgctgctgtgcaaccctggcctggccgagctgattgctgagaagatcggggaggactatgtgaaggacctgagccagctgaccaagctgcacagcttcctgggagatgatgtgttcctgcgggagctggccaaggtgaagcaggagaacaagctgaagttcagccagttcctggagacagagtacaaggtgaagatcaaccccagctccatgtttgatgtgcaggtgaagaggatccacgagtacaagaggcagctgctgaactgcctgcacgtgatcaccatgtacaaccgcatcaagaaggaccccaagaagctgtttgtgcccaggacagtcatcatcggcggcaaggccgcccctggctaccacatggccaagatgatcatcaagctgatcacctctgtggctgatgtggtgaacaatgaccccatggtgggcagcaagctgaaggtgatcttcctggagaactacagagtgtccctggccgagaaggtgatcccagccacagacctgtctgagcagatcagcacagctggaacagaggccagcggcactggaaacatgaagttcatgctgaatggagccctgaccatcggcaccatggatggagccaacgtggagatggccgaggaggccggggaggagaacctcttcatcttcggcatgagaattgatgatgtggccgccctggacaagaagggctatgaggccaaggagtactatgaggccctgcctgagctgaagctggtgattgaccagattgacaatggcttcttcagccccaagcagcctgacctcttcaaggacatcatcaacatgctgttctaccatgaccgcttcaaggtgtttgctgactatgaggcctacgtgaagtgccaggacaaggtgtcccagctgtacatgaaccccaaggcctggaacaccatggtgctgaagaacattgctgccagcggcaagttcagcagtgacaggaccatcaaggagtatgcccagaacatctggaatgtggagcccagcgacctgaagatcagcctgagcaatgaaagcaacaaggtgaatggaaattag

SEQ ID NO: 62168 - DNA, 2442 bp, Artificial Sequence
  derived and/or modified sequence
atggccaagcccctgaccgaccaggagaagcggcggcagatcagcattcgcggtatcgtgggcgttgagaacgtggcggagctgaagaaaagcttcaataggcacttgcatttcacactcgtgaaagaccggaatgtggcaacgactagagattattattttgcattggctcataccgtccgcgaccatttggtcggccggtggataaggactcagcagcactactacgacaaatgccccaaactggggctggatatcgaagaactggaggaaatcgaagaggatgccggcctgggaaatggcggtctcggccggcttgctgcttgcttcctcgacagtatggctacccttggcctggcagcttacgggtacggtatccgttacgaatatggcatcttcaatcagaagattagggacggatggcaggtggaggaagccgatgactggctccggtacggaaacccttgggaaaagtccaggcccgagttcatgttgccagtccacttttacggcaaggttgaacacaccaataccggaactaagtggattgatacacaggttgtacttgctctgccgtatgacaccccagtcccgggttatatgaacaacacagtgaatacaatgaggctgtggagcgcccgcgcacccaatgacttcaaccttcgcgactttaatgtgggtgactacatccaggctgtgttggaccgaaatttagcggagaatatcagcagagttttgtaccctaatgacaattttttcgaaggcaaggagctgcggttgaaacaggaatattttgtcgttgccgcgaccctccaggacatcatcaggagattcaaggcatcaaaatttggctctaccaggggcgccggcactgtgtttgacgcttttcccgatcaggttgctattcagctgaacgatacccaccctgcacttgcaatcccggagcttatgcgcattttcgtagatatcgagaagcttccgtggtctaaggcttgggagttaactcaaaaaacatttgcttataccaatcacacagtcctaccggaggctctcgagaggtggccggtggacctggtggaaaagctgctccccaggcatctggaaatcatttatgagataaaccaaaaacacttggaccggattgtcgctctgttccctaaggacgtggacaggctccgacgcatgtccttgatcgaggaagagggcagcaagcggatcaacatggcccatctgtgcatcgttggctctcacgctgtcaacggcgtggctaaaatacattccgacatcgtaaagactaaggtttttaaagatttctcagagctggagcccgacaagttccagaacaagaccaatggaatcactcctcggcgctggctcctcctgtgcaatcctggattggcagagcttatcgctgaaaagatcggggaagactacgtgaaggacctaagtcagcttacgaaattacacagtttcttgggggacgatgtgtttcttagagaactcgcaaaggtgaaacaagaaaataaattgaaatttagccaattcctcgaaacagaatacaaggtaaaaatcaacccctcttctatgtttgatgtccaggtcaagcggatccacgagtataaacggcagctgttgaactgtctacatgtgataactatgtataaccgtataaagaaagacccgaaaaagctgtttgtgccaagaaccgttattatcggaggcaaggccgcacctggatatcatatggctaaaatgatcataaagcttattacatcagtggcagatgtggtgaataatgatcctatggttggttccaaactcaaagtgatctttctcgagaactaccgggtgtccctggccgaaaaggtgattccagcaactgatctgtctgagcaaattagtacagcagggacggaggccagcggcaccggcaatatgaagtttatgctgaatggcgctttaaccattggcactatggacggcgctaatgtggagatggcagaggaagcgggtgaagagaacctctttatattcggcatgcggatagacgatgtcgccgcccttgacaaaaagggatatgaggctaaggagtactatgaagcacttcctgaactcaagttggttatagaccagattgacaacgggttctttagcccgaagcagcctgacttgttcaaagacatcatcaacatgctgttttaccacgacagatttaaggtgtttgccgattacgaagcttatgtgaagtgtcaggacaaggtctctcagctgtatatgaatccaaaggcctggaataccatggtgctgaagaacatcgcggcctcaggaaaattttctagtgacagaacgattaaggagtatgctcagaatatctggaatgtggaaccaagcgatctgaagatatctctgagtaatgagtccaacaaagtgaacggaaattag

SEQ ID NO: 62169 - DNA, 2442 bp, Artificial Sequence
  derived and/or modified sequence
atggcaaaacccctgaccgaccaggagaagcggaggcagattagtataagaggaatcgtcggggtagagaacgttgccgagttaaagaaaagcttcaaccgacatctgcatttcactctagtcaaggaccgaaatgtcgcaaccacccgcgattattacttcgccctcgcacataccgtccgcgatcaccttgtgggacggtggatcaggacacaacagcattactatgataaatgcccaaaactgggtttagacattgaggagctggaagaaatcgaagaggacgccggtcttgggaacggcggtttgggacgcctggccgcatgcttcttagactccatggccacccttggactcgcggcttacgggtacgggatacggtacgagtatggcatcttcaatcagaaaataagggatgggtggcaggtggaggaagcagacgattggctcagatacggcaatccttgggagaagtcgcgcccagaatttatgcttcccgtgcatttttacggcaaggtggagcacacaaacactggaaccaagtggatagatacacaggtagtgttggccctcccctacgacacaccagtgccgggatatatgaataatacagtgaatactatgcgactgtggtcggcacgcgctccaaacgactttaacctgagggattttaatgttggagattatatccaggcagtccttgatcgcaacctcgcagagaatatttcccgagtactgtatccaaatgataacttttttgagggtaaggaattgaggctgaagcaagaatacttcgtagttgcagcaactctgcaggacatcattcgccgatttaaggcttcgaaatttggttctactaggggagccggaaccgtgttcgacgcttttcctgatcaggttgcaatccagcttaacgacacacatcccgcactggctatcccagagctgatgcgcatctttgtcgacatagaaaaactgccctggtccaaagcttgggagctcacacagaagacatttgcatataccaaccacacagtcctccctgaagcactggagaggtggccagtggacttggtggaaaaactgctgcctcggcacctggaaattatttatgaaatcaatcagaagcatctggataggattgttgccctgttccccaaagacgtagacagactgcgccgtatgtccttaattgaagaagaggggtcaaagcgcatcaatatggcccatctctgcattgtggggtcccacgccgtcaatggcgtggctaagatacattctgatattgttaagacaaaggtattcaaggacttcagtgaactggagccagacaagttccaaaacaaaaccaatggcataacaccccgacggtggctgctgctttgcaaccccggactggcagagctgatcgcggaaaaaatcggcgaggattatgttaaagatttgagccagctgacgaaactacacagctttctgggggacgacgtgtttctgcgggaattggcaaaagtgaagcaagagaataagctgaaattctctcaatttctggagactgaatacaaagtcaaaataaatcccagctccatgttcgatgttcaggttaaaaggattcatgagtacaaaagacagctgctcaattgtctgcacgtgataaccatgtacaatcggatcaagaaagaccccaagaagctttttgtgccgagaactgtgattattggtggcaaggcagcccctggctaccacatggccaaaatgattataaagctgataacatccgtggccgacgtggtaaataacgatcccatggtcgggtccaaactgaaagtgatcttcctagagaactatcgggtgtctctggccgaaaaagttatcccagctaccgatcttagcgaacagatcagcaccgcaggtaccgaagcttctggcacaggtaatatgaagtttatgcttaacggcgcattgacaatagggacaatggacggcgctaacgtcgaaatggcagaggaggccggtgaggaaaacctctttatcttcgggatgaggattgatgatgtggccgcacttgacaagaaaggctatgaagccaaagagtattacgaggccctgccagagctcaagctcgtaatcgaccagatcgataatggatttttcagtccaaagcagcctgacctattcaaggatattatcaacatgctgttctaccacgaccgttttaaagttttcgccgattacgaagcttatgtcaaatgccaggataaggtcagtcagctgtacatgaatccaaaggcctggaataccatggtattgaagaatattgcagcctccggcaagttcagctctgacaggaccatcaaggaatatgcacagaacatttggaatgtcgaacccagcgacctcaaaatttctctgagtaatgaaagtaacaaggtgaacggaaactag

SEQ ID NO: 62170 - DNA, 2743 bp, Artificial Sequence
  derived and/or modified sequence
aaactttcgtgcgcgttgaaagctgctggcgcggcggggcggactccacccctgcccggcagcccagcgcctccggccgcacttccagctctctgcgcagcccgccgcgcagcccgccgccccagccatggcgaagcccctgacggaccaggagaagcggcggcagatcagcatccgcggcatcgtgggcgtggagaacgtggcagagctgaagaagagtttcaaccggcacctgcacttcacgctggtcaaggaccgcaacgtggccaccacccgcgactactacttcgcgctggcgcacacggtgcgcgaccacctggtggggcgctggatccgcacgcagcagcactactacgacaagtgccccaagcttggattggatatagaagagttagaagaaattgaagaagatgctggacttggcaatggtggtcttgggagacttgctgcctgcttcttggattccatggcaaccctgggacttgcagcctatggatacggcattcggtatgaatatgggattttcaatcagaagatccgagatggatggcaggtagaagaagcagatgattggctcagatatggaaacccttgggagaagtcccgcccagaattcatgctgcctgtgcacttctatggaaaagtagaacacaccaacaccgggaccaagtggattgacactcaagtggtcctggctctgccatatgacacccccgtgcccggctacatgaataacactgtcaacaccatgcgcctctggtctgctcgggcaccaaatgactttaacctcagagactttaatgttggagactacattcaggctgtgctggaccgaaacctggccgagaacatctcccgggtcctctatcccaatgacaatttttttgaagggaaggagctaagattgaagcaggaatactttgtggtggctgcaaccttgcaagatatcatccgccgtttcaaagcctccaagtttggctccacccgtggtgcaggaactgtgtttgatgccttcccggatcaggtggccatccagctgaatgacactcaccctgcactcgcgatccctgagctgatgaggatttttgtggatattgaaaaactgccctggtccaaggcatgggagctcacccagaagaccttcgcctacaccaaccacacagtgctcccggaagccctggagcgctggcccgtggacctggtggagaagctgctccctcgacatttggaaatcatttatgagataaatcagaagcatttagatagaattgtggccttgtttcctaaagatgtggaccgtctgagaaggatgtctctgatagaagaggaaggaagcaaaaggatcaacatggcccatctctgcattgtcggttcccatgctgtgaatggcgtggctaaaatccactcagacatcgtgaagactaaagtattcaaggacttcagtgagctagaacctgacaagtttcagaataaaaccaatgggatcactccaaggcgctggctcctactctgcaacccaggacttgcagagctcatagcagagaaaattggagaagactatgtgaaagacctgagccagctgacgaagctccacagcttcctgggtgatgatgtcttcctccgggaactcgccaaggtgaagcaggagaataagctgaagttttctcagttcctggagacggagtacaaagtgaagatcaacccatcctccatgtttgatgtccaggtgaagaggatacatgagtacaagcgacagctcttgaactgtctgcatgtgatcacgatgtacaaccgcattaagaaagaccctaagaagttattcgtgccaaggacagttatcattggtggtaaagctgccccaggatatcacatggccaaaatgatcataaagctgatcacttcagtggcagatgtggtgaacaatgaccctatggttggaagcaagttgaaagtcatcttcttggagaactacagagtatctcttgctgaaaaagtcattccagccacagatctgtcagagcagatttccactgcaggcaccgaagcctcggggacaggcaatatgaagttcatgctaaatggggccctaactatcgggaccatggatggggccaatgtggaaatggcagaagaagctggggaagagaacctgttcatctttggcatgaggatagatgatgtggctgctttggacaagaaagggtacgaggcaaaagaatactatgaggcacttccagagctgaagctggtcattgatcaaattgacaatggctttttttctcccaagcagcctgacctcttcaaagatatcatcaacatgctattttatcatgacaggtttaaagtctttgcagactacgaagcctatgtcaagtgtcaagataaagtgagtcagctgtacatgaatccaaaggcctggaacacaatggtactcaaaaacatagctgcctcggggaaattctccagtgaccgaacaattaaagaatatgcccaaaacatctggaacgtggaaccttcagatctaaagatttctctatccaatgaatctaacaaagtcaatggaaattgaactctagaattgtctctagaaaacatagcttcttactgaacttgaacatttttacaacattcactggtttttgttttgttagctaataatctataatagttgagtatctctgggaatggggagggaaattatatgtaatagagcttaaaaataaagtgtcaatttccaagggct

SEQ ID NO: 62171 - protein, 1257 aa, Artificial Sequence
  derived and/or modified sequence
MENSERAEEMQENYQRNGTAEEQPKLRKEAVGSIEIFRFADGLDITLMILGILASLVNGACLPLMPLVLGEMSDNLISGCLVQTNTTNYQNCTQSQEKLNEDMTLLTLYYVGIGVAALIFGYIQISLWIITAARQTKRIRKQFFHSVLAQDIGWFDSCDIGELNTRMTDDIDKISDGIGDKIALLFQNMSTFSIGLAVGLVKGWKLTLVTLSTSPLIMASAAACSRMVISLTSKELSAYSKAGAVAEEVLSSIRTVIAFRAQEKELQRYTQNLKDAKDFGIKRTIASKVSLGAVYFFMNGTYGLAFWYGTSLILNGEPGYTIGTVLAVFFSVIHSSYCIGAAVPHFETFAIARGAAFHIFQVIDKKPSIDNFSTAGYKPESIEGTVEFKNVSFNYPSRPSIKILKGLNLRIKSGETVALVGLNGSGKSTVVQLLQRLYDPDDGFIMVDENDIRALNVRHYRDHIGVVSQEPVLFGTTISNNIKYGRDDVTDEEMERAAREANAYDFIMEFPNKFNTLVGEKGAQMSGGQKQRIAIARALVRNPKILILDEATSALDSESKSAVQAALEKASKGRTTIVVAHRLSTIRSADLIVTLKDGMLAEKGAHAELMAKRGLYYSLVMSQDIKKADEQMESMTYSTERKTNSLPLHSVKSIKSDFIDKAEESTQSKEISLPEVSLLKILKLNKPEWPFVVLGTLASVLNGTVHPVFSIIFAKIITMFGNNDKTTLKHDAEIYSMIFVILGVICFVSYFMQGLFYGRAGEILTMRLRHLAFKAMLYQDIAWFDEKENSTGGLTTILAIDIAQIQGATGSRIGVLTQNATNMGLSVIISFIYGWEMTFLILSIAPVLAVTGMIETAAMTGFANKDKQELKHAGKIATEALENIRTIVSLTREKAFEQMYEEMLQTQHRNTSKKAQIIGSCYAFSHAFIYFAYAAGFRFGAYLIQAGRMTPEGMFIVFTAIAYGAMAIGETLVLAPEYSKAKSGAAHLFALLEKKPNIDSRSQEGKKPDTCEGNLEFREVSFFYPCRPDVFILRGLSLSIERGKTVAFVGSSGCGKSTSVQLLQRLYDPVQGQVLFDGVDAKELNVQWLRSQIAIVPQEPVLFNCSIAENIAYGDNSRVVPLDEIKEAANAANIHSFIEGLPEKYNTQVGLKGAQLSGGQKQRLAIARALLQKPKILLLDEATSALDNDSEKVVQHALDKARTGRTCLVVTHRLSAIQNADLIVVLHNGKIKEQGTHQELLRNRDIYFKLVNAQSVQ

SEQ ID NO: 62172 - DNA, 2439 bp, Artificial Sequence
  derived and/or modified sequence
atggtggacgagaacgacatcagagccctgaacgtgagacactacagagaccacatcggcgtggtgagccaggagcccgtgctgttcggcaccaccatcagcaacaacatcaagtacggcagagacgacgtgaccgacgaggagatggagagagccgccagagaggccaacgcctacgacttcatcatggagttccccaacaagttcaacaccctggtgggcgagaagggcgcccagatgagcggcggccagaagcagagaatcgccatcgccagagccctggtgagaaaccccaagatcctgatcctggacgaggccaccagcgccctggacagcgagagcaagagcgccgtgcaggccgccctggagaaggccagcaagggcagaaccaccatcgtggtggcccacagactgagcaccatcagaagcgccgacctgatcgtgaccctgaaggacggcatgctggccgagaagggcgcccacgccgagctgatggccaagagaggcctgtactacagcctggtgatgagccaggacatcaagaaggccgacgagcagatggagagcatgacctacagcaccgagagaaagaccaacagcctgcccctgcacagcgtgaagagcatcaagagcgacttcatcgacaaggccgaggagagcacccagagcaaggagatcagcctgcccgaggtgagcctgctgaagatcctgaagctgaacaagcccgagtggcccttcgtggtgctgggcaccctggccagcgtgctgaacggcaccgtgcaccccgtgttcagcatcatcttcgccaagatcatcaccatgttcggcaacaacgacaagaccaccctgaagcacgacgccgagatctacagcatgatcttcgtgatcctgggcgtgatctgcttcgtgagctacttcatgcagggcctgttctacggcagagccggcgagatcctgaccatgagactgagacacctggccttcaaggccatgctgtaccaggacatcgcctggttcgacgagaaggagaacagcaccggcggcctgaccaccatcctggccatcgacatcgcccagatccagggcgccaccggcagcagaatcggcgtgctgacccagaacgccaccaacatgggcctgagcgtgatcatcagcttcatctacggctgggagatgaccttcctgatcctgagcatcgcccccgtgctggccgtgaccggcatgatcgagaccgccgccatgaccggcttcgccaacaaggacaagcaggagctgaagcacgccggcaagatcgccaccgaggccctggagaacatcagaaccatcgtgagcctgaccagagagaaggccttcgagcagatgtacgaggagatgctgcagacccagcacagaaacaccagcaagaaggcccagatcatcggcagctgctacgccttcagccacgccttcatctacttcgcctacgccgccggcttcagattcggcgcctacctgatccaggccggcagaatgacccccgagggcatgttcatcgtgttcaccgccatcgcctacggcgccatggccatcggcgagaccctggtgctggcccccgagtacagcaaggccaagagcggcgccgcccacctgttcgccctgctggagaagaagcccaacatcgacagcagaagccaggagggcaagaagcccgacacctgcgagggcaacctggagttcagagaggtgagcttcttctacccctgcagacccgacgtgttcatcctgagaggcctgagcctgagcatcgagagaggcaagaccgtggccttcgtgggcagcagcggctgcggcaagagcaccagcgtgcagctgctgcagagactgtacgaccccgtgcagggccaggtgctgttcgacggcgtggacgccaaggagctgaacgtgcagtggctgagaagccagatcgccatcgtgccccaggagcccgtgctgttcaactgcagcatcgccgagaacatcgcctacggcgacaacagcagagtggtgcccctggacgagatcaaggaggccgccaacgccgccaacatccacagcttcatcgagggcctgcccgagaagtacaacacccaggtgggcctgaagggcgcccagctgagcggcggccagaagcagagactggccatcgccagagccctgctgcagaagcccaagatcctgctgctggacgaggccaccagcgccctggacaacgacagcgagaaggtggtgcagcacgccctggacaaggccagaaccggcagaacctgcctggtggtgacccacagactgagcgccatccagaacgccgacctgatcgtggtgctgcacaacggcaagatcaaggagcagggcacccaccaggagctgctgagaaacagagacatctacttcaagctggtgaacgcccagagcgtgcagtag

SEQ ID NO: 62173 - DNA, 3774 bp, Artificial Sequence
  derived and/or modified sequence
atggagaacagcgagagagccgaggagatgcaggagaactaccagagaaacggcaccgccgaggagcagcccaagctgagaaaggaggccgtgggcagcatcgagatcttcagattcgccgacggcctggacatcaccctgatgatcctgggcatcctggccagcctggtgaacggcgcctgcctgcccctgatgcccctggtgctgggcgagatgagcgacaacctgatcagcggctgcctggtgcagaccaacaccaccaactaccagaactgcacccagagccaggagaagctgaacgaggacatgaccctgctgaccctgtactacgtgggcatcggcgtggccgccctgatcttcggctacatccagatcagcctgtggatcatcaccgccgccagacagaccaagagaatcagaaagcagttcttccacagcgtgctggcccaggacatcggctggttcgacagctgcgacatcggcgagctgaacaccagaatgaccgacgacatcgacaagatcagcgacggcatcggcgacaagatcgccctgctgttccagaacatgagcaccttcagcatcggcctggccgtgggcctggtgaagggctggaagctgaccctggtgaccctgagcaccagccccctgatcatggccagcgccgccgcctgcagcagaatggtgatcagcctgaccagcaaggagctgagcgcctacagcaaggccggcgccgtggccgaggaggtgctgagcagcatcagaaccgtgatcgccttcagagcccaggagaaggagctgcagagatacacccagaacctgaaggacgccaaggacttcggcatcaagagaaccatcgccagcaaggtgagcctgggcgccgtgtacttcttcatgaacggcacctacggcctggccttctggtacggcaccagcctgatcctgaacggcgagcccggctacaccatcggcaccgtgctggccgtgttcttcagcgtgatccacagcagctactgcatcggcgccgccgtgccccacttcgagaccttcgccatcgccagaggcgccgccttccacatcttccaggtgatcgacaagaagcccagcatcgacaacttcagcaccgccggctacaagcccgagagcatcgagggcaccgtggagttcaagaacgtgagcttcaactaccccagcagacccagcatcaagatcctgaagggcctgaacctgagaatcaagagcggcgagaccgtggccctggtgggcctgaacggcagcggcaagagcaccgtggtgcagctgctgcagagactgtacgaccccgacgacggcttcatcatggtggacgagaacgacatcagagccctgaacgtgagacactacagagaccacatcggcgtggtgagccaggagcccgtgctgttcggcaccaccatcagcaacaacatcaagtacggcagagacgacgtgaccgacgaggagatggagagagccgccagagaggccaacgcctacgacttcatcatggagttccccaacaagttcaacaccctggtgggcgagaagggcgcccagatgagcggcggccagaagcagagaatcgccatcgccagagccctggtgagaaaccccaagatcctgatcctggacgaggccaccagcgccctggacagcgagagcaagagcgccgtgcaggccgccctggagaaggccagcaagggcagaaccaccatcgtggtggcccacagactgagcaccatcagaagcgccgacctgatcgtgaccctgaaggacggcatgctggccgagaagggcgcccacgccgagctgatggccaagagaggcctgtactacagcctggtgatgagccaggacatcaagaaggccgacgagcagatggagagcatgacctacagcaccgagagaaagaccaacagcctgcccctgcacagcgtgaagagcatcaagagcgacttcatcgacaaggccgaggagagcacccagagcaaggagatcagcctgcccgaggtgagcctgctgaagatcctgaagctgaacaagcccgagtggcccttcgtggtgctgggcaccctggccagcgtgctgaacggcaccgtgcaccccgtgttcagcatcatcttcgccaagatcatcaccatgttcggcaacaacgacaagaccaccctgaagcacgacgccgagatctacagcatgatcttcgtgatcctgggcgtgatctgcttcgtgagctacttcatgcagggcctgttctacggcagagccggcgagatcctgaccatgagactgagacacctggccttcaaggccatgctgtaccaggacatcgcctggttcgacgagaaggagaacagcaccggcggcctgaccaccatcctggccatcgacatcgcccagatccagggcgccaccggcagcagaatcggcgtgctgacccagaacgccaccaacatgggcctgagcgtgatcatcagcttcatctacggctgggagatgaccttcctgatcctgagcatcgcccccgtgctggccgtgaccggcatgatcgagaccgccgccatgaccggcttcgccaacaaggacaagcaggagctgaagcacgccggcaagatcgccaccgaggccctggagaacatcagaaccatcgtgagcctgaccagagagaaggccttcgagcagatgtacgaggagatgctgcagacccagcacagaaacaccagcaagaaggcccagatcatcggcagctgctacgccttcagccacgccttcatctacttcgcctacgccgccggcttcagattcggcgcctacctgatccaggccggcagaatgacccccgagggcatgttcatcgtgttcaccgccatcgcctacggcgccatggccatcggcgagaccctggtgctggcccccgagtacagcaaggccaagagcggcgccgcccacctgttcgccctgctggagaagaagcccaacatcgacagcagaagccaggagggcaagaagcccgacacctgcgagggcaacctggagttcagagaggtgagcttcttctacccctgcagacccgacgtgttcatcctgagaggcctgagcctgagcatcgagagaggcaagaccgtggccttcgtgggcagcagcggctgcggcaagagcaccagcgtgcagctgctgcagagactgtacgaccccgtgcagggccaggtgctgttcgacggcgtggacgccaaggagctgaacgtgcagtggctgagaagccagatcgccatcgtgccccaggagcccgtgctgttcaactgcagcatcgccgagaacatcgcctacggcgacaacagcagagtggtgcccctggacgagatcaaggaggccgccaacgccgccaacatccacagcttcatcgagggcctgcccgagaagtacaacacccaggtgggcctgaagggcgcccagctgagcggcggccagaagcagagactggccatcgccagagccctgctgcagaagcccaagatcctgctgctggacgaggccaccagcgccctggacaacgacagcgagaaggtggtgcagcacgccctggacaaggccagaaccggcagaacctgcctggtggtgacccacagactgagcgccatccagaacgccgacctgatcgtggtgctgcacaacggcaagatcaaggagcagggcacccaccaggagctgctgagaaacagagacatctacttcaagctggtgaacgcccagagcgtgcagtag

SEQ ID NO: 62174 - DNA, 2439 bp, Artificial Sequence
  derived and/or modified sequence
atggtagatgaaaacgacattagggctctaaacgttagacactacagagaccacattggtgtggtaagtcaggagcccgttttgttcggaacaacaatcagcaataatatcaaatatgggcgggatgacgtaacagacgaagagatggagagagcagctcgagaggcaaatgcctatgattttatcatggagttcccaaacaaatttaacacccttgtgggggaaaagggcgcccagatgagcgggggtcaaaagcagcggattgccatcgccagggcactggtccgaaatcccaaaatcctcatcctggacgaggccaccagtgctttagattcggagagcaagagcgccgtgcaggctgctctggagaaggcaagcaagggtaggactaccattgtggtggctcaccgcctgtcgaccattaggagcgctgatctcattgtcactcttaaagatgggatgctagccgaaaagggtgcccacgctgaactgatggcaaagcgcgggttatactattccctggtgatgtcccaggatattaagaaagctgacgaacaaatggagagtatgacatactccactgagcgaaagacaaatagccttccgttacacagcgtgaaatccattaagtccgacttcatcgacaaagccgaagaaagcacccagtccaaagagattagccttcccgaagtgagccttctgaagattctgaagcttaataagcccgagtggccttttgtcgtgttgggcaccctggcctccgtgcttaacggtacagtgcatccagtgttcagcattattttcgctaaaatcataaccatgtttgggaataatgataaaaccaccctgaaacacgacgccgaaatctattctatgattttcgtgattctgggggttatctgttttgtgtcttactttatgcaaggacttttttatggcagagcaggtgagatcctgacgatgaggctcagacaccttgcgttcaaagcgatgctgtatcaggacatcgcttggttcgatgaaaaagaaaactcaaccggtggcctcacaacaatacttgcaattgacatcgctcaaattcagggcgccacggggtccaggatcggcgttttgactcaaaacgctactaacatgggcttgtccgtgataataagtttcatctatggatgggagatgactttcttaatcctgtcgattgctccagtgctggctgtgacaggcatgattgaaacagccgcaatgacaggcttcgcaaacaaggacaagcaggagctcaagcacgcgggcaagatcgccacggaagcgctggagaatattcgtacaattgtgtcactgactcgtgaaaaggcctttgagcaaatgtatgaggagatgctgcaaacccagcataggaacaccagtaagaaggcgcaaataattggtagctgttatgcctttagtcacgcctttatttactttgcttatgctgcgggcttcaggtttggggcatatctcatccaggctggccgaatgacccccgagggcatgttcatcgtattcacagctattgcctatggcgccatggcaataggtgagaccctggtccttgcccctgagtattcaaaagcgaagtccggggccgcacacttgtttgctctcctcgagaaaaaacctaacatagatagccgcagtcaggaagggaaaaagcctgacacgtgtgagggaaacctagagttccgtgaggtgagctttttttacccatgccggcctgacgtgtttatactgcgagggctttcactttctattgagagaggcaagactgtcgcctttgtagggtcgtctggctgcggtaagtctacctcagtccagcttttgcaaaggttgtatgaccccgtacagggccaggtgttatttgatggtgtcgatgctaaggagctaaacgtccaatggttgaggtctcagattgctatcgtgcctcaggaaccagtattatttaactgcagtatcgcggaaaatattgcttacggtgataattccagggttgtgccattggatgaaatcaaggaagccgcaaacgccgccaacattcatagtttcattgaggggctcccagaaaagtataacacccaggtcggattaaagggcgcccaactcagcgggggccaaaaacagagattggccattgcgagagcccttctgcagaaacctaagatcctgctgctcgatgaggccacatccgctctggacaacgacagcgagaaggtggtccaacatgcgctggacaaggcaaggacgggtaggacatgtctggtggttactcaccggctctctgctattcagaacgctgacctcatcgttgtgctacacaacgggaaaattaaagagcaaggaacccaccaggagttgctgcgcaacagggatatctatttcaagctggttaatgcacaatctgtgcagtag

SEQ ID NO: 62175 - DNA, 3774 bp, Artificial Sequence
  derived and/or modified sequence
atggagaactcagagcgcgctgaggaaatgcaggagaactaccagcgtaatggaaccgctgaggaacagccgaaactgagaaaagaagccgtcggaagcattgaaatcttccgttttgccgacggactggacattacactcatgattcttgggatcctagctagtctggtcaacggggcctgcttgcctctaatgccattagtgcttggcgaaatgagtgataacctgatatctggttgtctggttcaaacaaatactaccaattatcagaattgtacacagagtcaggagaagctgaatgaggacatgacactccttacactgtattacgtgggtatcggggtcgcggctctgatatttggctatatccagatcagcctgtggatcattacggccgcaagacagaccaagcggattcgcaagcagttttttcactcagtgctggcccaggacatcggttggttcgattcttgcgatatcggggagcttaatacgagaatgacagatgacatagacaaaattagtgacggaattggcgacaagatagctctgttatttcaaaatatgtccacttttagtataggactggctgtcggtctggtgaagggctggaaactgaccctcgtcacactaagtacctcaccacttataatggcttcagccgccgcctgcagccgtatggtcatctcgttgacatcaaaagaactgtccgcttattcaaaagccggagccgtggctgaggaggtcctgagctcgatccggacagtcatcgcctttcgggctcaggagaaagagctgcagcggtacacccagaacttaaaagatgccaaggattttggtatcaagagaactattgcatccaaggtttcccttggagctgtatactttttcatgaacgggacctacgggctggccttctggtacggaacctccctgatccttaacggtgaaccaggatataccatcgggactgttctggcggtttttttctcagtcatccactcttcgtactgcatcggggctgccgtaccgcacttcgaaacctttgctatagcaaggggtgccgctttccacatttttcaggtgatagataaaaagccctcaatcgacaatttctctaccgcaggatacaagccagaatcaattgagggaacagtcgaatttaagaacgtgagcttcaattacccttcccgcccatctattaagatcctgaagggcctgaatctgcggatcaagtctggagagacagtcgcgctggtgggcctgaacggaagcggtaaatcaaccgtggtgcagctgctgcagcgcctatacgatccagatgacggattcatcatggtggacgaaaacgacataagagcactgaacgtgagacattacagggaccatatcggagtggtttcgcaggagcctgtattgttcggaactactatctctaataatatcaagtacgggagagacgacgtcacggacgaagaaatggaacgcgcagccagggaggctaacgcgtacgacttcattatggaatttcccaataagttcaataccttggtgggcgagaaaggagcccagatgtcgggtggccagaaacagcggatcgccatcgccagggccttggtgcgaaacccaaagatcctgatcctggatgaagcgacgagcgcactagattctgaatccaagtccgccgttcaagccgccctggagaaggcatctaagggcaggaccaccattgtggttgcccaccggctgtctactattagatcagccgatctaatagtaacacttaaggatggcatgttagcagaaaagggcgcacacgccgagctgatggcaaaaagggggctatactactcactcgtgatgagtcaagacatcaagaaggcagatgaacagatggagagcatgacatacagcaccgaaaggaagaccaatagtcttccactccacagtgtgaagtctatcaagtctgatttcatagataaagccgaagaatctacacagtccaaagagatctctctgccggaagtgtccctgctcaagatcctcaagcttaataagcccgagtggccttttgtggtgctaggtaccctcgcatccgtcttgaacgggaccgtccacccagtgttttccattatcttcgcaaaaattattaccatgttcggcaacaatgacaaaaccactcttaagcatgacgctgagatatactctatgatctttgtgatcctgggcgtcatctgcttcgtttcatattttatgcagggcctcttctacgggcgcgccggggaaatcctaaccatgagattaagacatctcgctttcaaggcgatgctgtatcaagatatagcttggttcgacgagaaagaaaattcgacaggcggcctcacaacaatacttgcaattgatatagcccaaatccagggagcaactggatctaggatcggtgttctgacacagaacgcaaccaatatgggcttatctgtgatcatctcctttatatacggctgggagatgaccttccttattctcagcatcgctccagtcctggctgtgaccggcatgattgaaaccgctgcgatgactgggttcgccaacaaggacaagcaggagcttaaacacgccggaaagattgcaaccgaagcattggagaatattagaacaatcgtgagcttaaccagagagaaagcgttcgaacagatgtacgaagagatgctacaaacccagcacaggaataccagcaagaaggcccagatcatcggcagctgttacgctttctcccacgcttttatttactttgcgtatgctgctggcttcagatttggcgcctacttgattcaagcaggacggatgactcccgagggtatgttcattgtgttcactgctatcgcgtacggggccatggccattggtgaaacccttgtcctggccccagaatactctaaagccaaatccggagcagcacacctatttgctttgcttgaaaaaaaaccaaacatcgattcacggtctcaggaaggcaagaagcctgacacgtgtgaaggtaatctggagttcagggaagtgagcttcttttacccctgccgcccagatgtgtttatcctccgaggactgtcattgtctatcgaacgcggcaaaacggtagcattcgtcggatcttcagggtgcgggaagtccacatctgtgcaacttctccagcgcctgtatgaccctgtgcagggccaagttttatttgatggagttgacgctaaggaactgaacgtccagtggctgagatcccagattgcaatcgtccctcaggaacctgtactcttcaattgtagtatcgccgagaatatagcttatggcgacaattcacgggtcgttccattggatgagatcaaggaagcagcaaacgctgctaacatacactcttttatcgaaggactgcccgagaagtacaacacgcaagtgggtctaaagggagcccagctgtctggtggtcagaagcaacgcctagccatagcacgggctcttctgcagaaacccaagattttactcctcgacgaggccacatctgctttggacaacgactctgaaaaagtcgtgcagcatgcactggacaaggccagaactggtagaacgtgcctggtagtcactcaccgactcagcgcaattcagaacgcggacctaatcgtggttctgcacaacggtaaaatcaaagaacagggcacacatcaagaactgctgagaaatagggacatctactttaagctggtgaacgcccagagtgtccagtag

SEQ ID NO: 62176 - DNA, 2439 bp, Artificial Sequence
  derived and/or modified sequence
atggtggatgaaaatgacatccgggccctgaatgtgcgccactacagagaccacatcggcgtggtgtcccaggagcctgtgctgtttggcaccaccatcagcaacaacatcaagtatggaagagatgatgtgacagatgaggagatggagcgggccgcccgggaggccaatgcctatgacttcatcatggagttccccaacaagttcaacaccctggtgggggagaagggggcccagatgtctgggggccagaagcagagaattgccatcgcccgggccctggtgaggaaccccaagatcctgatcctggatgaggccaccagcgccctggacagcgagagcaagtctgctgtgcaggccgccctggagaaggccagcaaaggaagaaccaccatcgtggtggcccaccggctgagcaccatccgctctgctgacctgattgtgaccctgaaggatggcatgctggccgagaagggggcccacgccgagctgatggccaagaggggcctgtactacagcctggtgatgagccaggacatcaagaaggcagatgagcagatggagagcatgacctacagcacagagaggaagaccaacagcctgcccctgcacagcgtgaagagcatcaagagtgacttcatcgacaaggccgaggagagcacccagagcaaggagatcagcctgcctgaggtgtccctgctgaagatcctgaagctgaacaagccagagtggccctttgtggtgctgggcaccctggcctctgtgctgaatggaacagtgcaccctgtgttcagcatcatctttgccaagatcatcaccatgtttggaaataatgacaagaccaccctgaagcatgatgctgagatctacagcatgatcttcgtcatcctgggcgtcatctgctttgtgtcctacttcatgcagggcctcttctacggccgggccggggagatcctgaccatgaggctgcggcacctggccttcaaggccatgctgtaccaggacatcgcctggtttgatgagaaggagaacagcactggaggcctgaccaccatcctggccattgatattgcccagatccagggcgccaccggcagccgcatcggcgtgctgacccagaatgccaccaacatgggcctgagcgtcatcatctccttcatctacggctgggagatgaccttcctgatcctgagcatcgcccctgtgctggccgtgacaggcatgattgaaacagctgccatgactggatttgccaacaaggacaagcaggagctgaagcacgccggcaagatcgccacagaggccctggagaacatccgcaccatcgtgtccctgacccgggagaaggcctttgagcagatgtatgaggagatgctgcagacccagcacaggaacaccagcaagaaggcccagatcatcggcagctgctacgccttcagccacgccttcatctactttgcctatgctgctggcttccgctttggagcctacctgatccaggccggccgcatgaccccagagggcatgtttattgtgttcaccgccatcgcctacggggccatggccatcggggagaccctggtgctggcccctgagtacagcaaggccaagagcggggccgcccacctgtttgccctgctggagaagaagcccaacatcgacagccgcagccaggagggcaagaagccagacacctgtgagggcaacctggagttccgggaggtgtccttcttctacccctgcaggccagatgtgttcatcctgcggggcctgagcctgagcattgagcggggcaagacagtggcctttgtgggcagcagcggctgcggcaagagcacctctgtgcagctgctgcagaggctgtatgaccctgtgcagggccaggtgctgtttgatggagtggatgccaaggagctgaatgtgcagtggctgcggagccagatcgccatcgtgccccaggagcctgtgctcttcaactgcagcattgctgagaacatcgcctacggggacaacagccgggtggtgcccctggatgagatcaaggaggccgccaatgctgccaacatccacagcttcatcgagggcctgcctgagaagtacaacacccaggtgggcctgaagggggcccagctgagcggcggccagaagcagaggctggccatcgcccgggccctgctgcagaagcccaagatcctgctgctggatgaggccaccagcgccctggacaatgattctgagaaggtggtgcagcacgccctggacaaggccaggacaggccgcacctgcctggtggtgacccaccggctgagcgccatccagaatgctgacctgattgtggtgctgcacaacgggaagatcaaggagcagggcacccaccaggagctgctgaggaacagagacatctacttcaagctggtgaatgcccagagcgtgcagtag

SEQ ID NO: 62177 - DNA, 3774 bp, Artificial Sequence
  derived and/or modified sequence
atggagaacagcgagagagctgaggagatgcaggagaactaccagagaaatggaacagctgaggagcagcccaagctgaggaaggaggccgtgggcagcattgagatcttccgctttgctgatggcctggacatcaccctgatgatcctgggcatcctggccagcctggtgaatggagcctgcctgcccctgatgcccctggtgctgggggagatgtctgacaacctgatcagcggctgcctggtgcagaccaacaccaccaactaccagaactgcacccagagccaggagaagctgaatgaagacatgaccctgctgaccctgtactacgtgggcattggagtggccgccctgatcttcggctacatccagatcagcctgtggatcatcacagctgcccggcagaccaagaggatcaggaagcagttcttccacagcgtgctggcccaggacatcggctggtttgacagctgtgacatcggggagctgaacaccaggatgacagatgacatcgacaagatcagtgatggcatcggggacaagatcgccctgctcttccagaacatgagcaccttcagcatcggcctggccgtgggcctggtgaagggctggaagctgaccctggtgaccctgagcaccagccccctcatcatggccagcgctgctgcctgcagcaggatggtgatcagcctgaccagcaaggagctgagcgcctacagcaaggccggggctgtggccgaggaggtgctgagcagcatcagaacagtgattgccttccgggcccaggagaaggagctgcagcgctacacccagaacctgaaggatgccaaggactttggcatcaagaggaccatcgccagcaaggtgtccctgggcgctgtgtacttcttcatgaatggcacctacggcctggccttctggtacggcaccagcctcatcctgaatggagagcccggctacaccatcggcaccgtgctggccgtgttcttcagcgtcatccacagcagctactgcattggagctgctgtgccccactttgagacctttgccatcgcccggggagctgccttccacatcttccaggtgattgacaagaagcccagcattgacaacttcagcacagctggctacaagccagagagcattgagggcaccgtggagttcaagaatgtgtccttcaactaccccagccggcccagcatcaagatcctgaagggcctgaacctgcgcatcaagtctggagagaccgtggccctggtgggcctgaatggaagtggcaagagcacagtggtgcagctgctgcagaggctgtatgaccctgatgatggcttcatcatggtggatgaaaatgacatccgggccctgaatgtgcgccactacagagaccacatcggcgtggtgtcccaggagcctgtgctgtttggcaccaccatcagcaacaacatcaagtatggaagagatgatgtgacagatgaggagatggagagagctgcccgggaggccaatgcctatgacttcatcatggagttccccaacaagttcaacaccctggtgggggagaagggggcccagatgtctgggggccagaagcagagaattgccatcgcccgggccctggtgaggaaccccaagatcctgatcctggatgaggccaccagcgccctggacagcgagagcaagtctgctgtgcaggccgccctggagaaggccagcaagggccgcaccaccatcgtggtggcccaccggctgagcaccatccgctctgctgacctgattgtgaccctgaaggatggcatgctggccgagaagggggcccatgctgagctgatggccaagaggggcctgtactacagcctggtgatgagccaggacatcaagaaggcagatgagcagatggagagcatgacctacagcacagagaggaagaccaacagcctgcccctgcacagcgtgaagagcatcaagagtgacttcatcgacaaggccgaggagagcacccagagcaaggagatcagcctgcctgaggtgtccctgctgaagatcctgaagctgaacaagccagagtggccctttgtggtgctgggcaccctggcctctgtgctgaatggcaccgtgcaccctgtgttcagcatcatctttgccaagatcatcaccatgtttggaaataatgacaagaccaccctgaagcatgatgctgagatctacagcatgatctttgtgatcctgggcgtcatctgctttgtgtcctacttcatgcagggcctcttctacggccgggccggggagatcctgaccatgaggctgcggcacctggccttcaaggccatgctgtaccaggacatcgcctggtttgatgagaaggagaacagcactggaggcctgaccaccatcctggccatcgacatcgcccagatccagggcgccaccggcagcagaattggagtgctgacccagaatgccaccaacatgggcctgagcgtcatcatctccttcatctacggctgggagatgaccttcctgatcctgagcatcgcccctgtgctggccgtgacaggcatgattgaaacagctgccatgacaggctttgccaacaaggacaagcaggagctgaagcatgctgggaagatcgccacagaggccctggagaacatccgcaccatcgtgtccctgacccgggagaaggcctttgagcagatgtatgaggagatgctgcagacccagcacaggaacaccagcaagaaggcccagatcatcggcagctgctacgccttcagccacgccttcatctactttgcctatgctgctggcttccgctttggagcctacctgatccaggccggccgcatgaccccagagggcatgttcatcgtgttcaccgccatcgcctatggagccatggccatcggggagaccctggtgctggcccctgagtacagcaaggccaagtctggagctgcccacctgtttgccctgctggagaagaagcccaacatcgacagccgcagccaggagggcaagaagccagacacctgtgagggcaacctggagttccgggaggtgtccttcttctacccctgcaggccagatgtgttcatcctgcggggcctgagcctgagcattgaaagaggcaagacagtggcctttgtgggcagcagcggctgtgggaagagcacctctgtgcagctgctgcagaggctgtatgaccctgtgcagggccaggtgctgtttgatggagtggatgccaaggagctgaatgtgcagtggctgcggagccagatcgccatcgtgccccaggagcctgtgctcttcaactgcagcattgctgaaaatattgcctatggagacaacagccgggtggtgcccctggatgagatcaaggaggccgccaatgctgccaacatccacagcttcatcgagggcctgcctgagaagtacaacacccaggtgggcctgaagggggcccagctgagcggcggccagaagcagaggctggccatcgcccgggccctgctgcagaagcccaagatcctgctgctggatgaggccaccagcgccctggacaatgacagcgagaaggtggtgcagcacgccctggacaaggccaggactggaagaacctgcctggtggtgacccaccggctgagcgccatccagaatgctgacctgattgtggtgctgcacaacgggaagatcaaggagcagggcacccaccaggagctgctgaggaacagagacatctacttcaagctggtgaatgcccagagcgtgcagtag

SEQ ID NO: 62178 - DNA, 2439 bp, Artificial Sequence
  derived and/or modified sequence
atggtggacgagaacgacatccgggccctgaacgtgcggcactacagagaccatatcggagttgtgagccaggagcctgttctgttcggtaccacaatctctaataacattaagtacgggagagatgacgtgacagacgaggaaatggaacgtgcggctagggaagctaacgcttacgatttcattatggagtttcctaacaagttcaataccttagtaggcgaaaaaggagctcaaatgtcgggtgggcaaaaacaaaggattgcaatcgccagggccctcgtgcggaatccgaagattctcatattggatgaagcgacatccgctttggatagcgaatccaagagtgccgtgcaggctgcactagagaaagcttcaaaaggtaggacaaccattgtggtggcccaccgactatccactatccgtagcgcggacctcatcgtgaccctgaaagatggaatgctagcggagaaaggtgcgcacgcagagctgatggcgaaacgtggtctctattactcacttgtcatgagccaggacataaagaaggccgatgaacaaatggaatctatgacatattcgaccgaaagaaagacaaatagccttccgctgcacagcgtgaaatctattaagtctgacttcattgataaagccgaggaatctacgcagagcaaagagatctcactccccgaggtgtcactgcttaagattttgaagctgaacaagccagaatggccatttgttgtgcttggaactctcgcctcagtgctgaatggaactgtccatccagtgttttctatcattttcgcaaaaataatcacaatgtttggcaataacgacaagacaactctaaaacacgacgccgagatttacagcatgatctttgtcatcctgggcgtcatttgcttcgtttcatatttcatgcaggggttgttctacggacgcgccggcgagattctgaccatgaggctcagacaccttgcgttcaaggcaatgctctatcaggacatagcatggtttgacgaaaaagaaaactccactgggggattgaccaccatcttggccatagatattgcccagatccagggtgcaacaggttcacgaataggcgtgctgactcagaacgctactaacatgggtctgtctgtgattatcagcttcatctatggctgggaaatgacctttttaatcctctctattgcgccagttctggcagttaccggaatgattgagaccgctgccatgactgggttcgccaacaaggataagcaggagttgaagcacgccgggaaaattgcgactgaggcccttgaaaacatccggacaattgtctccttaacacgggagaaggcattcgaacagatgtacgaagaaatgctgcaaactcagcaccgtaatacatctaagaaggcccagatcatagggagctgctacgccttctcccacgcgtttatctactttgcctatgccgctgggtttaggttcggcgcttacttaatccaggccggccgaatgacgcccgagggtatgttcatagtgttcaccgctatcgcatatggcgctatggccatcggggagaccctcgttcttgctcccgagtactcaaaggcgaaaagcggtgctgcccacctgtttgcattgttggaaaagaaacccaatattgattcgcgctcccaagaagggaaaaaaccagacacctgcgagggtaatctggagtttcgagaagtgagttttttttatccttgcagacccgacgtatttattttacggggactaagtcttagcatagaaagggggaagacagtggcatttgtgggcagcagcgggtgcgggaagtctacatcagtccagcttctccagcgcctgtacgatcccgtacagggacaagttctttttgatggcgtggacgccaaggagctgaacgttcagtggcttcgcagccagattgctatcgtgccacaggaaccagtgctcttcaactgtagtatagcagagaacattgcatatggtgataacagccgagttgtgccactcgacgagataaaagaggcagccaatgcagccaatattcattcctttatagaaggccttcctgagaaatataacacgcaggtggggctaaaaggcgctcaattgtctgggggccagaagcagcggctggccatcgctcgggccttactgcagaagccgaagatcctcctgctggacgaggctacttctgctctcgacaatgactcggagaaagtggtccaacatgcactggacaaggccaggaccgggcgcacctgtctggtcgtaactcatagattgagcgctatccagaacgccgacttgatcgtggtccttcacaatggaaaaatcaaggagcaggggactcatcaagagctgcttcggaatcgcgacatctactttaagctggtgaatgctcagagtgttcagtag

SEQ ID NO: 62179 - DNA, 3774 bp, Artificial Sequence
  derived and/or modified sequence
atggagaacagcgagcgggccgaggagatgcaggagaactaccagcggaacgggacagctgaggagcaacctaagctgcggaaagaagcagtgggaagtattgaaatattccgttttgcagatggcttggatatcactctgatgatcctggggatcctcgcttcccttgtcaatggcgcttgccttccactgatgccactcgtattgggtgaaatgtccgataacctcatttccggttgcctggtgcagacgaatactaccaactatcagaactgtacacagtcacaagagaaactgaacgaggacatgaccttactgacactctattacgtcgggattggcgtcgcagccctgattttcggctatatacagatatccctctggatcataaccgccgccagacagaccaagagaattcgaaagcaatttttccacagcgtcctggctcaggatattgggtggtttgacagctgtgatatcggggaattgaacacacgcatgacggatgacatcgacaagatcagcgacggtattggagataaaatcgcacttctgtttcagaatatgagcaccttttccataggtctcgcagttgggctcgttaagggctggaaattgaccctcgtaaccttaagtacctcccccttgatcatggctagcgcagccgcttgttctaggatggtgatttctcttacgagtaaggaactgtccgcgtacagcaaggccggagccgtggctgaagaagtgctgtcctccatacggacagtcattgcgttcagagcccaggaaaaggaattgcaaaggtacacacagaacctgaaagacgcgaaagatttcgggataaaacggacaattgcatccaaggtctcacttggggctgtgtacttctttatgaatggcacatacgggttggcattctggtatggcactagcttaattctgaacggcgaacctggatacactataggcaccgtgttggctgtgtttttctcggttatccactcaagctattgcattggagctgcggtgccccattttgagacttttgcaattgcccggggggcagcttttcacattttccaggtgattgacaaaaagccgtctatagataatttctcaactgcagggtacaagcctgagtcaattgagggtactgttgaatttaaaaatgttagcttcaattacccgtcacgaccaagcattaagattcttaaaggcctgaatcttcgcatcaaatcgggggaaactgtggcactggttggcttaaacgggagcggtaaatccactgtcgtacagctattacagagattatacgaccccgatgacggctttattatggtggatgagaatgatatccgggcccttaacgtccgacattaccgggaccacatcggcgttgtgtctcaggagccagtactttttggaaccaccataagtaacaacatcaagtatggccgggacgatgttactgacgaggaaatggagagggccgcccgggaggccaatgcctatgactttatcatggagttccctaacaagtttaataccctggtgggtgagaagggagcccagatgtcagggggacagaagcaaagaatagccatcgccagagccctcgtcagaaaccctaaaatattaattcttgatgaggccacctctgctctggactccgaatccaagtcagcagttcaggctgccctcgaaaaggcgagcaagggccggacgaccatagtggtggcgcaccgactttctactataaggagtgcggaccttatagtgactctgaaagacggtatgctcgccgagaagggggctcatgctgagcttatggcgaaacgtggtctctattatagccttgtgatgagccaagatatcaaaaaggccgatgaacagatggaatcgatgacgtattcaaccgaaagaaaaaccaacagtctaccactccatagtgtgaaaagcattaagtctgacttcatagacaaggctgaggagagtactcagagtaaagaaatctcactccccgaagtcagcttgttaaaaatcctgaaactgaacaaacctgaatggccatttgtggtgctgggcacacttgcctctgtgcttaatggtactgtgcacccagtgtttagtattatatttgccaaaattataactatgttcgggaacaacgataagacaacacttaagcacgacgccgaaatctactctatgatctttgtcatcttgggggtgatctgttttgtgtcgtacttcatgcagggactgttctatggacgggctggcgagatccttacgatgcggctgcgacacctggccttcaaggcgatgctgtatcaggacatcgcctggttcgatgagaaggagaatagtacaggagggttgaccacaatcctggcaatcgacattgcccagatccagggggcaaccggcagcagaattggtgtgctcacacaaaatgctactaatatgggtctgtccgtcataatctcctttatctacggctgggagatgacgttcctgatcctttctatagctccagtgctggctgtaaccggaatgatcgaaacggcagccatgaccggattcgcgaacaaggataagcaggaattaaagcacgcaggtaagattgcaacggaggctctcgagaacattaggacaattgtttccctaactcgagaaaaggccttcgagcagatgtacgaggagatgcttcaaacacagcaccggaacacatccaagaaggcccagatcatcggatcctgctacgctttctctcacgcttttatctattttgcctatgccgccggttttagatttggtgcgtatctgattcaggctggccggatgacccccgaaggaatgttcatcgtcttcactgctattgcgtacggcgctatggcaatcggtgagactctcgtgctggcccccgaatattctaaggccaagtccggggccgctcacctgtttgccttgctcgagaaaaagcctaacatcgattcccggagtcaggaagggaagaaaccggatacatgtgagggaaacttggagttccgtgaagtgtcgtttttttacccctgcaggccggacgtattcatccttagggggctttccttgtctatcgaacgaggcaagaccgtggccttcgtgggctcctcgggctgcgggaagtcaaccagcgtgcagcttctgcagcgcctctatgatccggtccagggccaggtcctcttcgacggcgttgacgctaaagaacttaacgtgcagtggttaaggtctcaaatcgccatcgttccccaggagcctgtgcttttcaattgctcaattgccgaaaatattgcttatggcgacaacagcagggttgtgccgctggatgaaatcaaggaagctgctaacgccgctaatatccattcgtttattgaagggctgcccgaaaagtacaatacacaagtgggactcaagggagcgcagctgagcgggggacaaaaacaacggcttgcaattgcccgcgccttattacagaagcccaaaatcctgttgctcgatgaggctacctcagccttagacaatgactcagaaaaagtggtacagcatgcgctggacaaggcccggacagggaggacctgtttggtggtgacacataggctatccgcaattcagaatgccgacctgattgtggtgctacacaatggtaagatcaaagaacaaggcactcaccaggaactgctccgcaaccgggatatatactttaaacttgtcaacgcccaaagtgtgcagtag

SEQ ID NO: 62180 - DNA, 2439 bp, Artificial Sequence
  derived and/or modified sequence
atggtggatgagaatgatatccgcgctctgaatgttcggcactaccgggatcatattggggtggtgagccaggagccggtcctgttcgggaccacaatatccaacaacatcaagtatggtcgggacgatgtaacggacgaagagatggaaagggctgctagagaagctaacgcctacgactttattatggagttccccaacaagttcaacactctagtgggggaaaaaggggctcaaatgagtggaggccaaaagcaaagaattgccatcgcgagggccctggtgcgcaatcccaagatattaatacttgatgaagctacctccgctctggacagtgaatctaagtcggccgtgcaagccgctctggagaaagcctctaagggcagaactaccatcgttgtcgctcacaggctgtccacaatacggagcgcagatctaattgtgaccctgaaggatggtatgctcgctgagaagggagcccatgcggaattgatggccaaacgcggactgtattactcactagtcatgtctcaggacatcaagaaggcagatgaacagatggaaagcatgacgtacagtacagaaaggaagactaacagcctgccactgcatagtgtaaaaagcatcaaaagcgatttcatagataaggcagaggagagcacccagagcaaggagatatctctaccggaggtgtcactgcttaaaatcctgaaactgaacaaaccagaatggccatttgtcgtcctcggaacgctggcaagtgtgctcaacggaacggtgcacccggtctttagcattattttcgctaagataattaccatgtttggaaacaatgataagaccactctgaaacatgacgctgagatctattctatgatcttcgtcatcctgggcgtgatctgctttgtgtcttatttcatgcagggcctgttttatgggcgagctggggagatccttaccatgaggcttcgtcacttagcctttaaggctatgctttaccaggacattgcttggttcgatgaaaaggagaactcaacaggcggtctgacgaccattctcgctatcgatattgctcagatccagggggcaacgggatctcggataggtgtcctgacacagaatgccactaacatgggcctgtcagtcattatttcctttatctacgggtgggagatgacttttttgatcttatctattgcacccgtgctcgcggtaacaggcatgattgaaaccgcagcaatgaccgggttcgcaaacaaggataagcaggaactcaagcacgcaggaaaaattgccaccgaggcattggagaatattcgaacaattgtctctctcacacgagaaaaggccttcgagcagatgtatgaagagatgctgcagacacagcatagaaatacatctaaaaaggcacagattatcggcagctgttacgccttctcacacgcatttatctattttgcttatgccgcaggatttagattcggagcctatttgatccaggccggacgcatgacccctgagggaatgttcatcgtttttaccgccatcgcttatggcgcaatggctatcggtgaaaccctggttttggccccagagtattcaaaagccaagtctggggctgcgcacctgttcgccttgctcgagaagaaacctaacattgacagtcgatctcaggagggaaagaaacctgacacttgtgagggaaacctggagttccgggaggtctcattcttctacccctgcagacctgacgtcttcatccttcgcggactgtcgctttcaatagagcgcggtaagactgttgcatttgtgggatcatcgggatgtggaaagagcacgtcagtgcagctgctgcagcgtttatacgatcctgtccagggccaggtcttgtttgatggggtggacgccaaggagctcaatgtgcaatggctgcgttcccaaatcgccattgtgcctcaggagccggttctgtttaactgcagtatcgcggaaaatatcgcatatggtgacaactccagagtggtgccgctggacgagatcaaagaggccgctaacgccgctaacattcattcattcattgaaggacttcctgaaaagtacaacacccaggtcggcctgaaaggcgctcagttgtccgggggtcagaagcagcgcctcgccattgccagagcactcctccagaagcccaaaatcttgctcctggacgaggcgacgagtgcacttgacaacgatagcgagaaagttgtccagcatgctctggataaagcaagaacagggcgtacctgccttgtggttactcatagactgagcgcgatccagaacgccgacttgatcgtggtactgcacaatggaaagatcaaagagcaggggactcaccaagaactcctgcgtaatcgcgacatttacttcaagttggtgaacgcccagagtgtccaatag

SEQ ID NO: 62181 - DNA, 3774 bp, Artificial Sequence
  derived and/or modified sequence
atggagaactccgagcgggctgaggaaatgcaggaaaattatcagcggaatggcactgccgaggagcagccgaagctcaggaaggaagctgtggggtctattgagatcttccgtttcgccgatggcctagatataacactgatgatcttgggcatcctggctagtctggttaacggggcatgtttgccacttatgcccctggtcctcggcgagatgtcggacaacctgatatctgggtgcctggtccagaccaatacgacaaattatcaaaattgcacccagtctcaggagaaacttaacgaagatatgaccctgctgacactgtactatgtgggaatcggggtagccgctctgatatttggctatattcagatctctttatggattataaccgctgcacgccagaccaaacgcatccgcaagcagttcttccattccgtgctggcgcaggacataggatggtttgattcgtgtgatatcggcgagctcaatacacggatgacagacgacatagacaaaatttctgatggcatcggtgacaagatcgctttgctgttccagaacatgtcaacattcagcatagggcttgcagtcggcttggtcaaaggatggaagctgaccctggtgaccctgtctactagccctttaataatggccagcgcggctgcatgttcacgcatggtcatttctctgacgtctaaggaactgtccgcatattccaaagctggagcagtcgctgaagaagtgctgtctagcattcgcactgtgattgcattcagagcacaggaaaaggagcttcagcggtacacacagaaccttaaagacgccaaggatttcggtatcaagaggactattgcaagtaaagttagtcttggagccgtttacttcttcatgaacgggacatatgggctggccttttggtatgggaccagtctgattttaaatggcgagccagggtacacaatcggtactgtcctggccgtgtttttctccgtgatccactcttcctattgcatcggtgctgcagttccacactttgagacgtttgccatcgctagaggagctgcctttcatatctttcaggttatcgacaaaaagccctctatcgataacttctctaccgcgggttacaagccagagtccattgagggaacggtggagttcaaaaacgtatctttcaattatccctcacggccttctataaagattcttaaaggcctgaatctgcggataaaatccggcgaaacagtcgccctagtggggctcaacggctccggaaaaagtacagtcgtgcagctgctgcagcgcttgtatgacccagacgatggatttattatggtggacgaaaatgacatcagggcactgaacgtgcgtcactacagagaccatattggtgtggtgagtcaagagcctgtgttatttggtaccactatcagcaacaacatcaagtacggcagggatgacgtgacggacgaagaaatggagcgcgctgctagagaagcgaatgcctacgactttatcatggagttcccaaataagttcaataccctggtgggagaaaagggagctcagatgagtggtggtcagaaacagagaatcgccatagcgagagctctggtgcggaacccaaagattctcatactggatgaggccacatctgctctggattcagagtccaagtccgctgtacaggctgccttggagaaggccagtaaggggagaacaactattgtggtggcacacagactgtcaactatcagatccgctgacttgatagtcaccttaaaggatggtatgctagcggagaagggagcgcacgcggagttgatggctaaaagggggctgtattactctttagtgatgtcgcaggatatcaaaaaggccgacgagcagatggaaagcatgacatactccactgaacgcaagaccaattcattgccactgcactcggtaaaaagtattaaatccgattttatcgacaaggcagaggaatccacccagtcaaaggagatcagcttgccagaggtgagccttctgaaaatcctgaagctgaataaacccgagtggccatttgtggtgcttggcacccttgccagtgtgctgaatggtaccgtccaccctgtttttagcataatcttcgcaaagataataacgatgttcgggaataatgataaaacaactctgaaacacgatgccgaaatctatagcatgatatttgtgattttgggggttatctgcttcgtgagttatttcatgcaggggctgttctatggcagagccggagaaatattaacgatgcgcctacggcatctggcatttaaagccatgttgtaccaggacatcgcctggtttgacgagaaggaaaacagtaccggtggtctgaccacaatcctggcaatcgatattgcccaaatacagggcgcaactgggtcaaggatcggtgtgttgactcagaacgcgacgaacatgggcctgagcgttattatcagttttatctatggctgggagatgactttcctcatactgagtatcgctccagtccttgccgttaccgggatgatcgagactgcagccatgaccggatttgccaataaggataaacaggaactgaagcatgccggaaagatagccaccgaagccctggagaacatcaggactattgtgagtttgacacgggagaaggctttcgagcagatgtatgaggaaatgttgcagacccagcacaggaacacgagtaagaaggctcaaattatcggaagctgctatgccttttctcacgccttcatatactttgcgtacgcagctggcttccgttttggggcttatttgattcaagccggtcggatgactccggaggggatgttcatcgtttttactgcaatcgcttatggtgccatggccataggcgagacactggtcctcgcaccagagtatagcaaggcaaagagcggcgcagctcacctgttcgcacttctggaaaagaaacctaatattgatagtcgatcacaagagggaaaaaaacctgacacctgcgaggggaacctggagttccgcgaggtgagcttcttctacccctgccgacccgacgtgtttatcctgcgcggtttgagtttatcaatcgagcgaggaaaaaccgtggctttcgtggggtcctcgggttgcggaaaatcaacgtccgttcagcttctgcaaagactatatgacccagtgcaaggtcaagtgctgtttgacggggtcgacgctaaggaactaaacgtgcagtggctgaggtctcaaattgctatcgtaccacaggaaccggtacttttcaattgcagtattgcagagaacattgcttatggagacaattctagagtagtgccgctggacgaaattaaggaggcagcaaatgcagccaacatccactccttcatcgaaggcttacccgaaaagtataacacacaggtcggtttgaagggcgcacagctctctggcggacaaaaacagcggctagccatcgccagggctttgctacagaagcccaaaatcctgttactcgacgaggcaacttctgccctcgacaatgactcagagaaagtagttcagcacgctttggacaaagccaggactggccgtacatgcctggttgtcacacatagactgtccgccatccagaatgccgatttgatcgtcgtccttcataatgggaagataaaggaacaaggaacgcaccaagagcttctccgcaatagggatatctattttaagctggtgaacgcccagagcgtgcagtag

SEQ ID NO: 62182 - DNA, 2906 bp, Artificial Sequence
  derived and/or modified sequence
cctaattcctctaatatctctctgtgagcctaaaccaataattatatattacattctattgtctttcttatataactgcagaaagataaatatcactttgtttgttcctgtaggttttctttagtgtaatccatagcagttattgcattggagcagcagtccctcactttgaaaccttcgcaatagcccgaggagctgcctttcatattttccaggttattgataagaaacccagtatagataacttttccacagctggatataaacctgaatccatagaaggaactgtggaatttaaaaatgtttctttcaattatccatcaagaccatctatcaagattctgaaaggtctgaatctcagaattaagtctggagagacagtcgccttggtcggtctcaatggcagtgggaagagtacggtagtccagcttctgcagaggttatatgatccggatgatggctttatcatggtggatgagaatgacatcagagctttaaatgtgcggcattatcgagaccatattggagtggttagtcaagagcctgttttgttcgggaccaccatcagtaacaatatcaagtatggacgagatgatgtgactgatgaagagatggagagagcagcaagggaagcaaatgcgtatgattttatcatggagtttcctaataaatttaatacattggtaggggaaaaaggagctcaaatgagtggagggcagaaacagaggatcgcaattgctcgtgccttagttcgaaaccccaagattctgattttagatgaggctacgtctgccctggattcagaaagcaagtcagctgttcaagctgcactggagaaggcgagcaaaggtcggactacaatcgtggtagcacaccgactttctactattcgaagtgcagatttgattgtgaccctaaaggatggaatgctggcggagaaaggagcacatgctgaactaatggcaaaacgaggtctatattattcacttgtgatgtcacaggatattaaaaaagctgatgaacagatggagtcaatgacatattctactgaaagaaagaccaactcacttcctctgcactctgtgaagagcatcaagtcagacttcattgacaaggctgaggaatccacccaatctaaagagataagtcttcctgaagtctctctattaaaaattttaaagttaaacaagcctgaatggccttttgtggttctggggacattggcttctgttctaaatggaactgttcatccagtattttccatcatctttgcaaaaattataaccatgtttggaaataatgataaaaccacattaaagcatgatgcagaaatttattccatgatattcgtcattttgggtgttatttgctttgtcagttatttcatgcagggattattttacggcagagcaggggaaattttaacgatgagattaagacacttggccttcaaagccatgttatatcaggatattgcctggtttgatgaaaaggaaaacagcacaggaggcttgacaacaatattagccatagatatagcacaaattcaaggagcaacaggttccaggattggcgtcttaacacaaaatgcaactaacatgggactttcagttatcatttcctttatatatggatgggagatgacattcctgattctgagtattgctccagtacttgccgtgacaggaatgattgaaaccgcagcaatgactggatttgccaacaaagataagcaagaacttaagcatgctggaaagatagcaactgaagctttggagaatatacgtactatagtgtcattaacaagggaaaaagccttcgagcaaatgtatgaagagatgcttcagactcaacacagaaatacctcgaagaaagcacagattattggaagctgttatgcattcagccatgcctttatatattttgcctatgcggcagggtttcgatttggagcctatttaattcaagctggacgaatgaccccagagggcatgttcatagtttttactgcaattgcatatggagctatggccatcggagaaacgctcgttttggctcctgaatattccaaagccaaatcgggggctgcgcatctgtttgccttgttggaaaagaaaccaaatatagacagccgcagtcaagaagggaaaaagccagacacatgtgaagggaatttagagtttcgagaagtctctttcttctatccatgtcgcccagatgttttcatcctccgtggcttatccctcagtattgagcgaggaaagacagtagcatttgtggggagcagcggctgtgggaaaagcacttctgttcaacttctgcagagactttatgaccccgtgcaaggacaagtgctgtttgatggtgtggatgcaaaagaattgaatgtacagtggctccgttcccaaatagcaatcgttcctcaagagcctgtgctcttcaactgcagcattgctgagaacatcgcctatggtgacaacagccgtgtggtgccattagatgagatcaaagaagccgcaaatgcagcaaatatccattcttttattgaaggtctccctgagaaatacaacacacaagttggactgaaaggagcacagctttctggcggccagaaacaaagactagctattgcaagggctcttctccaaaaacccaaaattttattgttggatgaggccacttcagccctcgataatgacagtgagaaggtggttcagcatgcccttgataaagccaggacgggaaggacatgcctagtggtcactcacaggctctctgcaattcagaacgcagatttgatagtggttctgcacaatggaaagataaaggaacaaggaactcatcaagagctcctgagaaatcgagacatatattttaagttagtgaatgcacagtcagtgcagtga

SEQ ID NO: 62183 - DNA, 5811 bp, Artificial Sequence
  derived and/or modified sequence
aaattataaaagttgtcctaaaaattggttcagtgccttttacaatcgtatgtaccttatctctctctccatttctgcatgaacagtccatcctatccaaaccgttctcatttctctaccatgagataattcaccttgcattcctaaaactatgcccttgttcctcctccacatttttctacttactgaaaccttagccttcctccagaaactaacctcagggccatcctcatctgtgggcgaaaccattttagatcacaatgttcttcctcagtcttcttagatactagaatagtcactctttgtactattcatcacataacgtctgtcttgccaggtatattaggttcccctagagaaatagaatcaataggccgtgtgtgtgtgtgtgtgtgtgtgtgtgtgtgtgtgtgtatgtagagagagaaagagaaaacacgctcatgtaattgtggtgactggcacttccaaaatccacaagccagactagaaggctggaaattctggcaaaaaattgataccttgtatctgaaagctttatcctatcctcttcagaagacttcagtcttttctcttaaggacttcaactgactggatggggcccactcaaaacagcatctaaggaattaaaaagaagtaaattgtaaataagatggaaaattcagaaagagctgaagaaatgcaagaaaattatcagagaaatggaactgcagaagaacagccaaaactgagaaaggaagcagttggatctattgagatattccgctttgctgatggactggacatcacactcatgatcctgggtatactggcatcactggtcaatggagcctgccttcctttaatgccactggttttaggagaaatgagtgataaccttattagtggatgtctagtccaaactaacacaacaaattatcagaactgtactcagtctcaagagaagctgaatgaagatatgactctgttgaccctgtattatgttggaataggtgttgctgccttgatttttggttacatacagatttccttgtggattataactgcagcacgacagaccaagaggattcgaaaacagttttttcattcagttttggcacaggacatcggctggtttgatagctgtgacatcggtgaacttaacactcgcatgacagatgacattgacaaaatcagtgatggtattggagataagattgctctgttgtttcaaaacatgtctactttttcgattggcctggcagttggtttggtgaagggctggaaactcaccctagtgactctatccacgtctcctcttataatggcttcagcggcagcatgttctaggatggtcatctcattgaccagtaaggaattaagtgcctattccaaagctggggctgtggcagaagaagtcttgtcatcaatccgaacagtcatagcctttagggcccaggagaaagaacttcaaaggtatacacagaatctcaaagatgcaaaggattttggcataaaaaggactatagcttcaaaagtgtctcttggtgctgtgtacttctttatgaatggaacctatggacttgctttttggtatggaacctccttgattcttaatggagaacctggatataccatcgggactgttcttgctgttttctttagtgtaatccatagcagttattgcattggagcagcagtccctcactttgaaaccttcgcaatagcccgaggagctgcctttcatattttccaggttattgataagaaacccagtatagataacttttccacagctggatataaacctgaatccatagaaggaactgtggaatttaaaaatgtttctttcaattatccatcaagaccatctatcaagattctgaaaggtctgaatctcagaattaagtctggagagacagtcgccttggtcggtctcaatggcagtgggaagagtacggtagtccagcttctgcagaggttatatgatccggatgatggctttatcatggtggatgagaatgacatcagagctttaaatgtgcggcattatcgagaccatattggagtggttagtcaagagcctgttttgttcgggaccaccatcagtaacaatatcaagtatggacgagatgatgtgactgatgaagagatggagagagcagcaagggaagcaaatgcgtatgattttatcatggagtttcctaataaatttaatacattggtaggggaaaaaggagctcaaatgagtggagggcagaaacagaggatcgcaattgctcgtgccttagttcgaaaccccaagattctgattttagatgaggctacgtctgccctggattcagaaagcaagtcagctgttcaagctgcactggagaaggcgagcaaaggtcggactacaatcgtggtagcacaccgactttctactattcgaagtgcagatttgattgtgaccctaaaggatggaatgctggcggagaaaggagcacatgctgaactaatggcaaaacgaggtctatattattcacttgtgatgtcacaggatattaaaaaagctgatgaacagatggagtcaatgacatattctactgaaagaaagaccaactcacttcctctgcactctgtgaagagcatcaagtcagacttcattgacaaggctgaggaatccacccaatctaaagagataagtcttcctgaagtctctctattaaaaattttaaagttaaacaagcctgaatggccttttgtggttctggggacattggcttctgttctaaatggaactgttcatccagtattttccatcatctttgcaaaaattataaccatgtttggaaataatgataaaaccacattaaagcatgatgcagaaatttattccatgatattcgtcattttgggtgttatttgctttgtcagttatttcatgcagggattattttacggcagagcaggggaaattttaacgatgagattaagacacttggccttcaaagccatgttatatcaggatattgcctggtttgatgaaaaggaaaacagcacaggaggcttgacaacaatattagccatagatatagcacaaattcaaggagcaacaggttccaggattggcgtcttaacacaaaatgcaactaacatgggactttcagttatcatttcctttatatatggatgggagatgacattcctgattctgagtattgctccagtacttgccgtgacaggaatgattgaaaccgcagcaatgactggatttgccaacaaagataagcaagaacttaagcatgctggaaagatagcaactgaagctttggagaatatacgtactatagtgtcattaacaagggaaaaagccttcgagcaaatgtatgaagagatgcttcagactcaacacagaaatacctcgaagaaagcacagattattggaagctgttatgcattcagccatgcctttatatattttgcctatgcggcagggtttcgatttggagcctatttaattcaagctggacgaatgaccccagagggcatgttcatagtttttactgcaattgcatatggagctatggccatcggagaaacgctcgttttggctcctgaatattccaaagccaaatcgggggctgcgcatctgtttgccttgttggaaaagaaaccaaatatagacagccgcagtcaagaagggaaaaagccagacacatgtgaagggaatttagagtttcgagaagtctctttcttctatccatgtcgcccagatgttttcatcctccgtggcttatccctcagtattgagcgaggaaagacagtagcatttgtggggagcagcggctgtgggaaaagcacttctgttcaacttctgcagagactttatgaccccgtgcaaggacaagtgctgtttgatggtgtggatgcaaaagaattgaatgtacagtggctccgttcccaaatagcaatcgttcctcaagagcctgtgctcttcaactgcagcattgctgagaacatcgcctatggtgacaacagccgtgtggtgccattagatgagatcaaagaagccgcaaatgcagcaaatatccattcttttattgaaggtctccctgagaaatacaacacacaagttggactgaaaggagcacagctttctggcggccagaaacaaagactagctattgcaagggctcttctccaaaaacccaaaattttattgttggatgaggccacttcagccctcgataatgacagtgagaaggtggttcagcatgcccttgataaagccaggacgggaaggacatgcctagtggtcactcacaggctctctgcaattcagaacgcagatttgatagtggttctgcacaatggaaagataaaggaacaaggaactcatcaagagctcctgagaaatcgagacatatattttaagttagtgaatgcacagtcagtgcagtgatgctgttgaggtagcacatattttgatgttcgtgtaatgcaaagaaggagtacttaataattacttggcaagctttgatctcttttattgcatatatcaatacctagaatcatgctactcaagtacatacatgttctattcacacaccatctgaccttcagatttttaaaaggaagcaaaaatttgcttatttcatgtaagtgaaataatgcttatatccttcactttataaaactattctagcacatttgcttgtaaagcagttttctacaaggtgaatttatttcccatcaacttctgctataaaatcggaaatatgtttccagggggaatattatccaattaaccatgttgaaggttttagcaaaggcagtgtaagatagagtggggcctgtagcattgcagggagagtgtctttcacttggaattttgttttgcagcacatattacagtagttttgctagtcccttttctccagaccgtagggatttctctcaataagtattcactatttctctaaattttattctatttttttgttgagcagggaatagaaaggattacgatgtaaaatttctgggaggattaggtagctatctcctacttcaccagtaagtgaagtgcctcacatgagccatcccaaagattcattattccaaaccttgggtttggcagtataagtcacaggcctacctgtttatgaaaacttacttacttaaaataagagctacttttgggccgggtgcggtggctcacgcctgtaatcccagaactttgggaggccgaggagggcggatcacttgaggtcaggagttcgagaccagcctggccaacatggtgaaaccccgtctctactaaaaacacaaaaattagccaatcttggtggcgggcacctggaatcccagctacttgggaggctgaggcaggagaatcatttgaacctaggaggcagaggttgcagtgagccgagatctcaccactgcactccagcctgcgcaacagagcgagactccatctcaaaaaataataaataagagctaattttattgtgggtgaaaatttttaaacgtctttctctataataaaataatttccttaaattttatatatactttatcatatataatgtgtgaatgattttaaagttctgtgtaaataacaatattggtaaaatgagttacattttcaacttacttaaatatgtaatgtcacctggtgattttatctttattcttcagtgtattttcttccatttacacatttagctagcctccctaaagtgtactctaccaataattgaaatcttgttaaacaaaattaaaaccatttatatattatgctgctttctttaaaatgcaaaataaaaataagattggggacttgag

SEQ ID NO: 62184 - DNA, 396 bp, Artificial Sequence
  derived and/or modified sequence
atggtggacgagaacgacatcagagccctgaacgtgagacactacagagaccacatcggcgtggtgagccaggagcccgtgctgttcggcaccaccatcagcaacaacatcaagtacggcagagacgacgtgaccgacgaggagatggagagagccgccagagaggccaacgcctacgacttcatcatggagttccccaacaagttcaacaccctggtgggcgagaagggcgcccagatgagcggcggccagaagcagagaatcgccatcgccagagccctggtgagaaaccccaagatcctgatcctggacgaggccaccagcgccctggacagcgagagcaagagcgccgtgcaggccgccctggagaaggacacccccagatacagcttctag

SEQ ID NO: 62185 - DNA, 396 bp, Artificial Sequence
  derived and/or modified sequence
atggtggatgaaaacgacattagagccctgaatgtgcggcactatcgggatcacattggggtcgtgtcccaagaaccagtgttgtttgggactactatcagtaataacataaagtacggacgggatgacgttacagatgaggaaatggagcgggccgcccgagaggccaatgcgtatgacttcattatggaattccctaataaattcaacactctggtgggggagaaaggtgcacaaatgtccggagggcagaagcaacgcatcgcgatagcccgggcgttggtacgcaatccaaaaattctaatccttgacgaagccacttctgccctggattccgagtccaagtccgccgtacaggccgccctcgaaaaggacactccaagatatagtttctag

SEQ ID NO: 62186 - DNA, 396 bp, Artificial Sequence
  derived and/or modified sequence
atggtggatgaaaatgacatccgggccctgaatgtgcgccactacagagaccacatcggcgtggtgtcccaggagcctgtgctgtttggcaccaccatcagcaacaacatcaagtatggaagagatgatgtgacagatgaggagatggagcgggccgcccgggaggccaatgcctatgacttcatcatggagttccccaacaagttcaacaccctggtgggggagaagggggcccagatgtctgggggccagaagcagagaattgccatcgcccgggccctggtgaggaaccccaagatcctgatcctggatgaggccaccagcgccctggacagcgagagcaagtctgctgtgcaggccgccctggagaaggacaccccccgctacagcttctag

SEQ ID NO: 62187 - DNA, 396 bp, Artificial Sequence
  derived and/or modified sequence
atggtggacgagaacgacatccgggccctgaacgtgcggcactaccgagatcatatcggcgtggtgagccaagagcccgtactgttcggtactaccatctccaataacatcaagtatgggcgagacgatgtgaccgacgaggagatggagagagcagctagggaggccaacgcctacgactttatcatggaatttcccaacaagtttaatacgctggtcggtgagaaaggggcccagatgtctggcggacaaaagcagcggattgcgatcgccagagccctggtgcgcaaccccaaaattctaattttggacgaagctacaagcgctctcgactcagagtctaagagtgccgtgcaggcagccttggaaaaagacacacctaggtattccttctag

SEQ ID NO: 62188 - DNA, 396 bp, Artificial Sequence
  derived and/or modified sequence
atggtcgacgagaatgacattcgggcactcaatgttcggcactacagggatcacatcggagtagtgagccaggaacctgtgctgtttggcaccaccattagcaacaacatcaagtacggacgagatgatgtgaccgacgaggagatggaaagggctgccagagaagccaacgcttacgattttatcatggagttccccaacaagttcaatacgctggtgggagaaaaaggtgcacagatgagcggcggacagaagcagagaatcgcaatcgctcgggctctggttaggaaccctaaaattttaatcctggacgaagccacatcagccctggattctgaatctaagtccgcggtacaagccgcactggaaaaagatacccccaggtattctttctag

SEQ ID NO: 62189 - protein, 228 aa, Artificial Sequence
  derived and/or modified sequence
MWLMSEAHGAEPVLLREAARPFTQTLRLCVPSGNSKVMLLGDTGVGKTCFLIQFKDGAFLSGTFIATVGIDFRNKVVTVDGVRVKLQIWDTAGQERFRSVTHAYYRDAQALLLLYDITNKSSFDNIRAWLTEIHEYAQRDVVIMLLGNKADMSSERVIRSEDGETLAREYGVPFLETSAKTGMNVELAFLAIAKELKYRAGHQADEPSFQIRDYVESQKKRSSCCSFM

SEQ ID NO: 62190 - protein, 191 aa, Artificial Sequence
  derived and/or modified sequence
MWLMSEAHGAEPVLLREAARPFTQTLRLCVPSGNSKNKVVTVDGVRVKLQIWDTAGQERFRSVTHAYYRDAQALLLLYDITNKSSFDNIRAWLTEIHEYAQRDVVIMLLGNKADMSSERVIRSEDGETLAREYGVPFLETSAKTGMNVELAFLAIAKELKYRAGHQADEPSFQIRDYVESQKKRSSCCSFM

SEQ ID NO: 62191 - DNA, 687 bp, Artificial Sequence
  derived and/or modified sequence
atgtggctcatgagtgaagctcatggcgctgagcctgtactgttaagagaggcagccagaccatttacccagacgctcagactgtgtgttcctagcggaaatagcaaggttatgttattgggcgataccggcgtaggaaagacttgcttcctcattcagttcaaggacggagctttcttaagtggcacttttattgcaacagttggcattgactttcgaaacaaggtggtgactgtggatggtgtgagggtgaaacttcagatttgggacactgccgggcaggagcggtttcgctccgttacccacgcatactaccgagacgctcaggcactcctcttgttatatgatatcaccaataaaagtagtttcgataatatcagagcttggttgactgaaatacatgaatacgcacagagggatgtggtgattatgctgctcggaaacaaggctgacatgtcttcagagcgcgtcataaggtcagaggacggtgagacccttgcccgggaatacggcgtgcctttccttgaaacaagcgcaaagacaggcatgaatgtcgagctggccttcctggctatagccaaggagctcaagtacagggccggacaccaggcagatgaaccaagcttccagattcgagactacgtggagagtcagaagaagcgcagctcttgctgtagcttcatgtag

SEQ ID NO: 62192 - DNA, 576 bp, Artificial Sequence
  derived and/or modified sequence
atgtggttaatgtcggaggcccacggagcagagccagtcctgctgagggaagccgcacgtccattcacccagacgctgaggctttgcgtgccttcaggtaatagcaagaataaggtcgtcacggttgacggcgtccgcgtaaagctgcaaatctgggacaccgccggacaggagcgctttaggagtgttactcatgcttactatcgggacgcgcaggctttgttattgctgtacgatattacgaataaatcaagctttgacaatatccgggcatggctgactgaaatccacgagtatgcccagagagatgtggttatcatgttgctcggtaacaaggcggatatgtcctcggagcgagttattaggtcagaggatggcgaaactctcgcacgtgagtacggcgtaccctttcttgaaacttctgccaaaaccggaatgaatgtcgagctcgctttcctcgccatcgccaaagaactcaagtatcgtgctggccatcaggccgacgagcccagtttccagattagagactacgtcgaatcacagaagaaacggtcttcttgttgctcttttatgtag

SEQ ID NO: 62193 - DNA, 687 bp, Artificial Sequence
  derived and/or modified sequence
atgtggctgatgtctgaggcccacggggctgagcctgtgctgctgcgggaggccgcccggcccttcacccagaccctgcggctgtgtgtgcccagcggcaacagcaaggtgatgctgctgggggacacaggagtgggcaagacctgcttcctgatccagttcaaggatggagccttcctgagcggcaccttcatcgccaccgtgggcatcgacttcaggaacaaggtggtgacagtggatggagtgcgggtgaagctgcagatctgggacacagctggccaggagcgcttccgctctgtgacccacgcctactacagagatgcccaggccctgctgctgctgtatgacatcaccaacaagagcagctttgacaacatccgggcctggctgacagagatccacgagtatgcccagagagatgtggtgatcatgctgctgggcaacaaggctgacatgagcagcgagagggtcatccgctcagaagatggagagaccctggcccgggagtatggagtgcccttcctggagaccagcgccaagacaggcatgaatgtggagctggccttcctggccatcgccaaggagctgaagtaccgggccggccaccaggctgatgagcccagcttccagatccgggactatgtggagagccagaagaagaggagcagctgctgcagcttcatgtag

SEQ ID NO: 62194 - DNA, 576 bp, Artificial Sequence
  derived and/or modified sequence
atgtggctgatgtctgaggcccacggggctgagcctgtgctgctgcgggaggccgcccggcccttcacccagaccctgcggctgtgtgtgcccagcggcaacagcaagaacaaggtggtgacagtggatggagtgcgggtgaagctgcagatctgggacacagctggccaggagcgcttccgctctgtgacccacgcctactacagagatgcccaggccctgctgctgctgtatgacatcaccaacaagagcagctttgacaacatccgggcctggctgacagagatccatgaatatgcccagagagatgtggtgatcatgctgctgggcaacaaggctgacatgagcagcgagagggtcatccgctcagaagatggagagaccctggcccgggagtatggagtgcccttcctggagaccagcgccaagacaggcatgaatgtggagctggccttcctggccatcgccaaggagctgaagtacagagctggccaccaggctgatgagcccagcttccagatccgggactatgtggagagccagaagaagaggagcagctgctgcagcttcatgtag

SEQ ID NO: 62195 - DNA, 687 bp, Artificial Sequence
  derived and/or modified sequence
atgtggctgatgagcgaggcccacggcgccgagcccgtgctgctgagggaggcagcaagaccgtttacccagaccctgcggctttgcgtgcccagcggtaatagtaaggtcatgctgttgggagatactggagtgggcaagacgtgcttccttatacagtttaaagacggggccttcctttccggcactttcatagctactgtcggaatcgactttcgtaacaaagttgtgactgttgacggagtgagggtcaagctgcagatatgggacaccgctggacaggagagatttagatcagtaacccatgcatactacagagatgcccaggcactgctgttactgtatgacatcacaaacaaatcctccttcgacaacatccgggcctggctgacggagatacatgagtacgcgcaacgggacgtagtcatcatgctgctagggaataaggcggacatgtcctctgagagagtgatccggtcggaggacggcgaaacactggccagggaatacggggtgcctttcctcgaaaccagcgcaaagaccggaatgaatgtggagttggccttccttgcaatcgccaaggagcttaagtatagagctggacatcaagccgacgagccctctttccagattcgtgattacgtggaatcacaaaagaaacggagcagttgctgctcatttatgtag

SEQ ID NO: 62196 - DNA, 576 bp, Artificial Sequence
  derived and/or modified sequence
atgtggctgatgagcgaggcccacggcgccgagcccgtgctgctgcgggaggcagcccgaccattcactcagaccctgagactatgcgttcctagtggtaactctaagaacaaggtggtcacggtggacggggtgcgagtaaaattgcagatctgggatactgctgggcaagaacggttccgcagcgtcactcacgcttattaccgagacgcacaggccctgttactcttgtacgatatcacaaacaagtcgtctttcgacaatattcgagcttggctgaccgagatccacgagtacgcccagcgtgatgtggtgattatgcttctgggcaacaaggccgacatgagctccgagcgcgtgattaggagcgaagacggtgaaacactggcgcgagagtacggtgtgccattcctcgagacctccgcgaaaaccgggatgaatgtggagctcgccttcctcgccatcgccaaggagttaaagtaccgcgccgggcatcaagctgacgaaccctcattccagatccgggattatgtagaatctcagaaaaaaagaagctcttgttgctcctttatgtag

SEQ ID NO: 62197 - DNA, 687 bp, Artificial Sequence
  derived and/or modified sequence
atgtggctgatgtccgaagcgcatggtgcagagcccgtgttacttcgagaagctgccaggccttttactcagacactgcgtctgtgtgtcccgtcaggtaattccaaggtgatgctgcttggtgacaccggggtcggaaagacctgcttcctcatccagttcaaagacggcgcattcctctcaggaaccttcatcgctaccgtgggcatagatttccgcaacaaagtcgtgactgtagatggggtgcgcgtgaagttacagatctgggacactgccggtcaggagaggtttagatctgtgacacacgcgtattatcgggacgcccaggccttgctgcttctttacgatattacaaataaaagtagctttgataacatacgggcatggctgactgagattcatgagtatgcccaacgggatgtcgttatcatgctgcttgggaataaagcagatatgagctccgaacgggtgatcaggtccgaagacggagaaaccttggcacgcgaatatggcgtgccattcctcgaaacttcagccaaaactggcatgaacgtggagctcgcctttttagctattgccaaggaactaaagtatagggctggacatcaagccgacgaaccaagctttcagatacgcgattatgtggaatctcagaagaagagatcaagttgctgcagcttcatgtag

SEQ ID NO: 62198 - DNA, 576 bp, Artificial Sequence
  derived and/or modified sequence
atgtggctcatgtcggaggcccatggagctgaaccggttctgttacgcgaagccgcaaggccttttacccagacactgcgcctgtgtgtgccctccggaaacagcaagaacaaagtcgtgacagtggatggtgtccgggtgaagttacagatttgggatactgccggacaggagcgatttcggtccgtcactcatgcctactacagggacgctcaggcgttgctgctgttatacgatatcacaaataagagcagcttcgataatatcagagcctggctcactgagatccacgagtacgcacagcgtgatgtggtgattatgctcctgggaaataaagccgacatgagctcggagcgggtaatccggtccgaggacggtgagacactagccagagagtacggcgtgcctttcttggagacaagcgccaaaaccggtatgaatgtggagctcgccttcctcgccattgcgaaggaattgaagtatcgggcaggtcaccaagctgacgaaccaagcttccaaatccgtgattacgtcgaatctcaaaagaagcgctcttcctgctgttctttcatgtag

SEQ ID NO: 62199 - DNA, 2704 bp, Artificial Sequence
  derived and/or modified sequence
gactacgggaactcttccgcagcagacggggtccccgcggcccgctcccccaggggcaagcaagcgaccacaggggaccggtcccggggctggatgtggctcatgtccgaagcgcacggagccgagccggtgttgctcagggaggctgcccgccccttcacgcagaccctgcggctctgcgtgccctcagggaacagcaaggtgatgcttctgggagacacaggcgtcggcaaaacatgtttcctgatccaattcaaagacggggccttcctgtccggaaccttcatagccaccgtcggcatagacttcaggaacaaggtggtgactgtggatggcgtgagagtgaagctgcagatctgggacaccgctgggcaggaacggttccgaagcgtcacccatgcttattacagagatgctcaggccttgcttctgctgtatgacatcaccaacaaatcttctttcgacaacatcagggcctggctcactgagattcatgagtatgcccagagggacgtggtgatcatgctgctaggcaacaaggcggatatgagcagcgaaagagtgatccgttccgaagacggagagaccttggccagggagtacggtgttcccttcctggagaccagcgccaagactggcatgaatgtggagttagcctttctggccatcgccaaggaactgaaataccgggccgggcatcaggcggatgagcccagcttccagatccgagactatgtagagtcccagaagaagcgctccagctgctgctccttcatgtgaatcccagggggcagagaggaggctctggaggcacacaggatgcagccttccccctcccaggcctggcttattccaagaggctgagccaatggggagaaagatggaggactcactgcacagccgcttcctagcagggagctatactccaactcctacttgagttcctgcggtctccccgcatccacagggagggtaaaacacttagcttttattttaatagtacataatttaataccaaaaaaggcgcctggatccccaaaaaaccgaggctgggagctagtggcccttttgctttctaggacttggggggccggccctccctcctaagcataacaaaggtggtgttgctccagctcagccccaggggacacagatgcactttgggggtgagggcaggtaatgactccatcgcaccctcagttcagctggacagaggctcaggtgaccccagccttcactgtctcccgctctccaggagcttatcttcgccccatctcccaaataagtgggcccttgtgctgtgaggaagaccaaagcctcagggaagataagagatatggagatgggagggggaggacaaggggcagagagtagggtctagctggctatctctggccttactaacacccccctggaggcatgccccttttctccagcacacaagcacattggggcacctggaaatattggttccaggctcctgttctctggacttcagatcctgggggagcccctcccccccctgaatccctggcttagctaccttcctgcctgtgcacctaaaaacctcaggtcagaactaggaaaagagttttgtttttatttttttgaaatggagtctcgttctgtcgcccaggctgaggtgcagtagtgcaatctccgctcactacaacctccactccctggggctcaagcgatcctcccacctcagccgccgaagtagctgggactataggtgtgtaccatcacacctggctaatttttgtattttttgtagacacagggtttcgccatgttgcccaggctggtcttgaattcctgagctcaagcaacctgccggcctcggcctcccaaagtactgggattacacgcagaaggcaccatgcccaggctagatgtgtcttatcccaatcctttggcaggcatgcagctccacaggcgatttcttcaagcagctgaagtgtttagccctcctgggttaagagccagataaggagaaatccctttcctaggtttggaatgtgttgtgaaaaaaaagagaaatccctggctcctggagctggtgggagacaagattaagcaaacctcccctgacatgtatccctttgaccccaagctctgcctcctccctgaccacccatgccctttcctttaacttctcaaacagataccagggcctaaactgctttacctcccctcctactgagtcaggttaggtggtgggaggtcacccatttccgagttaaaccaatgcaatatgagtaaaacaaagtcatgtgggtatgtctggggtagagagaggggtagcaagttcatgtgtcctccttggtcacatatctcccaaagctccgatccctgccatgggaagtggacaggaaacatgaggtcatgacctgcaggcatctttactgcagctctgccggcctggagggggagagggggaggaagaagtatgcgctgcacatttctgaggctactgcatttgctttcaaggcagaaatcttgctctgagcagtcagcggctccagtttgggcccgataaggaagttctccgtggcctccctcaggcagagcagggaggaggctgacattgccagtctcttctggggcccaaggcaggttgcaggagatccaatcccatagacagctctgggcctcttgcatttgagtttttcagaattaaactgcagtattttggaaagca

SEQ ID NO: 62200 - DNA, 2690 bp, Artificial Sequence
  derived and/or modified sequence
ggaggcgcagcccaggggtccccagctccccgcctcgccacctggggacagcccacggcccggggctcgggcgccgcctgctgtcgcggtgcgcagcgactacgggaactcttccgcagcagacggggtccccgcggcccgctcccccaggggcaagcaagcgaccacaggggaccggtcccggggctggatgtggctcatgtccgaagcgcacggagccgagccggtgttgctcagggaggctgcccgccccttcacgcagaccctgcggctctgcgtgccctcagggaacagcaagaacaaggtggtgactgtggatggcgtgagagtgaagctgcagatctgggacaccgctgggcaggaacggttccgaagcgtcacccatgcttattacagagatgctcaggccttgcttctgctgtatgacatcaccaacaaatcttctttcgacaacatcagggcctggctcactgagattcatgagtatgcccagagggacgtggtgatcatgctgctaggcaacaaggcggatatgagcagcgaaagagtgatccgttccgaagacggagagaccttggccagggagtacggtgttcccttcctggagaccagcgccaagactggcatgaatgtggagttagcctttctggccatcgccaaggaactgaaataccgggccgggcatcaggcggatgagcccagcttccagatccgagactatgtagagtcccagaagaagcgctccagctgctgctccttcatgtgaatcccagggggcagagaggaggctctggaggcacacaggatgcagccttccccctcccaggcctggcttattccaagaggctgagccaatggggagaaagatggaggactcactgcacagccgcttcctagcagggagctatactccaactcctacttgagttcctgcggtctccccgcatccacagggagggtaaaacacttagcttttattttaatagtacataatttaataccaaaaaaggcgcctggatccccaaaaaaccgaggctgggagctagtggcccttttgctttctaggacttggggggccggccctccctcctaagcataacaaaggtggtgttgctccagctcagccccaggggacacagatgcactttgggggtgagggcaggtaatgactccatcgcaccctcagttcagctggacagaggctcaggtgaccccagccttcactgtctcccgctctccaggagcttatcttcgccccatctcccaaataagtgggcccttgtgctgtgaggaagaccaaagcctcagggaagataagagatatggagatgggagggggaggacaaggggcagagagtagggtctagctggctatctctggccttactaacacccccctggaggcatgccccttttctccagcacacaagcacattggggcacctggaaatattggttccaggctcctgttctctggacttcagatcctgggggagcccctcccccccctgaatccctggcttagctaccttcctgcctgtgcacctaaaaacctcaggtcagaactaggaaaagagttttgtttttatttttttgaaatggagtctcgttctgtcgcccaggctgaggtgcagtagtgcaatctccgctcactacaacctccactccctggggctcaagcgatcctcccacctcagccgccgaagtagctgggactataggtgtgtaccatcacacctggctaatttttgtattttttgtagacacagggtttcgccatgttgcccaggctggtcttgaattcctgagctcaagcaacctgccggcctcggcctcccaaagtactgggattacacgcagaaggcaccatgcccaggctagatgtgtcttatcccaatcctttggcaggcatgcagctccacaggcgatttcttcaagcagctgaagtgtttagccctcctgggttaagagccagataaggagaaatccctttcctaggtttggaatgtgttgtgaaaaaaaagagaaatccctggctcctggagctggtgggagacaagattaagcaaacctcccctgacatgtatccctttgaccccaagctctgcctcctccctgaccacccatgccctttcctttaacttctcaaacagataccagggcctaaactgctttacctcccctcctactgagtcaggttaggtggtgggaggtcacccatttccgagttaaaccaatgcaatatgagtaaaacaaagtcatgtgggtatgtctggggtagagagaggggtagcaagttcatgtgtcctccttggtcacatatctcccaaagctccgatccctgccatgggaagtggacaggaaacatgaggtcatgacctgcaggcatctttactgcagctctgccggcctggagggggagagggggaggaagaagtatgcgctgcacatttctgaggctactgcatttgctttcaaggcagaaatcttgctctgagcagtcagcggctccagtttgggcccgataaggaagttctccgtggcctccctcaggcagagcagggaggaggctgacattgccagtctcttctggggcccaaggcaggttgcaggagatccaatcccatagacagctctgggcctcttgcatttgagtttttcagaattaaactgcagtattttggaaagca

SEQ ID NO: 62201 - DNA, 687 bp, Artificial Sequence
  derived and/or modified sequence
atgtggctgatgagcgaggcccacggcgccgagcccgtgctgctgagagaggccgccagacccttcacccagaccctgagactgtgcgtgcccagcggcaacagcaaggtgatgctgctgggcgacaccggcgtgggcaagacctgcttcctgatccagttcaaggacggcgccttcctgagcggcaccttcatcgccaccgtgggcatcgacttcagaaacaaggtggtgaccgtggacggcgtgagagtgaagctgcagatctgggacaccgccggccaggagagattcagaagcgtgacccacgcctactacagagacgcccaggccctgctgctgctgtacgacatcaccaacaagagcagcttcgacaacatcagagcctggctgaccgagatccacgagtacgcccagagagacgtggtgatcatgctgctgggcaacaaggccgacatgagcagcgagagagtgatcagaagcgaggacggcgagaccctggccagagagtacggcgtgcccttcctggagaccagcgccaagaccggcatgaacgtggagctggccttcctggccatcgccaaggagctgaagtacagagccggccaccaggccgacgagcccagcttccagatcagagactacgtggagagccagaagaagagaagcagctgctgcagcttcatgtag

SEQ ID NO: 62202 - DNA, 576 bp, Artificial Sequence
  derived and/or modified sequence
atgtggctgatgagcgaggcccacggcgccgagcccgtgctgctgagagaggccgccagacccttcacccagaccctgagactgtgcgtgcccagcggcaacagcaagaacaaggtggtgaccgtggacggcgtgagagtgaagctgcagatctgggacaccgccggccaggagagattcagaagcgtgacccacgcctactacagagacgcccaggccctgctgctgctgtacgacatcaccaacaagagcagcttcgacaacatcagagcctggctgaccgagatccacgagtacgcccagagagacgtggtgatcatgctgctgggcaacaaggccgacatgagcagcgagagagtgatcagaagcgaggacggcgagaccctggccagagagtacggcgtgcccttcctggagaccagcgccaagaccggcatgaacgtggagctggccttcctggccatcgccaaggagctgaagtacagagccggccaccaggccgacgagcccagcttccagatcagagactacgtggagagccagaagaagagaagcagctgctgcagcttcatgtag

SEQ ID NO: 62203 - protein, 186 aa, Artificial Sequence
  derived and/or modified sequence
MTGTPGAVATRDGEAPERSPPCSPSYDLTGKNKVVTVDGVRVKLQIWDTAGQERFRSVTHAYYRDAQALLLLYDITNKSSFDNIRAWLTEIHEYAQRDVVIMLLGNKADMSSERVIRSEDGETLAREYGVPFLETSAKTGMNVELAFLAIAKELKYRAGHQADEPSFQIRDYVESQKKRSSCCSFM

SEQ ID NO: 62204 - DNA, 561 bp, Artificial Sequence
  derived and/or modified sequence
atgacaggcaccccaggagcagttgccacaagggacggtgaagcaccagaacgtagtcctccttgctctccttcctatgaccttaccggaaaaaataaggtggtgacagtcgatggagtgagggtaaaactgcagatctgggacacagctggtcaggagaggttcagatctgtgacacatgcctactaccgagacgcccaggccctgctcctgctatatgatattacaaataagagctccttcgataatattcgagcatggctaactgagatacatgaatacgctcagcgcgacgtcgtgatcatgttattgggcaacaaagcggacatgtctagcgagcgggttatcagatcagaggacggggagactctggcccgcgagtatggcgtaccattccttgaaacgagcgccaagaccgggatgaacgtggagcttgcctttctggctattgcgaaagagctgaagtacagggcagggcatcaagcagatgagccgagctttcagattcgagactatgttgaatcgcagaaaaagaggagcagctgttgcagcttcatgtag

SEQ ID NO: 62205 - DNA, 561 bp, Artificial Sequence
  derived and/or modified sequence
atgacaggcaccccaggagctgtggccaccagagatggagaggcccctgagaggagccccccctgcagccccagctatgacctgaccgggaagaacaaggtggtgacagtggatggagtgcgggtgaagctgcagatctgggacacagctggccaggagcgcttccgctctgtgacccacgcctactacagagatgcccaggccctgctgctgctgtatgacatcaccaacaagagcagctttgacaacatccgggcctggctgacagagatccacgagtatgcccagagagatgtggtgatcatgctgctgggcaacaaggctgacatgagcagcgagagggtcatccgctcagaagatggagagaccctggcccgggagtatggagtgcccttcctggagaccagcgccaagacaggcatgaatgtggagctggccttcctggccatcgccaaggagctgaagtaccgggccggccaccaggctgatgagcccagcttccagatccgggactatgtggagagccagaagaagaggagcagctgctgcagcttcatgtag

SEQ ID NO: 62206 - DNA, 561 bp, Artificial Sequence
  derived and/or modified sequence
atgaccggcacccccggcgccgtggccacccgggacggcgaggccccggaacgatcgccaccatgttccccatcatacgatctgaccggcaagaacaaggtagtcaccgtcgatggggtgagagtcaagcttcagatttgggacacagccggacaggagcgcttcagatctgtgactcatgcatattaccgcgacgcacaagctctccttctgctgtacgatatcactaacaaatcttcattcgataatattcgcgcctggctcactgaaattcacgaatacgcacaaagggacgtggtcatcatgctgttaggcaacaaggccgacatgagttcagaacgcgtcatccgctctgaagatggtgagactttggccagggagtacggcgtgccctttctggagacaagcgcaaagactggtatgaacgtagaactggccttcttggcaattgcgaaggagctgaagtatagagccggtcatcaggccgacgagccctcgtttcagatacgtgactatgtggagtcccagaagaagcgatcctcctgctgttccttcatgtag

SEQ ID NO: 62207 - DNA, 561 bp, Artificial Sequence
  derived and/or modified sequence
atgactggtacccctggggctgtcgctactagggatggggaagcgcctgaacgttctcccccatgctcccccagttatgacctaacgggaaaaaataaggttgtcacagtggacggcgttcgggtgaagctgcagatttgggatacagccggtcaggaaagattccgctccgtcacacacgcatattatagagatgcacaggccctgctgcttttgtatgacattacaaacaagtcctcctttgataatatccgcgcatggttgaccgagattcatgagtacgctcagcgagatgtagtcatcatgctactcggcaataaggcagatatgtctagcgaaagagtaattcgtagtgaggacggagagaccctcgccagggagtatggcgtgccatttctggaaaccagtgccaaaacagggatgaatgtggaactggctttcttggccatcgccaaggagttgaaataccgcgctggtcaccaggctgatgaaccgagcttccagatcagagactacgtggagtcccagaagaaacggtcgtcctgctgtagctttatgtag

SEQ ID NO: 62208 - DNA, 2528 bp, Artificial Sequence
  derived and/or modified sequence
ccttcgcctgcgggccggcactgctcacctctcgtccagggacatgacgggcacgccaggcgccgttgccacccgggatggcgaggcccccgagcgctccccgccctgcagtccgagctacgacctcacgggcaagaacaaggtggtgactgtggatggcgtgagagtgaagctgcagatctgggacaccgctgggcaggaacggttccgaagcgtcacccatgcttattacagagatgctcaggccttgcttctgctgtatgacatcaccaacaaatcttctttcgacaacatcagggcctggctcactgagattcatgagtatgcccagagggacgtggtgatcatgctgctaggcaacaaggcggatatgagcagcgaaagagtgatccgttccgaagacggagagaccttggccagggagtacggtgttcccttcctggagaccagcgccaagactggcatgaatgtggagttagcctttctggccatcgccaaggaactgaaataccgggccgggcatcaggcggatgagcccagcttccagatccgagactatgtagagtcccagaagaagcgctccagctgctgctccttcatgtgaatcccagggggcagagaggaggctctggaggcacacaggatgcagccttccccctcccaggcctggcttattccaagaggctgagccaatggggagaaagatggaggactcactgcacagccgcttcctagcagggagctatactccaactcctacttgagttcctgcggtctccccgcatccacagggagggtaaaacacttagcttttattttaatagtacataatttaataccaaaaaaggcgcctggatccccaaaaaaccgaggctgggagctagtggcccttttgctttctaggacttggggggccggccctccctcctaagcataacaaaggtggtgttgctccagctcagccccaggggacacagatgcactttgggggtgagggcaggtaatgactccatcgcaccctcagttcagctggacagaggctcaggtgaccccagccttcactgtctcccgctctccaggagcttatcttcgccccatctcccaaataagtgggcccttgtgctgtgaggaagaccaaagcctcagggaagataagagatatggagatgggagggggaggacaaggggcagagagtagggtctagctggctatctctggccttactaacacccccctggaggcatgccccttttctccagcacacaagcacattggggcacctggaaatattggttccaggctcctgttctctggacttcagatcctgggggagcccctcccccccctgaatccctggcttagctaccttcctgcctgtgcacctaaaaacctcaggtcagaactaggaaaagagttttgtttttatttttttgaaatggagtctcgttctgtcgcccaggctgaggtgcagtagtgcaatctccgctcactacaacctccactccctggggctcaagcgatcctcccacctcagccgccgaagtagctgggactataggtgtgtaccatcacacctggctaatttttgtattttttgtagacacagggtttcgccatgttgcccaggctggtcttgaattcctgagctcaagcaacctgccggcctcggcctcccaaagtactgggattacacgcagaaggcaccatgcccaggctagatgtgtcttatcccaatcctttggcaggcatgcagctccacaggcgatttcttcaagcagctgaagtgtttagccctcctgggttaagagccagataaggagaaatccctttcctaggtttggaatgtgttgtgaaaaaaaagagaaatccctggctcctggagctggtgggagacaagattaagcaaacctcccctgacatgtatccctttgaccccaagctctgcctcctccctgaccacccatgccctttcctttaacttctcaaacagataccagggcctaaactgctttacctcccctcctactgagtcaggttaggtggtgggaggtcacccatttccgagttaaaccaatgcaatatgagtaaaacaaagtcatgtgggtatgtctggggtagagagaggggtagcaagttcatgtgtcctccttggtcacatatctcccaaagctccgatccctgccatgggaagtggacaggaaacatgaggtcatgacctgcaggcatctttactgcagctctgccggcctggagggggagagggggaggaagaagtatgcgctgcacatttctgaggctactgcatttgctttcaaggcagaaatcttgctctgagcagtcagcggctccagtttgggcccgataaggaagttctccgtggcctccctcaggcagagcagggaggaggctgacattgccagtctcttctggggcccaaggcaggttgcaggagatccaatcccatagacagctctgggcctcttgcatttgagtttttcagaattaaactgcagtattttggaaagca

SEQ ID NO: 62209 - DNA, 561 bp, Artificial Sequence
  derived and/or modified sequence
atgaccggcacccccggcgccgtggccaccagagacggcgaggcccccgagagaagccccccctgcagccccagctacgacctgaccggcaagaacaaggtggtgaccgtggacggcgtgagagtgaagctgcagatctgggacaccgccggccaggagagattcagaagcgtgacccacgcctactacagagacgcccaggccctgctgctgctgtacgacatcaccaacaagagcagcttcgacaacatcagagcctggctgaccgagatccacgagtacgcccagagagacgtggtgatcatgctgctgggcaacaaggccgacatgagcagcgagagagtgatcagaagcgaggacggcgagaccctggccagagagtacggcgtgcccttcctggagaccagcgccaagaccggcatgaacgtggagctggccttcctggccatcgccaaggagctgaagtacagagccggccaccaggccgacgagcccagcttccagatcagagactacgtggagagccagaagaagagaagcagctgctgcagcttcatgtag

SEQ ID NO: 62210 - protein, 282 aa, Artificial Sequence
  derived and/or modified sequence
MKRRQKRKHLENEESQETAEKGGGIQRIHRDSPQPQSPLAQVQERGETPPRSQHVSLSSYSSYKTCVSSLCVNKEERGMKIYYMQVQMNKGVAVSWETEETLESLEKQPRMEEVTLSEVVRVGTPPSDVSTRNLLSDSEPSGEEKEHEERTESDSLPGSPTVEDTPRAKTPDWLVTMENGFRCMACCRVFTTMEALQEHVQFGIREGFSCHVFHLTMAQLTGNMESESTQDEQEEENGNEKEEEEKPEAKEEEGQPTEEDLGLRRSWSQCPGCVFHSPKDRN

SEQ ID NO: 62211 - protein, 244 aa, Artificial Sequence
  derived and/or modified sequence
MKRRQKRKHLENEESQETAEKGGGIQRIHRDSPQPQSPLAQVQERGETPPRSQHVSLSSYSSYKTCVSSLCVNKEERGMKIYYMQVQMNKGVAVSWETEETLESLEKQPRMEEVTLSEVVRVGTPPSDVSTRNLLSDSEPSGEEKEHEERTESDSLPGSPTVEDTPRAKTPDWLVTMENGFRCMACCRVFTTMEALQEHVQFGIREGFSCPKMSRRRKMEMRRRRKRNQKQRRRRGSPQKKTLA

SEQ ID NO: 62212 - DNA, 849 bp, Artificial Sequence
  derived and/or modified sequence
atgaagagaagacagaagagaaagcacctggagaacgaggagagccaggagaccgccgagaagggcggcggcatccagagaatccacagagacagcccccagccccagagccccctggcccaggtgcaggagagaggcgagaccccccccagaagccagcacgtgagcctgagcagctacagcagctacaagacctgcgtgagcagcctgtgcgtgaacaaggaggagagaggcatgaagatctactacatgcaggtgcagatgaacaagggcgtggccgtgagctgggagaccgaggagaccctggagagcctggagaagcagcccagaatggaggaggtgaccctgagcgaggtggtgagagtgggcaccccccccagcgacgtgagcaccagaaacctgctgagcgacagcgagcccagcggcgaggagaaggagcacgaggagagaaccgagagcgacagcctgcccggcagccccaccgtggaggacacccccagagccaagacccccgactggctggtgaccatggagaacggcttcagatgcatggcctgctgcagagtgttcaccaccatggaggccctgcaggagcacgtgcagttcggcatcagagagggcttcagctgccacgtgttccacctgaccatggcccagctgaccggcaacatggagagcgagagcacccaggacgagcaggaggaggagaacggcaacgagaaggaggaggaggagaagcccgaggccaaggaggaggagggccagcccaccgaggaggacctgggcctgagaagaagctggagccagtgccccggctgcgtgttccacagccccaaggacagaaactag

SEQ ID NO: 62213 - DNA, 735 bp, Artificial Sequence
  derived and/or modified sequence
atgaagagaagacagaagagaaagcacctggagaacgaggagagccaggagaccgccgagaagggcggcggcatccagagaatccacagagacagcccccagccccagagccccctggcccaggtgcaggagagaggcgagaccccccccagaagccagcacgtgagcctgagcagctacagcagctacaagacctgcgtgagcagcctgtgcgtgaacaaggaggagagaggcatgaagatctactacatgcaggtgcagatgaacaagggcgtggccgtgagctgggagaccgaggagaccctggagagcctggagaagcagcccagaatggaggaggtgaccctgagcgaggtggtgagagtgggcaccccccccagcgacgtgagcaccagaaacctgctgagcgacagcgagcccagcggcgaggagaaggagcacgaggagagaaccgagagcgacagcctgcccggcagccccaccgtggaggacacccccagagccaagacccccgactggctggtgaccatggagaacggcttcagatgcatggcctgctgcagagtgttcaccaccatggaggccctgcaggagcacgtgcagttcggcatcagagagggcttcagctgccccaagatgagcagaagaagaaagatggagatgagaagaagaagaaagagaaaccagaagcagagaagaagaagaggcagcccccagaagaagaccctggcctag

SEQ ID NO: 62214 - DNA, 849 bp, Artificial Sequence
  derived and/or modified sequence
atgaagaggcggcagaagagaaagcacttggagaatgaagagtcccaggaaacagccgagaaaggcggaggtattcagaggatccaccgagattcaccacagccacaatccccgttggcgcaggtgcaggagcggggtgaaacccccccccgcagtcagcatgtgagcctgtcctcctactcatcctacaaaacctgtgtatccagcctgtgcgttaacaaggaagaacggggcatgaaaatctactacatgcaggttcagatgaacaagggagtggcagtgtcatgggaaacagaagaaactcttgagagcctggagaagcagccccgtatggaagaagttacactaagcgaggtggtacgcgtgggtacccctcctagcgacgtttccacccggaatctgctgtcggattcagaacccagtggagaagagaaggaacacgaagagcgaaccgagagcgactccctccccggctccccaacggttgaagatacgcctcgggccaagacacccgactggttggttactatggaaaatggcttccgctgcatggcttgttgcagggtgttcaccacaatggaggctctgcaggagcacgtgcagttcggaatacgggagggcttttcttgccacgtcttccatttgactatggctcaattgactggtaacatggaatctgaatctacccaggacgagcaagaagaagaaaacgggaacgagaaggaggaggaggagaaaccggaagctaaagaagaagaagggcagcccaccgaagaggatcttggactgcgccgaagttggagccagtgtccaggctgtgtcttccactctccaaaagaccgcaactag

SEQ ID NO: 62215 - DNA, 735 bp, Artificial Sequence
  derived and/or modified sequence
atgaaaaggcggcagaaaagaaaacacctggagaacgaggagtcacaggagaccgcggagaagggcgggggtattcagcgaattcatagggactcaccccagcctcagtctccgttagcgcaagtgcaggagcgcggcgagacaccccccaggtctcaacatgtgagcctgtcatcctactcatcatacaaaacatgtgtgtcttctctatgcgtgaacaaagaagagcgcgggatgaaaatctactacatgcaggtccagatgaataagggcgtggctgtgtcttgggagacggaggaaacgctggagtccctggagaagcagcctcggatggaagaggtgactctttcggaggtagtgcgcgttggcacccccccatcagatgtgtcaacacgcaatctgctgtccgattccgagccgtccggggaagagaaggaacacgaggagcggaccgagtctgacagcctgcccggctccccaacagtggaagacaccccaagagccaagaccccagactggttagtgacaatggaaaacggatttcgctgtatggcttgttgtcgcgtattcaccaccatggaggcattacaagagcacgtgcagtttggtattcgagaagggtttagctgtcctaaaatgtcacggcgcaggaagatggaaatgaggcggcggcgaaaacgcaaccagaagcagcgtagaagacgcggctctcctcagaaaaaaacccttgcttag

SEQ ID NO: 62216 - DNA, 1234 bp, Artificial Sequence
  derived and/or modified sequence
aaccttaacagccctgcagtgtagtgggcactgggcagtgctgctccttcactaagcggtctgagttctttagctatctcggagattcaactacgtttactcgtactgaatctttttaatgaatttcctgagagccaagaagggccaatctacaggaaaaagtgggaggtggacattaagcatcttctagaaactcttctagctgatatcatgaaacgacgacaaaagaggaaacatttggaaaatgaagagtcccaggaaaccgctgagaagggaggaggaatccagagaatacatcgagacagcccccagcctcaatcacccctggcccaggttcaggaacgaggagagactcctccccgctcacaacatgtctccttgtcgtcctattcatcctataagacttgtgtgtcctctctgtgtgtaaacaaagaggaaaggggcatgaaaatatactacatgcaggtacaaatgaacaaaggtgtggctgtctcctgggagacagaggaaactttggagtccttagaaaagcagccaaggatggaagaagtgaccctttctgaggttgtgagggtaggtactcccccctctgatgtgtccaccagaaacctcctgtctgacagtgagcccagtggggaggagaaagagcatgaggaaaggacagaatcagacagcctgccaggctcacccaccgttgaggacacacccagagccaagactcctgactggctggtgaccatggagaacggcttcaggtgcatggcctgctgccgggtgttcaccaccatggaagccctccaggagcatgtgcagtttgggatcagagagggcttcagctgccacgtctttcatctcaccatggctcagctgacaggcaacatggaatcagagagcacccaagatgagcaggaggaggaaaatggaaatgagaaggaggaggaagagaaaccagaagcaaaggaggaggaggggcagcccacagaagaagaccttggcctgaggagatcctggagccaatgtccaggctgtgtgtttcattctccaaaggacaggaactgagacttatgggccagaagatactggaagatggtgtggccttctcttgcaagagggagaagaaagagccatggagatagtagcagacaggctgcccaaggtatgaagcagatgagggaccagcactcagtctaacatgtaaacatcatacgtaataaaggttgtgtttcaaacctta

SEQ ID NO: 62217 - DNA, 945 bp, Artificial Sequence
  derived and/or modified sequence
aaccttaacagccctgcagtgtagtgggcactgggcagtgctgctccttcactaagcggtctgagttctttagctatctcggagattcaactacgtttactcgtactgaatctttttaatgaatttcctgagagccaagaagggccaatctacaggaaaaagtgggaggtggacattaagcatcttctagaaactcttctagctgatatcatgaaacgacgacaaaagaggaaacatttggaaaatgaagagtcccaggaaaccgctgagaagggaggaggaatccagagaatacatcgagacagcccccagcctcaatcacccctggcccaggttcaggaacgaggagagactcctccccgctcacaacatgtctccttgtcgtcctattcatcctataagacttgtgtgtcctctctgtgtgtaaacaaagaggaaaggggcatgaaaatatactacatgcaggtacaaatgaacaaaggtgtggctgtctcctgggagacagaggaaactttggagtccttagaaaagcagccaaggatggaagaagtgaccctttctgaggttgtgagggtaggtactcccccctctgatgtgtccaccagaaacctcctgtctgacagtgagcccagtggggaggagaaagagcatgaggaaaggacagaatcagacagcctgccaggctcacccaccgttgaggacacacccagagccaagactcctgactggctggtgaccatggagaacggcttcaggtgcatggcctgctgccgggtgttcaccaccatggaagccctccaggagcatgtgcagtttgggatcagagagggcttcagctgccccaagatgagcaggaggaggaaaatggaaatgagaaggaggaggaagagaaaccagaagcaaaggaggaggaggggcagcccacagaagaagaccttggcctga

SEQ ID NO: 62218 - DNA, 849 bp, Artificial Sequence
  derived and/or modified sequence
atgaagaggcggcagaagaggaagcacctggagaatgaggagagccaggagacagctgagaagggcggcggcatccagaggatccaccgggacagcccccagccccagagccccctggcccaggtgcaggagcggggggagaccccacccaggagccagcacgtgtccctgagcagctacagcagctacaagacctgtgtgagcagcctgtgtgtgaacaaggaggagcggggcatgaagatctactacatgcaggtgcagatgaacaagggcgtggccgtgtcctgggagacagaggagaccctggagagcctggagaagcagcccaggatggaggaggtgaccctgtctgaggtggtgcgggtgggcaccccacccagtgatgtgtccaccaggaacctgctgagtgacagcgagcccagcggggaggagaaggagcacgaggagaggacagaaagtgacagcctgcccggcagccccaccgtggaggacaccccccgggccaagaccccagactggctggtgaccatggagaatggcttccgctgcatggcctgctgcagggtcttcaccaccatggaggccctgcaggagcacgtgcagtttggcatccgggagggcttcagctgccacgtgttccacctgaccatggcccagctgactggaaacatggagagcgagagcacccaggatgagcaggaggaggagaatggaaatgagaaggaggaggaggagaagccagaggccaaggaggaggagggccagcccacagaggaggacctgggcctgcggcgctcctggagccagtgccccggctgtgtgttccacagccccaaggacagaaattag

SEQ ID NO: 62219 - DNA, 735 bp, Artificial Sequence
  derived and/or modified sequence
atgaagaggcggcagaagaggaagcacctggagaatgaggagagccaggagacagctgagaagggcggcggcatccagaggatccaccgggacagcccccagccccagagccccctggcccaggtgcaggagcggggggagaccccacccaggagccagcacgtgtccctgagcagctacagcagctacaagacctgtgtgagcagcctgtgtgtgaacaaggaggagcggggcatgaagatctactacatgcaggtgcagatgaacaagggcgtggccgtgtcctgggagacagaggagaccctggagagcctggagaagcagcccaggatggaggaggtgaccctgtctgaggtggtgcgggtgggcaccccacccagtgatgtgtccaccaggaacctgctgagtgacagcgagcccagcggggaggagaaggagcacgaggagaggacagaaagtgacagcctgcccggcagccccaccgtggaggacaccccccgggccaagaccccagactggctggtgaccatggagaatggcttccgctgcatggcctgctgcagggtcttcaccaccatggaggccctgcaggagcacgtgcagtttggcatccgggagggcttcagctgccccaagatgagcagaagaaggaagatggagatgagaagaagaaggaagaggaaccagaagcagaggagaagaagaggcagcccccagaagaagaccctggcctag

SEQ ID NO: 62220 - DNA, 849 bp, Artificial Sequence
  derived and/or modified sequence
atgaagcggcggcagaagcggaagcacctggagaacgaggagagccaagaaacggctgagaagggcggcggcatccagagaattcaccgagattcacctcagcctcaatcccctcttgcgcaagtccaggagaggggagagacacctccccgctcccaacatgtttcgctgtctagctactcctcatataagacatgcgtgagctccctctgtgtgaataaagaggaaaggggaatgaagatctactatatgcaggttcagatgaacaaaggagtggctgtgtcatgggaaaccgaggagacccttgagagcctcgaaaagcaacctcggatggaagaagtaactctttcggaggtggtgcgagtcggcacccctccttctgatgtgtctactaggaatctcctctctgatagtgagccatccggagaagaaaaggaacatgaggaaagaacagaaagcgacagtcttcctggttcacctacagtcgaggatactccccgtgccaaaactcccgattggctggtgaccatggagaatggctttcgctgtatggcttgctgccgggttttcacaaccatggaagcgttacaggaacatgtacaatttgggattcgagagggcttttcctgtcatgtgttccaccttaccatggcacaattgactggcaatatggagagtgagtccacccaggacgaacaggaggaagaaaacggcaatgaaaaggaggaagaagaaaagcctgaggccaaggaagaagaggggcagcccaccgaagaggacttaggcctgagaagaagctggtcgcagtgccctggctgcgtgttccattcaccaaaagatcggaactag

SEQ ID NO: 62221 - DNA, 735 bp, Artificial Sequence
  derived and/or modified sequence
atgaagcggcggcagaagcggaagcacctggagaacgaggagagccaggagacagcggagaaggggggaggcatacagcgtatccatcgcgacagccctcagccacagtcccccctggctcaggtgcaggaaagaggagaaacaccaccaagatctcagcacgtctccctcagtagttactcatcgtacaagacttgtgtttctagcctctgtgtgaataaagaagagcggggcatgaagatatattacatgcaggtgcagatgaataagggcgtcgccgtgtcctgggagacagaggaaactctagaatcccttgaaaaacaaccaagaatggaggaagtgaccttaagtgaagttgtgcgcgtcggaacccccccgtcagatgtctctacacggaatctcctttcagattccgaaccatcaggcgaggagaaggaacacgaagagcgcacagagagcgatagcctgcccgggagccctacagtcgaggatacacccagggctaagacccccgactggctcgtgaccatggagaatggctttagatgcatggcatgttgtcgtgttttcacgactatggaggccttacaggagcacgtgcagttcgggatcagggagggctttagctgccccaagatgagcaggaggcgaaagatggaaatgagacgtaggcggaagcggaaccagaaacagcggagacggagaggcagtccccaaaagaaaacactggcgtag

SEQ ID NO: 62222 - DNA, 849 bp, Artificial Sequence
  derived and/or modified sequence
atgaagagacgccagaagaggaaacacttggaaaacgaagagtcccaggagacagccgaaaagggcggaggcatacagagaatacatcgggatagcccgcagccacagagccccctcgcccaagtgcaggagcgtggcgagacaccaccccgttctcagcatgtctccctgtcgtcctatagttcttataaaacttgcgtctcgtccctgtgtgtgaataaggaggagcggggaatgaaaatctattatatgcaggtgcaaatgaacaagggagtggccgtgtcttgggagaccgaggaaaccctggagtccctggaaaagcagccacgaatggaggaagtcactctgtcagaagtagtgcgcgtgggaaccccaccatcagacgtaagtacgagaaatctgttaagtgatagcgaaccgagcggcgaggagaaagagcacgaggagagaactgagagtgactctcttcccggaagtcccacggtggaggacacccccagggcaaagacccccgattggctggttacaatggagaatggtttccgctgcatggcttgctgccgcgtcttcaccacaatggaggcactgcaagagcatgtgcagttcgggatcagagaggggttctcgtgccatgtttttcatctcactatggcacagctaacaggaaatatggagagcgagagcacccaagacgaacaagaggaagagaatgggaacgagaaggaggaggaagaaaaaccagaggctaaggaggaggaaggacagccaacagaagaggacttaggcctgcgcaggtcctggtcacaatgccctggatgcgtttttcatagtcctaaagaccgcaactag

SEQ ID NO: 62223 - DNA, 735 bp, Artificial Sequence
  derived and/or modified sequence
atgaaacgcaggcagaaaaggaagcacctggagaatgaggagtcacaggaaaccgctgaaaaggggggtgggatccagagaattcaccgggacagtccccaaccacagtctccactggcacaggtacaggaaagaggagagactccccctagaagccagcacgtcagcctcagctcctacagtagctacaaaacctgcgtctcaagtctgtgtgtaaataaggaagagcgagggatgaagatttactacatgcaggtgcaaatgaataaaggtgtagcagtctcgtgggaaacggaggagactctggagtccctcgagaaacagccaaggatggaggaggtgacacttagcgaggtcgtacgtgtcggcacccctccctccgatgtcagcactcgaaacctgctgtcagactctgaaccatctggggaggagaaagaacatgaggagcgcacagagtccgatagtctgccaggcagcccaacagttgaggatacccctagggctaagacgccggattggctcgttaccatggagaacggctttcgttgtatggcgtgctgtcgcgtatttacaacgatggaagccctgcaggagcacgtgcagttcggaattcgagaaggtttctcttgcccaaagatgtcaagacgcaggaagatggagatgagacgcagacgcaagcggaaccagaagcagcgccgtcggagaggttccccgcagaaaaagaccttggcctag

SEQ ID NO: 62224 - protein, 126 aa, Artificial Sequence
  derived and/or modified sequence
MVDENDIRALNVRHYRDHIGVVSQEPVLFGTTISNNIKYGRDDVTDEEMERAAREANAYDFIMEFPNKFNTLVGEKGAQMSGGQKQRIAIARALVRNPKILILDEATSALDSESKSAVQAALEKKK

SEQ ID NO: 62225 - DNA, 381 bp, Artificial Sequence
  derived and/or modified sequence
atggtggacgagaacgacatcagagccctgaacgtgagacactacagagaccacatcggcgtggtgagccaggagcccgtgctgttcggcaccaccatcagcaacaacatcaagtacggcagagacgacgtgaccgacgaggagatggagagagccgccagagaggccaacgcctacgacttcatcatggagttccccaacaagttcaacaccctggtgggcgagaagggcgcccagatgagcggcggccagaagcagagaatcgccatcgccagagccctggtgagaaaccccaagatcctgatcctggacgaggccaccagcgccctggacagcgagagcaagagcgccgtgcaggccgccctggagaagaagaagtag

SEQ ID NO: 62226 - DNA, 381 bp, Artificial Sequence
  derived and/or modified sequence
atggtcgacgagaatgatattcgcgctttaaacgtgagacactaccgggatcacatcggcgtggtgtcccaggaacccgtcctatttggcacaacaatcagtaataatatcaaatacgggagggacgatgtgaccgatgaggagatggagcgcgctgctcgcgaagcaaatgcctacgactttataatggagtttccaaacaagttcaataccctggtcggcgaaaagggcgcccagatgagcggaggacaaaagcagcgaattgctattgcccgcgccctggtaaggaacccaaaaatcctgatcctcgacgaggccacttccgctcttgatagcgagtctaagagcgctgtccaagctgcattggaaaagaaaaagtag

SEQ ID NO: 62227 - DNA, 381 bp, Artificial Sequence
  derived and/or modified sequence
atggtggatgaaaatgacatccgggccctgaatgtgcgccactacagagaccacatcggcgtggtgtcccaggagcctgtgctgtttggcaccaccatcagcaacaacatcaagtatggaagagatgatgtgacagatgaggagatggagcgggccgcccgggaggccaatgcctatgacttcatcatggagttccccaacaagttcaacaccctggtgggggagaagggggcccagatgtctgggggccagaagcagagaattgccatcgcccgggccctggtgaggaaccccaagatcctgatcctggatgaggccaccagcgccctggacagcgagagcaagtctgctgtgcaggccgccctggagaagaagaagtag

SEQ ID NO: 62228 - DNA, 381 bp, Artificial Sequence
  derived and/or modified sequence
atggtggacgagaacgacatccgggccctgaacgtgcggcactaccgggaccatatcggtgttgtgtcccaggagcccgtgctattcggaactactatctctaataacataaaatacggccgcgacgatgtaacggacgaagaaatggaaagagccgctagggaggccaacgcatacgattttatcatggagttcccgaacaagttcaataccctggttggagagaagggcgctcagatgtcaggcggccagaagcagcgtatcgctatcgctagggctctggtgagaaatccaaaaattctgattctagacgaggccacatctgctctcgacagtgaaagtaaaagtgccgttcaggccgctctagaaaagaagaaatag

SEQ ID NO: 62229 - DNA, 381 bp, Artificial Sequence
  derived and/or modified sequence
atggtggatgagaatgacatccgggctctcaacgtgcgacattaccgggatcacataggagtggttagccaggagcccgtgctgtttggcaccacaatctccaataatataaagtacggtcgagacgatgtgactgacgaggaaatggagcgagccgcacgcgaagcaaacgcttatgattttattatggagtttccgaacaaattcaacacgttagtgggcgaaaagggagcccaaatgtccggaggccaaaagcagaggatcgccatcgcaagggcgctcgtgcgcaaccctaaaatcctaatcctggacgaggcaacaagtgccctggactctgaatctaagtctgccgtgcaggccgcactggaaaagaaaaagtag

SEQ ID NO: 62230 - protein, 103 aa, Artificial Sequence
  derived and/or modified sequence
MKSEDYPHETMAPDIHEERQYRCEDCDQLFESKAELADHQKFPCSTPHSAFSMVEEDFQQKLESENDLQEIHTIQECKECDQVFPDLQSLEKHMLSHTEEREY

SEQ ID NO: 62231 - protein, 29 aa, Artificial Sequence
  derived and/or modified sequence
MKSEDYPHETMAPDIHEERQYRCEDCDQL

SEQ ID NO: 62232 - protein, 1003 aa, Artificial Sequence
  derived and/or modified sequence
MKSEDYPHETMAPDIHEERQYRCEDCDQLFESKAELADHQKFPCSTPHSAFSMVEEDFQQKLESENDLQEIHTIQECKECDQVFPDLQSLEKHMLSHTEEREYKCDQCPKAFNWKSNLIRHQMSHDSGKHYECENCAKVFTDPSNLQRHIRSQHVGARAHACPECGKTFATSSGLKQHKHIHSSVKPFICEVCHKSYTQFSNLCRHKRMHADCRTQIKCKDCGQMFSTTSSLNKHRRFCEGKNHFAAGGFFGQGISLPGTPAMDKTSMVNMSHANPGLADYFGANRHPAGLTFPTAPGFSFSFPGLFPSGLYHRPPLIPASSPVKGLSSTEQTNKSQSPLMTHPQILPATQDILKALSKHPSVGDNKPVELQPERSSEERPFEKISDQSESSDLDDVSTPSGSDLETTSGSDLESDIESDKEKFKENGKMFKDKVSPLQNLASINNKKEYSNHSIFSPSLEEQTAVSGAVNDSIKAIASIAEKYFGSTGLVGLQDKKVGALPYPSMFPLPFFPAFSQSMYPFPDRDLRSLPLKMEPQSPGEVKKLQKGSSESPFDLTTKRKDEKPLTPVPSKPPVTPATSQDQPLDLSMGSRSRASGTKLTEPRKNHVFGGKKGSNVESRPASDGSLQHARPTPFFMDPIYRVEKRKLTDPLEALKEKYLRPSPGFLFHPQMSAIENMAEKLESFSALKPEASELLQSVPSMFNFRAPPNALPENLLRKGKERYTCRYCGKIFPRSANLTRHLRTHTGEQPYRCKYCDRSFSISSNLQRHVRNIHNKEKPFKCHLCDRCFGQQTNLDRHLKKHENGNMSGTATSSPHSELESTGAILDDKEDAYFTEIRNFIGNSNHGSQSPRNVEERMNGSHFKDEKALVTSQNSDLLDDEEVEDEVLLDEEDEDNDITGKTGKEPVTSNLHEGNPEDDYEETSALEMSCKTSPVRYKEEEYKSGLSALDHIRHFTDSLKMRKMEDNQYSEAELSSFSTSHVPEELKQPLHRKSKSQEESKA

SEQ ID NO: 62233 - protein, 1042 aa, Artificial Sequence
  derived and/or modified sequence
MKSEDYPHETMAPDIHEERQYRCEDCDQLFESKAELADHQKFPCSTPHSAFSMVEEDFQQKLESENDLQEIHTIQECKECDQVFPDLQSLEKHMLSHTEEREYKCDQCPKAFNWKSNLIRHQMSHDSGKHYECENCAKVFTDPSNLQRHIRSQHVGARAHACPECGKTFATSSGLKQHKHIHSSVKPFICEVCHKSYTQFSNLCRHKRMHADCRTQIKCKDCGQMFSTTSSLNKHRRFCEGKNHFAAGGFFGQGISLPGTPAMDKTSMVNMSHANPGLADYFGANRHPAGLTFPTAPGFSFSFPGLFPSGLYHRPPLIPASSPVKGLSSTEQTNKSQSPLMTHPQILPATQDILKALSKHPSVGDNKPVELQPERSSEERPFEKISDQSESSDLDDVSTPSGSDLETTSGSDLESDIESDKEKFKENGKMFKDKVSPLQNLASINNKKEYSNHSIFSPSLEEQTAVSGAVNDSIKAIASIAEKYFGSTGLVGLQDKKVGALPYPSMFPLPFFPAFSQSMYPFPDRDLRSLPLKMEPQSPGEVKKLQKGSSESPFDLTTKRKDEKPLTPVPSKPPVTPATSQDQPLDLSMGSRSRASGTKLTEPRKNHVFGGKKGSNVESRPASDGSLQHARPTPFFMDPIYRVEKRKLTDPLEALKEKYLRPSPGFLFHPQMSAIENMAEKLESFSALKPEASELLQSVPSMFNFRAPPNALPENLLRKGKERYTCRYCGKIFPRSANLTRHLRTHTGEQPYRCKYCDRSFSISSNLQRHVRNIHNKEKPFKCHLCDRCFGQQTNLDRHLKKHENGNMSGTATSSPHSELESTGAILDDKEDAYFTEIRNFIGNSNHGSQSPRNVEERMNGSHFKDEKALVTSQNSDLLDDEEVEDEVLLDEEDEDNDITGKTGKEPVTSNLHEGNPEDDYEETSALEMSCKTSPVRYKEEEYKSGLSALDHIRHFTDSLKMRKMEDNQYSEAELSSFSTSHVPEELKQPLHRKSKSQAYAMMLSLSDKESLHSTSHSSSNVWHSMARAAAESSAIQSISHV

SEQ ID NO: 62234 - protein, 22 aa, Artificial Sequence
  derived and/or modified sequence
MKSEDYPHETMAPDIHEERQYR

SEQ ID NO: 62235 - protein, 125 aa, Artificial Sequence
  derived and/or modified sequence
MKSEDYPHETMAPDIHEERQYRCEDCDQLFESKAELADHQKFPCSTPHSAFSMVEEDFQQKLESENDLQEIHTIQECKECDQVFPDLQSLEKHMLSHTEEREYKCDQCPKAFNWKSNLIRHQMSH

SEQ ID NO: 62236 - DNA, 3012 bp, Artificial Sequence
  derived and/or modified sequence
atgaaatccgaggattacccgcacgagaccatggcccccgatattcacgaagagagacaatatcggtgcgaggactgcgaccagctttttgaatcaaaagccgaactcgctgatcaccaaaagttcccttgctctactccacactcggccttctccatggttgaagaggacttccaacagaagctcgaatccgaaaatgacttacaggagatccatactatccaggagtgtaaagagtgcgaccaggtgtttcctgatctgcaatctcttgaaaaacatatgctctcgcacacagaggagagagaatacaagtgcgatcagtgtccaaaagctttcaactggaaaagtaatctgatacgccaccagatgtctcatgatagcggaaaacactacgaatgtgagaattgtgcaaaagtctttacggatccgtccaatctgcagcgccatatcagaagccagcatgtcggcgcccgggcccacgcctgtcctgaatgtggaaagaccttcgccacatcatcaggactgaaacagcacaagcacatccactcctccgtgaaacccttcatctgtgaggtttgtcacaagtcctacacacagttttctaatctgtgcagacacaagcgcatgcacgcagattgtcgtacacagattaagtgtaaggactgtggccaaatgttttccaccacttcgtcattgaacaaacacagaagattctgtgagggcaagaatcacttcgctgctggcgggttttttgggcaggggattagtcttcctggaaccccagccatggataagacatcaatggtcaacatgagccacgctaatccaggcctggcagactacttcggcgctaacaggcatccggcaggcctgacatttccaaccgcccccggattctccttcagctttcctggcttattcccatcaggtctgtaccataggccacctctgatccccgctagcagccccgtaaagggactgtccagcacagagcagactaacaaatcccagtcccccctgatgacccatccgcagatactgccagcaacacaggacattctgaaggctttgtcaaagcatccatcagtgggcgacaacaagccggtggagctgcaaccggagcgctccagcgaagaacggcccttcgagaaaatctcagaccagtcagaatccagcgatctggatgacgtgtctaccccatcaggctctgatcttgaaacaacctccggtagcgatttggaaagtgatatcgaaagcgataaggagaaattcaaggaaaatggcaagatgtttaaggacaaggtgtctccgttgcagaacttggcttccataaacaacaaaaaggagtacagcaaccactccatcttttctcccagtctggaagaacagactgcagttagtggagcagtgaacgactccatcaaagctatcgcaagcatcgcggaaaagtactttggatccaccggcctggtgggtttgcaagataaaaaggtgggcgccctgccctaccccagtatgtttccgctgccgttttttcctgcattcagccagtctatgtaccccttccccgaccgggacctccgaagtctgcctttaaaaatggagccccaaagccccggcgaggtgaaaaagctgcaaaagggctccagcgaatctccttttgaccttaccacaaaacgcaaagacgaaaagcctttaaccccagtgccctccaaaccacccgtcactcctgcaacatcgcaggatcagccattagacttaagcatggggagcagaagcagggccagtggaaccaagctgaccgagcctcgaaagaatcatgtgtttggagggaaaaaagggagcaatgtggaaagtcggcccgcaagtgacggaagtctccagcatgccaggccaaccccattttttatggatcccatctatagagtggaaaagcgcaaacttacagaccctcttgaagcccttaaggaaaagtacctgcgaccctctcccggttttcttttccatccccagatgagcgctattgaaaacatggccgagaagctagaatccttcagcgctctgaaacccgaagcctctgagttgcttcagtccgtgccttccatgtttaattttagggctccaccaaacgccttaccggagaatctgcttaggaaaggcaaagagcggtacacctgccgatactgcggtaagatctttcccagatcggccaatctgacgaggcatttgaggactcacacaggggagcagccgtatagatgtaaatactgtgataggagctttagcatatcctcaaatctgcagcgccatgtccgcaacatccataataaagagaagccttttaagtgccacctgtgtgataggtgttttggtcagcagaccaacctggaccggcacttaaagaagcacgaaaatggcaatatgtcaggcacagccacctcatccccacacagcgagcttgagtccaccggagctattttagatgataaggaggatgcttacttcacagagattcgaaactttatcggtaatagcaatcacggttcccagtcacctcgaaatgttgaggagagaatgaatggatctcactttaaggatgagaaggcccttgtcacatcccagaatagcgatttgctggacgacgaggaggtagaggatgaagtgctgctggatgaggaggacgaagataatgatatcaccgggaaaacagggaaagaacctgtgactagtaatctgcatgagggcaatcctgaggacgactacgaagagacgtctgcactggaaatgagttgtaaaaccagccctgtgagatataaggaagaggaatataagtcaggcctttctgctctggaccatatacgacactttaccgatagcttgaaaatgcgcaagatggaagacaatcagtactctgaagctgaattgtcttctttctctacatcccatgtccctgaggagctgaagcagcccctgcacaggaaatccaaatctcaagaagagtctaaggcgtag

SEQ ID NO: 62237 - DNA, 3129 bp, Artificial Sequence
  derived and/or modified sequence
atgaagagcgaggattaccctcatgaaactatggccccggacatccacgaggaaaggcagtatcgctgcgaggattgtgaccaactgtttgagagcaaggctgagttggctgatcaccagaagtttccatgctccaccccccacagcgcattctccatggtggaggaggacttccaacagaagctcgagtccgaaaatgatctgcaggagattcacactattcaagagtgcaaggaatgtgaccaagtcttccccgaccttcagagccttgaaaaacacatgctttcacacaccgaggagagggagtataaatgtgaccagtgccctaaggcctttaactggaagtccaacttgattcgccaccaaatgtcacatgacagcgggaagcactacgagtgcgagaactgtgccaaagtatttactgacccgtccaacttgcagaggcatatccgaagccagcacgtcggtgcgcgggcccatgcatgcccggaatgcgggaaaaccttcgccactagtagtggcctgaagcagcacaaacatatacacagcagcgtgaaaccattcatctgcgaagtgtgtcataagtcatacacccagttctctaacctgtgccgccataaacgcatgcacgccgattgccgtacccagattaagtgtaaagattgcgggcagatgttcagtactactagctctctgaacaaacaccgacgattctgcgaaggaaaaaatcacttcgctgcaggcggcttctttgggcaaggtatcagcttgccaggaacacccgcaatggacaaaacctccatggtgaatatgtcccatgcaaacccaggcctggccgattatttcggagcaaatcggcacccagcagggctgacatttcccactgcccccggtttctccttctctttccccggcctgtttccctctgggctgtaccacaggccacccctgatcccagcttcctcaccagttaaaggcctgtcttcaacggaacagacaaacaagagtcagtcccctctcatgacgcatccccaaattctgcccgccacccaggatatcctgaaagctctatccaaacatccatcggtgggagataacaaaccagtggagcttcaacccgaaagatcctccgaagagaggccattcgaaaagatcagtgaccagtctgaaagttcagacctggatgacgtgagcaccccatcaggctccgacctggaaaccacttcgggctcagatctcgagagcgatatcgaatccgacaaggagaaatttaaggagaacggaaagatgttcaaagataaagtttccccactacagaatcttgcatctatcaataataaaaaggagtattcaaaccatagcattttcagcccttcccttgaggagcagacagctgttagtggcgcggtgaatgattctataaaggccatcgcatctatagccgaaaaatattttggcagcactggactcgttggcttgcaggacaaaaaggtaggagctctgccttacccgagcatgttcccccttccttttttccctgcattttcacagtccatgtaccccttcccagaccgcgacttgcgtagcttgcccctcaaaatggaaccgcagtctcctggagaagtgaagaagctgcagaagggctcctctgagtccccctttgatctcactacaaagcgcaaggacgagaagccattgaccccagtcccaagcaagcctcccgtgacccccgcaacgagtcaggatcagcctctggatctctccatgggctcccgctcccgcgcctcaggcacgaaactcacagagcctagaaagaaccatgtgttcggcggaaaaaaagggtctaacgtcgagtcaaggcccgcgagtgacggcagtcttcagcacgccaggccgacccccttctttatggatcccatctaccgagtggagaaacgtaaactgacagaccctcttgaggcccttaaggagaagtacttgagacctagtcccgggtttctctttcacccccagatgagtgccattgagaacatggccgaaaaactcgaatcattcagtgccctgaaacccgaggcatcagagctgctgcagtccgttcctagtatgttcaacttccgggctcctcccaacgccctccctgagaacctgcttagaaaaggtaaagaacgctacacctgcagatattgcggcaaaatctttcctcggtctgccaatctcacacgacatctccggacccatacgggtgagcagccatatcgctgtaaatattgcgataggagtttctctatctccagcaatttgcagagacacgttcggaatatccataacaaggaaaaacccttcaaatgccatctctgcgatagatgctttgggcagcagaccaatctcgacagacatcttaagaagcacgaaaatggaaacatgtccggaacagctacgagcagtccacattctgaactcgagagcactggggcgattttagacgataaagaggacgcctactttactgaaatcagaaattttattggcaattccaaccatgggtcccagagtcccagaaacgtggaagagcgcatgaatggttcacattttaaagatgagaaggccctagtgacaagccagaatagtgacttgctagacgacgaggaggtggaggatgaagtgttgctggacgaagaggacgaggacaatgatataacagggaaaacaggaaaggaaccggtgaccagcaatctccatgagggtaatcccgaagacgattatgaagagaccagcgccctggagatgtcctgcaagacaagccccgtccgctacaaagaagaggagtataaatccggattgtccgccttggaccatatccggcacttcaccgattctttaaaaatgagaaaaatggaagataatcagtattcagaagccgagctgagcagcttttccacttcgcatgtcccggaagaactgaagcagccgttgcatagaaagagtaagtctcaggcatatgcaatgatgctcagcctgagtgataaagagagcttacatagcacgtcccactccagtagcaacgtctggcactcaatggcacgcgccgcggccgagtcctctgccatccagtctatctcccacgtgtag

SEQ ID NO: 62238 - DNA, 3012 bp, Artificial Sequence
  derived and/or modified sequence
atgaagtctgaggactacccccatgagaccatggccccagacatccacgaggagcggcagtaccgctgtgaggactgtgaccagctgtttgagagcaaggccgagctggccgaccaccagaagttcccctgcagcaccccccacagcgccttctccatggtggaggaggacttccagcagaagctggagagtgaaaatgacctgcaggagatccacaccatccaggagtgcaaggaatgtgaccaggtgtttcctgacctgcagagcctggagaagcacatgctgagccacacagaggagcgggagtacaagtgtgaccagtgccccaaggccttcaactggaagagcaacctgatccgccaccagatgagccatgattctgggaagcactatgaatgtgagaactgtgccaaggtgttcacagaccccagcaacctgcagaggcacatccgcagccagcacgtgggcgcccgggcccacgcctgcccagaatgtgggaagacctttgccaccagcagcggcctgaagcagcacaagcacatccacagctctgtgaagcccttcatctgtgaggtgtgccacaagagctacacccagttcagcaacctgtgccgccacaagaggatgcatgctgactgcaggacccagatcaagtgcaaggactgtggccagatgttcagcaccaccagcagcctgaacaagcaccggcgcttctgtgagggcaagaaccactttgctgctgggggcttcttcggccagggcatcagcctgcccggcaccccagccatggacaagacctccatggtgaacatgagccacgccaaccctggcctggccgactactttggagccaacagacaccctgctggcctgaccttccccacagcccctggcttctccttctccttccctggcctcttccccagcggcctgtaccacaggcctcctctcatcccagccagcagccctgtgaagggcctgagcagcacagagcagaccaacaagagccagagccccctgatgacccacccccagatcctgcctgccacccaggacatcctgaaggccctgagcaagcaccccagcgtgggggacaacaagcctgtggagctgcagcctgagaggagcagcgaggagcggccctttgagaagatcagtgaccagagcgagagcagtgacctggatgatgtgtccaccccatctggcagtgacctggagaccaccagcggcagtgacctggagagtgacattgaaagtgacaaggagaagttcaaggaaaatggcaagatgttcaaggacaaggtgagccccctgcagaacctggccagcatcaacaacaagaaggagtacagcaaccacagcatcttcagccccagcctggaggagcagacagctgtgtctggagctgtgaatgacagcatcaaggccatcgccagcattgctgagaagtacttcggcagcacaggcctggtgggcctgcaggacaagaaggtgggcgccctgccctaccccagcatgttccccctgcccttcttccctgccttcagccagagcatgtaccccttcccagaccgggacctgcggagcctgcccctgaagatggagccccagagccctggagaggtgaagaagctgcagaagggcagcagcgagagcccctttgacctgaccaccaagaggaaggatgagaagcccctgacccctgtgcccagcaagccccctgtgaccccagccaccagccaggaccagcccctggacctgtccatgggcagccgcagccgggccagcggcaccaagctgacagagcccaggaagaaccacgtgtttggaggcaagaagggcagcaatgtggagagcaggcctgccagtgatggcagcctgcagcacgcccggcccacccccttcttcatggaccccatctacagagtggagaagaggaagctgacagaccccctggaggccctgaaggagaagtacctgcggcccagccctggcttcctgttccacccccagatgtctgccatcgagaacatggccgagaagctggagagcttcagcgccctgaagccagaggccagcgagctgctgcagagcgtgcccagcatgttcaacttccgggcccccccaaatgccctgcctgagaacctgctgaggaagggcaaggagcgctacacctgccgctactgcggcaagatcttccccaggtctgccaacctgaccaggcacctgcggacccacactggagagcagccctaccgctgcaagtactgtgacaggagcttcagcatcagcagcaacctgcagagacatgtgaggaacatccacaacaaggagaagcccttcaagtgccacctgtgtgaccgctgcttcggccagcagaccaacctggacagacacctgaagaagcatgaaaatggaaacatgtctggaacagccaccagcagcccccacagcgagctggagagcactggagccatcctggatgacaaggaggatgcctacttcacagagatccggaacttcatcggcaacagcaaccacggcagccagagccccagaaatgtggaggagaggatgaatggcagccacttcaaggatgagaaggccctggtgaccagccagaacagcgacctgctggatgatgaggaggtggaggatgaggtgctgctggatgaagaagatgaagataatgacatcaccgggaagacaggcaaggagcctgtgaccagcaacctgcacgagggcaacccagaagatgattatgaggagaccagcgccctggagatgagctgcaagaccagccctgtgcgctacaaggaggaggagtacaagagcggcctgagcgccctggaccacatccgccacttcacagacagcctgaagatgaggaagatggaggacaaccagtacagcgaggccgagctgagcagcttcagcaccagccacgtgcctgaggagctgaagcagcccctgcacaggaagagcaagagccaggaggagagcaaggcctag

SEQ ID NO: 62239 - DNA, 3129 bp, Artificial Sequence
  derived and/or modified sequence
atgaagtctgaggactacccccatgagaccatggccccagacatccacgaggagcggcagtaccgctgtgaggactgtgaccagctgtttgagagcaaggccgagctggccgaccaccagaagttcccctgcagcaccccccacagcgccttctccatggtggaggaggacttccagcagaagctggagagtgaaaatgacctgcaggagatccacaccatccaggagtgcaaggaatgtgaccaggtgtttcctgacctgcagagcctggagaagcacatgctgagccacacagaggagcgggagtacaagtgtgaccagtgccccaaggccttcaactggaagagcaacctgatccgccaccagatgagccatgattctgggaagcactatgaatgtgagaactgtgccaaggtgttcacagaccccagcaacctgcagaggcacatccgcagccagcacgtgggcgcccgggcccacgcctgcccagaatgtgggaagacctttgccaccagcagcggcctgaagcagcacaagcacatccacagctctgtgaagcccttcatctgtgaggtgtgccacaagagctacacccagttcagcaacctgtgccgccacaagaggatgcatgctgactgcaggacccagatcaagtgcaaggactgtggccagatgttcagcaccaccagcagcctgaacaagcaccggcgcttctgtgagggcaagaaccactttgctgctgggggcttcttcggccagggcatcagcctgcccggcaccccagccatggacaagacctccatggtgaacatgagccacgccaaccctggcctggccgactactttggagccaacagacaccctgctggcctgaccttccccacagcccctggcttctccttctccttccctggcctcttccccagcggcctgtaccacaggcctcctctcatcccagccagcagccctgtgaagggcctgagcagcacagagcagaccaacaagagccagagccccctgatgacccacccccagatcctgcctgccacccaggacatcctgaaggccctgagcaagcaccccagcgtgggggacaacaagcctgtggagctgcagcctgagaggagcagcgaggagcggccctttgagaagatcagtgaccagagcgagagcagtgacctggatgatgtgtccaccccatctggcagtgacctggagaccaccagcggcagtgacctggagagtgacattgaaagtgacaaggagaagttcaaggaaaatggcaagatgttcaaggacaaggtgagccccctgcagaacctggccagcatcaacaacaagaaggagtacagcaaccacagcatcttcagccccagcctggaggagcagacagctgtgtctggagctgtgaatgacagcatcaaggccatcgccagcattgctgagaagtacttcggcagcacaggcctggtgggcctgcaggacaagaaggtgggcgccctgccctaccccagcatgttccccctgcccttcttccctgccttcagccagagcatgtaccccttcccagaccgggacctgcggagcctgcccctgaagatggagccccagagccctggagaggtgaagaagctgcagaagggcagcagcgagagcccctttgacctgaccaccaagaggaaggatgagaagcccctgacccctgtgcccagcaagccccctgtgaccccagccaccagccaggaccagcccctggacctgtccatgggcagccgcagccgggccagcggcaccaagctgacagagcccaggaagaaccacgtgtttggaggcaagaagggcagcaatgtggagagcaggcctgccagtgatggcagcctgcagcacgcccggcccacccccttcttcatggaccccatctacagagtggagaagaggaagctgacagaccccctggaggccctgaaggagaagtacctgcggcccagccctggcttcctgttccacccccagatgtctgccatcgagaacatggccgagaagctggagagcttcagcgccctgaagccagaggccagcgagctgctgcagagcgtgcccagcatgttcaacttccgggcccccccaaatgccctgcctgagaacctgctgaggaagggcaaggagcgctacacctgccgctactgcggcaagatcttccccaggtctgccaacctgaccaggcacctgcggacccacactggagagcagccctaccgctgcaagtactgtgacaggagcttcagcatcagcagcaacctgcagagacatgtgaggaacatccacaacaaggagaagcccttcaagtgccacctgtgtgaccgctgcttcggccagcagaccaacctggacagacacctgaagaagcatgaaaatggaaacatgtctggaacagccaccagcagcccccacagcgagctggagagcactggagccatcctggatgacaaggaggatgcctacttcacagagatccggaacttcatcggcaacagcaaccacggcagccagagccccagaaatgtggaggagaggatgaatggcagccacttcaaggatgagaaggccctggtgaccagccagaacagcgacctgctggatgatgaggaggtggaggatgaggtgctgctggatgaagaagatgaagataatgacatcaccgggaagacaggcaaggagcctgtgaccagcaacctgcacgagggcaacccagaagatgattatgaggagaccagcgccctggagatgagctgcaagaccagccctgtgcgctacaaggaggaggagtacaagagcggcctgagcgccctggaccacatccgccacttcacagacagcctgaagatgaggaagatggaggacaaccagtacagcgaggccgagctgagcagcttcagcaccagccacgtgcctgaggagctgaagcagcccctgcacaggaagagcaagagccaggcctatgccatgatgctgagcctgagtgacaaggagagcctgcacagcaccagccacagcagcagcaatgtgtggcacagcatggcccgggctgctgctgagagcagcgccatccagagcatcagccacgtgtag

SEQ ID NO: 62240 - DNA, 3012 bp, Artificial Sequence
  derived and/or modified sequence
atgaagagcgaggactacccccacgagaccatggcccccgacatccatgaagagcgccagtacaggtgtgaggactgtgatcagctcttcgaatcaaaggctgagctggcggatcaccagaaatttccttgttctaccccacacagcgcctttagcatggttgaggaggacttccaacagaagctggagagtgagaacgacctgcaggaaatccacaccattcaggaatgcaaggagtgcgatcaggtattccccgacctgcaaagcctcgagaagcatatgttgagccacacagaagagcgcgaatataagtgtgatcagtgtccgaaagcatttaattggaagagtaatctgatccgacaccaaatgtcgcatgatagcggaaagcactatgagtgtgagaattgcgctaaggttttcacagaccccagtaaccttcagagacacatccggagccagcacgtcggcgctcgcgcgcatgcatgccccgagtgcgggaagactttcgccaccagttccgggctgaagcaacacaaacacatccacagcagtgtaaaaccatttatctgtgaggtatgtcataaaagctacacccagttctctaacttgtgcagacacaagaggatgcatgctgattgccgaactcaaatcaagtgtaaagattgcggtcagatgttttcaacaaccagtagtctcaataagcatcgtaggttctgtgagggcaagaatcattttgctgctgggggtttcttcggtcaaggaatctccctacctgggactcctgccatggacaagacaagtatggtcaatatgtcccacgcgaaccccgggctagctgactatttcggcgctaataggcaccccgcaggcctgacattcccaacagcccctgggtttagttttagcttcccggggctctttccaagcgggctctaccatagacctccactgatccccgccagctccccagtcaaagggttgtcctctaccgaacagaccaacaagtcccagtctcctctaatgactcacccccagattctgcctgccacgcaggatatcctgaaggcgttatctaagcatccctcagttggggataataagccggtggaactgcaaccagagcggagctctgaggagagacccttcgagaagattagcgatcagagcgaaagcagcgatttagacgacgttagcactcccagtggctccgacctagagactaccagtggctcagatctcgagagcgacatcgagtccgataaggaaaaattcaaggagaatggcaagatgttcaaggataaggtcagcccgttgcagaacctggcttcaattaacaataaaaaggaatacagtaatcattccatcttttcaccatcactcgaggagcagaccgcggtctcaggagccgttaacgattccattaaggctattgcctcgatcgccgagaaatactttggttctacgggactagttggccttcaggataagaaagtcggagctttaccatacccatccatgttccctctgcctttctttcccgctttcagccagtcaatgtacccctttcctgacagggacttgcggagtctgcctctcaaaatggaaccgcaatcaccgggggaagtaaagaaattgcagaagggaagctccgaaagcccctttgatctgacgaccaagcgcaaagacgagaaacctcttacaccagtgccttcaaagccccctgttacaccagccacctctcaggaccagcctctggatctgtcaatggggtcaagatcgcgtgcatctggcaccaaattgaccgagcctcgcaagaatcacgtctttgggggtaaaaaagggtccaatgtggaaagtcgccctgcctccgatggctcactgcagcatgccagacccactccgttcttcatggaccctatatatagagtggagaaacgcaaactcactgaccctctggaggctctcaaggagaagtacctcagaccatcacctggctttctgtttcatcctcagatgtctgccattgaaaacatggcggagaagttggagtcattcagtgccttgaagcccgaggcctctgaactgctgcaaagtgttccatctatgttcaacttcagggcacccccaaacgcccttcctgagaacttactgcgtaagggaaaagagaggtatacatgcagatattgcgggaagatattcccgcgatccgcgaacttaacccgtcaccttaggactcacactggggagcaaccttaccgatgcaagtactgcgacaggtccttctctatcagctcaaacctccagcgacacgtacggaatattcataacaaggagaagccttttaaatgccacttgtgcgacagatgcttcgggcagcagacaaatttggatagacacctcaagaagcacgaaaacggcaacatgtcaggaacagcgacaagtagcccccattcagagctggaatctacaggcgccatcctggacgacaaagaagatgcctatttcactgagattagaaacttcatcggaaacagcaatcacggaagccagtcgcctcgaaacgtagaggagcggatgaacggctcccacttcaaggacgaaaaggctctcgttacctctcagaacagcgacctgctggatgatgaggaggttgaagacgaggtgctgctcgacgaggaagatgaggataacgacattactgggaagaccgggaaagaacccgtgacaagcaatctgcacgagggaaacccggaggacgattatgaagaaacctccgcgctggagatgagttgcaagacaagtccagtacgctacaaagaggaggaatacaagagcggactcagcgccctggaccacatcaggcacttcacagactccctgaagatgagaaaaatggaggacaatcagtacagcgaggccgagctgagttcatttagcacaagccatgtgcctgaggagctcaaacaaccattacaccgtaagtcgaaatctcaggaagaatccaaagcttag

SEQ ID NO: 62241 - DNA, 3129 bp, Artificial Sequence
  derived and/or modified sequence
atgaagagcgaggactacccccacgagaccatggcccccgacatccatgaagagcggcagtataggtgcgaggactgcgatcagctcttcgagagcaaagcagagctggcagatcaccagaaatttccgtgcagcacaccccacagcgccttttctatggttgaagaggactttcagcagaagctggagtctgagaacgatctccaggagatccatacgatccaagagtgtaaagagtgtgaccaggttttcccagatctgcaaagccttgagaagcacatgctgagtcatacggaggagagagaatacaagtgcgaccagtgccctaaggcattcaactggaaatctaatcttattcgccaccagatgtctcatgacagcggtaagcattatgagtgcgagaactgtgccaaggtatttaccgacccgtctaacttacagaggcacattagatctcagcatgtcggagcaagagcgcatgcttgccccgagtgcggtaaaaccttcgcaacgtctagcggcctcaaacagcataaacacattcatagttccgtgaagccctttatctgtgaggtctgtcataagagctatacacaattctcaaatctatgtcggcacaaaaggatgcacgccgattgtcggacccaaatcaagtgtaaagattgtggacaaatgttttccaccacctcaagtcttaataagcaccggaggttttgtgagggaaaaaaccattttgccgctggtgggttctttggacaggggatcagtctcccgggaacacctgccatggacaaaacttccatggtcaacatgtctcatgcaaatccaggcttggccgattactttggcgctaaccggcaccctgctggcttaacatttcccacggcgcctggattctcattcagttttccaggcttatttccatcgggtttgtatcaccggccacccttgatacccgcctcctcgccagttaaagggctatctagcacagaacagaccaacaaaagccaaagcccactgatgactcacccgcaaatcctcccggccacccaagacatcctgaaggcactcagcaagcaccctagcgtgggagataacaagccagttgaactccagcctgaacgaagctccgaggagcggcctttcgagaaaatctccgatcagagcgaatctagtgacctggacgatgtgagcactccatccggctccgatctggagacaacctctggtagtgacctggagtccgacatcgaatcggataaggaaaaattcaaagaaaacggcaagatgttcaaggataaggtgtcgcctttgcagaatctcgcatctatcaacaacaagaaagagtactctaaccactcaatattttctccgtctctggaggagcagacggctgtcagcggggccgtgaatgattctatcaaggctatcgcatcaattgccgaaaagtacttcggcagtactggactggtgggtctgcaagataaaaaagtaggcgcgcttccatatccttccatgttccctctgccatttttccctgccttctcccagtcaatgtacccattcccagaccgtgatctccgatctctacccttgaagatggaaccccagagccctggtgaggtgaagaagctgcagaagggatcaagtgagagcccttttgacctgaccaccaaacggaaggacgaaaagcctctgactcccgtcccttcaaaaccccctgtgaccccggctacgtcccaggatcagccactcgaccttagcatgggaagcaggtcaagagcaagtggaaccaagctgacagagcctagaaagaaccacgtgtttggcggaaagaagggaagtaacgttgagagccgccccgcatccgatggcagtctccagcacgctcgccctacaccattctttatggacccgatatacagagttgaaaaacggaaattgaccgacccgctagaagcactgaaggaaaaatacctacggccatcccccgggtttctttttcacccccagatgtctgctattgagaacatggcagaaaaactcgaatcattctcagccctcaagcccgaggcttccgaattgcttcagtcggtcccctcaatgttcaattttcgagcgccacccaacgccctgcccgagaacttgttacggaaagggaaagagcggtatacatgccgctactgtggaaagatttttccaagatctgctaatctgactagacacctgagaactcacacaggcgagcagccttatcggtgtaagtactgtgatcgcagtttttctataagttccaatttacagcgccatgtgcgcaatatacacaacaaagagaagcccttcaagtgtcacctttgtgacaggtgtttcggccaacagaccaatcttgaccgtcatctgaaaaaacacgaaaatggaaatatgtccggcacagccacctcatctcctcactccgagttagaatctaccggggcaatcctcgacgataaagaggacgcctactttaccgagattaggaacttcattggaaacagtaaccacggttcccagtccccacgcaatgtcgaggagaggatgaacggatcccatttcaaagatgagaaggccctggtaacatcccaaaatagcgatctactggatgatgaggaggttgaggacgaggtattgctggatgaggaagatgaagataatgatataaccggtaagaccggcaaagaacctgtgaccagtaacctgcatgaaggtaaccccgaagacgactacgaggagacatccgccctggagatgagctgcaaaacctccccagtacgttacaaggaagaggagtataaatcaggtcttagcgcacttgaccatatccggcatttcacagactccctaaagatgagaaagatggaggataaccagtacagcgaggcagagctctcttctttttccacttctcacgtgccagaggaactaaagcagcccctgcaccgaaaatccaagtcccaggcatatgctatgatgctcagccttagcgacaaggagagcctgcatagcacctcacacagcagctctaatgtgtggcactctatggcacgagccgccgcagagtctagcgcgatacagagcatcagccatgtgtag

SEQ ID NO: 62242 - DNA, 3012 bp, Artificial Sequence
  derived and/or modified sequence
atgaagtccgaggattatccccacgagaccatggccccagatatccatgaagagcgacaatataggtgcgaagactgcgatcagctgttcgaatctaaagccgaactcgccgatcatcaaaagtttccgtgcagcacacctcattctgctttcagcatggtggaagaggacttccaacagaaattggagtctgagaacgatctccaagagattcatactatccaggagtgcaaagagtgcgaccaggtcttccctgacttgcagtcattggaaaaacatatgttatctcatacagaggagcgggaatacaagtgcgatcaatgtcccaaagccttcaattggaaatctaacctgattcgccaccagatgagccacgacagcggcaagcactatgagtgcgagaattgtgctaaagtttttaccgacccatccaatctccagagacatatccgctctcagcacgttggggctcgggcacatgcttgtccagagtgtggcaaaacattcgccactagcagtggcctgaaacagcataagcatatacatagttctgtcaagccttttatctgcgaggtttgtcacaagagctacacgcagttttctaatctgtgcagacacaaacggatgcatgccgattgccgaacacagatcaaatgtaaggactgcggtcagatgtttagtactacatcgtctctgaacaagcataggcgtttctgtgagggaaagaaccacttcgccgctggaggcttttttggccagggcataagccttcctggtactcctgccatggacaagacatcaatggttaacatgtcccatgccaaccccggactggcggactatttcggagcgaacagacacccggctggccttaccttccccaccgctccagggttctcattttcttttccaggtctatttccctccggactgtatcaccgacctccactgataccggctagcagccctgtaaagggcctatcttccacagagcagacaaacaagtcccagagccccctgatgactcacccccagatcctcccggcaacacaagatattctgaaagccctgagcaagcatccttccgtcggcgataacaagcctgtggaacttcagccggaacgcagtagtgaagaacgcccatttgaaaagatctctgatcaatctgagagctctgatcttgacgatgtgagcacaccatccggctctgacctggaaactacgagcggcagcgacttggaatcagacattgaatccgacaaagagaagttcaaggagaacggcaaaatgttcaaagacaaggtaagccctctgcagaatctcgccagcatcaacaataagaaagaatattctaatcatagtatcttctctccctccctcgaagagcaaacagccgttagcggggcagtcaatgactctattaaggctattgcctctatcgcagagaagtattttggcagcaccggtctggtgggcctgcaggacaaaaaagtgggcgctctgccatacccctccatgttcccccttcctttcttccccgctttttcccagtcaatgtacccattccccgatagggacttgagaagcctccctctgaagatggagccacagagccccggagaagtgaagaagttgcagaaaggttcctccgaaagccctttcgatttaactaccaaacgcaaagatgagaagccccttacaccggtccccagcaagccccctgtgaccccagcaacgtcccaagatcagcccctagatctcagcatgggctcaaggtcgagggcttctgggacaaagctcacggaaccacggaagaaccacgtttttggagggaagaagggaagtaatgtggaaagcaggccggcttccgacgggtccctgcagcatgccagaccaacgccgttcttcatggacccgatttaccgcgtagaaaaacgcaagctaacggaccctcttgaagccctaaaagaaaagtacctgcgccctagccctggtttcctatttcacccccagatgtcagccattgagaacatggccgagaagttggaatcttttagtgccctgaagcctgaagcatccgagcttctccagagcgttccttccatgttcaacttcagggcgccaccaaatgcactgcctgagaatctgctgagaaagggaaaggagagatatacttgtcgatattgcggcaaaatcttccctaggtctgccaacttgacgcgccatctgcgaactcacaccggggagcaaccctatcgatgtaagtattgtgacaggagcttttctatttcgtccaatctgcagaggcatgtgcgcaacatacacaataaggaaaaacccttcaaatgtcacctttgtgatcgatgtttcggtcagcaaactaacctagacaggcatctcaagaagcacgaaaatggcaacatgagcggaacagccacttcctcacctcactccgagctcgaatcaacaggagccattttagacgataaagaggatgcatactttacagagattcggaattttataggcaatagtaatcacgggagtcagagtcccaggaatgttgaagagcgcatgaacgggtctcacttcaaggatgagaaggcactcgtgacgtctcaaaacagcgacctgctggacgatgaagaggtagaggacgaggttctattggatgaagaggatgaagataatgatatcacagggaaaaccggcaaggagcccgtcacctctaatctacatgaaggcaatccagaggatgactacgaagaaacgagcgcattggaaatgagctgcaaaactagtcccgtgcgctacaaggaggaagagtacaagtcaggcctatctgcccttgaccacataaggcatttcaccgattctttgaaaatgcgaaaaatggaagacaaccagtattctgaagcagagctttcatccttcagcaccagccacgtacccgaggaattaaagcagccattgcaccggaaaagcaaaagccaggaggagtccaaagcatag

SEQ ID NO: 62243 - DNA, 3129 bp, Artificial Sequence
  derived and/or modified sequence
atgaagtcggaggactatccccacgagaccatggctcctgatatccatgaggagaggcaatataggtgtgaagattgcgaccagttattcgagtcgaaagccgaactagccgaccatcagaaatttccctgctccactccccattctgccttttccatggtcgaagaggacttccagcagaagctggagtccgaaaatgacttgcaggagatccacaccatacaagaatgcaaggagtgcgatcaggtgtttcccgacctgcagtcactcgagaagcatatgctgtctcacactgaagagagagagtacaagtgtgatcaatgtccaaaagcctttaattggaagtccaatcttattcgccaccagatgtcacatgactccggtaaacactacgagtgtgaaaattgtgctaaggtgtttactgatccctcaaaccttcagcgccacatcagatctcaacacgtcggagccagagcgcacgcctgccccgaatgtggcaagacctttgcaacaagttccgggttgaagcagcataagcacatccattctagtgttaaaccgtttatctgcgaggtgtgccacaaatcctatacccagttctctaatttatgtaggcataagaggatgcacgcagattgccgaacccaaataaaatgcaaagattgcgggcagatgttctccaccacctcatcactgaataagcaccggaggttttgtgaaggaaaaaatcactttgcagcgggtgggttcttcggacaagggatatctttgccgggaactcccgctatggacaagacctccatggtgaatatgtcgcacgcaaacccagggttggccgactattttggggctaatcgtcacccagccggactaacgttccccaccgcccctgggttcagtttctcatttcccggtctgtttcccagcggtctttaccatagacctcccctgatccccgctagctcacccgtaaaaggcctttcctccacagagcagacaaataagtctcagagtcccctcatgactcacccgcagattctaccggcaacccaagacattctcaaagctctcagcaagcaccctagcgtgggcgataataagcctgtcgagctgcagcccgagcggtcttctgaagagcgcccattcgaaaagattagcgatcagtccgaatcttccgacttggacgatgtgagtacacctagcggctccgacctagagaccacttccggctctgatttggagtccgatatagaaagtgataaggagaaattcaaggagaatggtaaaatgtttaaggacaaggtttcaccattgcagaacttagccagtattaataacaaaaaggagtattctaaccactccattttctctccttctttagaggagcagaccgctgtctccggggcagtcaacgacagcatcaaggccatagcaagtatcgcagaaaagtattttggcagtacaggccttgtgggcctgcaggacaaaaaagttggggcactcccatacccgtccatgttccccttgccttttttccctgcattcagccagagcatgtaccccttcccggaccgtgatttacgctcgctgccactgaagatggagccgcagtcccctggggaggttaagaaactgcaaaaaggctcctcggagagccccttcgacctgacaacgaagcgcaaggacgaaaagccactcacgccagtgccgtccaaaccacctgtgactcccgctaccagtcaagaccaacctctggacctgtccatgggctccaggagcagggcctccggaaccaagttgaccgagcccaggaagaaccatgtcttcggcggtaagaagggaagcaacgtcgaatcaaggccagctagtgatggtagcttgcaacacgcaaggccaacaccattctttatggaccctatctatcgggtagagaagagaaaactcacagatccattggaagcacttaaggagaagtacctgcgcccatccccaggctttctatttcatcctcagatgtcagcgattgagaacatggcggaaaagctggagtcgttctctgcgctgaagcctgaagcttcggaactgcttcagagtgtcccatccatgttcaatttcagagctcctcccaatgctcttccagaaaatctgctgagaaagggtaaagaacggtacacatgccggtactgtggtaagattttccctcgtagtgctaacctaactagacaccttcgcacccacacaggcgagcaaccatacaggtgtaagtattgtgaccgctctttcagcatctcttcaaacctgcagagacacgtgagaaacatccacaacaaggagaaaccattcaaatgtcatctgtgtgaccgctgttttgggcaacagacaaacttagacaggcaccttaagaagcacgagaatggcaatatgtccgggaccgctacctctagtccccattccgagctcgagtcaacgggtgccatcttggacgataaagaggatgcttacttcaccgagattagaaattttataggcaactccaaccatggctcacagagcccacggaatgttgaggaaaggatgaacggaagccacttcaaggacgagaaggccctggtcacatctcagaactccgacctgctggacgacgaagaggtcgaggacgaggtcctcctggatgaggaagatgaggataacgacattacaggcaagaccggtaaagaaccagtgacaagcaacctccacgaaggtaacccagaagatgattacgaggagacatctgccctggaaatgtcctgtaaaacatcccctgtgagatataaagaagaagagtacaagagcggactctcggccctcgaccacattcgccacttcaccgactctctcaagatgagaaagatggaggacaatcagtatagtgaggccgagctctcctctttcagcacaagccatgtgcctgaggagctgaagcaacccctgcaccgtaaatcaaaaagtcaggcttacgctatgatgctaagcctgtcggacaaggaatctttgcactctactagccacagttcctctaatgtgtggcatagtatggctcgtgccgctgcggagtcttctgccattcagagtatctcacatgtgtag

SEQ ID NO: 62244 - DNA, 3012 bp, Artificial Sequence
  derived and/or modified sequence
atgaagagcgaggactacccccacgagaccatggcccccgacatccacgaggagagacagtacagatgcgaggactgcgaccagctgttcgagagcaaggccgagctggccgaccaccagaagttcccctgcagcaccccccacagcgccttcagcatggtggaggaggacttccagcagaagctggagagcgagaacgacctgcaggagatccacaccatccaggagtgcaaggagtgcgaccaggtgttccccgacctgcagagcctggagaagcacatgctgagccacaccgaggagagagagtacaagtgcgaccagtgccccaaggccttcaactggaagagcaacctgatcagacaccagatgagccacgacagcggcaagcactacgagtgcgagaactgcgccaaggtgttcaccgaccccagcaacctgcagagacacatcagaagccagcacgtgggcgccagagcccacgcctgccccgagtgcggcaagaccttcgccaccagcagcggcctgaagcagcacaagcacatccacagcagcgtgaagcccttcatctgcgaggtgtgccacaagagctacacccagttcagcaacctgtgcagacacaagagaatgcacgccgactgcagaacccagatcaagtgcaaggactgcggccagatgttcagcaccaccagcagcctgaacaagcacagaagattctgcgagggcaagaaccacttcgccgccggcggcttcttcggccagggcatcagcctgcccggcacccccgccatggacaagaccagcatggtgaacatgagccacgccaaccccggcctggccgactacttcggcgccaacagacaccccgccggcctgaccttccccaccgcccccggcttcagcttcagcttccccggcctgttccccagcggcctgtaccacagaccccccctgatccccgccagcagccccgtgaagggcctgagcagcaccgagcagaccaacaagagccagagccccctgatgacccacccccagatcctgcccgccacccaggacatcctgaaggccctgagcaagcaccccagcgtgggcgacaacaagcccgtggagctgcagcccgagagaagcagcgaggagagacccttcgagaagatcagcgaccagagcgagagcagcgacctggacgacgtgagcacccccagcggcagcgacctggagaccaccagcggcagcgacctggagagcgacatcgagagcgacaaggagaagttcaaggagaacggcaagatgttcaaggacaaggtgagccccctgcagaacctggccagcatcaacaacaagaaggagtacagcaaccacagcatcttcagccccagcctggaggagcagaccgccgtgagcggcgccgtgaacgacagcatcaaggccatcgccagcatcgccgagaagtacttcggcagcaccggcctggtgggcctgcaggacaagaaggtgggcgccctgccctaccccagcatgttccccctgcccttcttccccgccttcagccagagcatgtaccccttccccgacagagacctgagaagcctgcccctgaagatggagccccagagccccggcgaggtgaagaagctgcagaagggcagcagcgagagccccttcgacctgaccaccaagagaaaggacgagaagcccctgacccccgtgcccagcaagccccccgtgacccccgccaccagccaggaccagcccctggacctgagcatgggcagcagaagcagagccagcggcaccaagctgaccgagcccagaaagaaccacgtgttcggcggcaagaagggcagcaacgtggagagcagacccgccagcgacggcagcctgcagcacgccagacccacccccttcttcatggaccccatctacagagtggagaagagaaagctgaccgaccccctggaggccctgaaggagaagtacctgagacccagccccggcttcctgttccacccccagatgagcgccatcgagaacatggccgagaagctggagagcttcagcgccctgaagcccgaggccagcgagctgctgcagagcgtgcccagcatgttcaacttcagagccccccccaacgccctgcccgagaacctgctgagaaagggcaaggagagatacacctgcagatactgcggcaagatcttccccagaagcgccaacctgaccagacacctgagaacccacaccggcgagcagccctacagatgcaagtactgcgacagaagcttcagcatcagcagcaacctgcagagacacgtgagaaacatccacaacaaggagaagcccttcaagtgccacctgtgcgacagatgcttcggccagcagaccaacctggacagacacctgaagaagcacgagaacggcaacatgagcggcaccgccaccagcagcccccacagcgagctggagagcaccggcgccatcctggacgacaaggaggacgcctacttcaccgagatcagaaacttcatcggcaacagcaaccacggcagccagagccccagaaacgtggaggagagaatgaacggcagccacttcaaggacgagaaggccctggtgaccagccagaacagcgacctgctggacgacgaggaggtggaggacgaggtgctgctggacgaggaggacgaggacaacgacatcaccggcaagaccggcaaggagcccgtgaccagcaacctgcacgagggcaaccccgaggacgactacgaggagaccagcgccctggagatgagctgcaagaccagccccgtgagatacaaggaggaggagtacaagagcggcctgagcgccctggaccacatcagacacttcaccgacagcctgaagatgagaaagatggaggacaaccagtacagcgaggccgagctgagcagcttcagcaccagccacgtgcccgaggagctgaagcagcccctgcacagaaagagcaagagccaggaggagagcaaggcctag

SEQ ID NO: 62245 - DNA, 3129 bp, Artificial Sequence
  derived and/or modified sequence
atgaagagcgaggactacccccacgagaccatggcccccgacatccacgaggagagacagtacagatgcgaggactgcgaccagctgttcgagagcaaggccgagctggccgaccaccagaagttcccctgcagcaccccccacagcgccttcagcatggtggaggaggacttccagcagaagctggagagcgagaacgacctgcaggagatccacaccatccaggagtgcaaggagtgcgaccaggtgttccccgacctgcagagcctggagaagcacatgctgagccacaccgaggagagagagtacaagtgcgaccagtgccccaaggccttcaactggaagagcaacctgatcagacaccagatgagccacgacagcggcaagcactacgagtgcgagaactgcgccaaggtgttcaccgaccccagcaacctgcagagacacatcagaagccagcacgtgggcgccagagcccacgcctgccccgagtgcggcaagaccttcgccaccagcagcggcctgaagcagcacaagcacatccacagcagcgtgaagcccttcatctgcgaggtgtgccacaagagctacacccagttcagcaacctgtgcagacacaagagaatgcacgccgactgcagaacccagatcaagtgcaaggactgcggccagatgttcagcaccaccagcagcctgaacaagcacagaagattctgcgagggcaagaaccacttcgccgccggcggcttcttcggccagggcatcagcctgcccggcacccccgccatggacaagaccagcatggtgaacatgagccacgccaaccccggcctggccgactacttcggcgccaacagacaccccgccggcctgaccttccccaccgcccccggcttcagcttcagcttccccggcctgttccccagcggcctgtaccacagaccccccctgatccccgccagcagccccgtgaagggcctgagcagcaccgagcagaccaacaagagccagagccccctgatgacccacccccagatcctgcccgccacccaggacatcctgaaggccctgagcaagcaccccagcgtgggcgacaacaagcccgtggagctgcagcccgagagaagcagcgaggagagacccttcgagaagatcagcgaccagagcgagagcagcgacctggacgacgtgagcacccccagcggcagcgacctggagaccaccagcggcagcgacctggagagcgacatcgagagcgacaaggagaagttcaaggagaacggcaagatgttcaaggacaaggtgagccccctgcagaacctggccagcatcaacaacaagaaggagtacagcaaccacagcatcttcagccccagcctggaggagcagaccgccgtgagcggcgccgtgaacgacagcatcaaggccatcgccagcatcgccgagaagtacttcggcagcaccggcctggtgggcctgcaggacaagaaggtgggcgccctgccctaccccagcatgttccccctgcccttcttccccgccttcagccagagcatgtaccccttccccgacagagacctgagaagcctgcccctgaagatggagccccagagccccggcgaggtgaagaagctgcagaagggcagcagcgagagccccttcgacctgaccaccaagagaaaggacgagaagcccctgacccccgtgcccagcaagccccccgtgacccccgccaccagccaggaccagcccctggacctgagcatgggcagcagaagcagagccagcggcaccaagctgaccgagcccagaaagaaccacgtgttcggcggcaagaagggcagcaacgtggagagcagacccgccagcgacggcagcctgcagcacgccagacccacccccttcttcatggaccccatctacagagtggagaagagaaagctgaccgaccccctggaggccctgaaggagaagtacctgagacccagccccggcttcctgttccacccccagatgagcgccatcgagaacatggccgagaagctggagagcttcagcgccctgaagcccgaggccagcgagctgctgcagagcgtgcccagcatgttcaacttcagagccccccccaacgccctgcccgagaacctgctgagaaagggcaaggagagatacacctgcagatactgcggcaagatcttccccagaagcgccaacctgaccagacacctgagaacccacaccggcgagcagccctacagatgcaagtactgcgacagaagcttcagcatcagcagcaacctgcagagacacgtgagaaacatccacaacaaggagaagcccttcaagtgccacctgtgcgacagatgcttcggccagcagaccaacctggacagacacctgaagaagcacgagaacggcaacatgagcggcaccgccaccagcagcccccacagcgagctggagagcaccggcgccatcctggacgacaaggaggacgcctacttcaccgagatcagaaacttcatcggcaacagcaaccacggcagccagagccccagaaacgtggaggagagaatgaacggcagccacttcaaggacgagaaggccctggtgaccagccagaacagcgacctgctggacgacgaggaggtggaggacgaggtgctgctggacgaggaggacgaggacaacgacatcaccggcaagaccggcaaggagcccgtgaccagcaacctgcacgagggcaaccccgaggacgactacgaggagaccagcgccctggagatgagctgcaagaccagccccgtgagatacaaggaggaggagtacaagagcggcctgagcgccctggaccacatcagacacttcaccgacagcctgaagatgagaaagatggaggacaaccagtacagcgaggccgagctgagcagcttcagcaccagccacgtgcccgaggagctgaagcagcccctgcacagaaagagcaagagccaggcctacgccatgatgctgagcctgagcgacaaggagagcctgcacagcaccagccacagcagcagcaacgtgtggcacagcatggccagagccgccgccgagagcagcgccatccagagcatcagccacgtgtag

SEQ ID NO: 62246 - protein, 2409 aa, Artificial Sequence
  derived and/or modified sequence
MFINIKSILWMCSTLIVTHALHKVKVGKSPPVRGSLSGKVSLPCHFSTMPTLPPSYNTSEFLRIKWSKIEVDKNGKDLKETTVLVAQNGNIKIGQDYKGRVSVPTHPEAVGDASLTVVKLLASDAGLYRCDVMYGIEDTQDTVSLTVDGVVFHYRAATSRYTLNFEAAQKACLDVGAVIATPEQLFAAYEDGFEQCDAGWLADQTVRYPIRAPRVGCYGDKMGKAGVRTYGFRSPQETYDVYCYVDHLDGDVFHLTVPSKFTFEEAAKECENQDARLATVGELQAAWRNGFDQCDYGWLSDASVRHPVTVARAQCGGGLLGVRTLYRFENQTGFPPPDSRFDAYCFKRRMSDLSVIGHPIDSESKEDEPCSEETDPVHDLMAEILPEFPDIIEIDLYHSEENEEEEEECANATDVTTTPSVQYINGKHLVTTVPKDPEAAEARRGQFESVAPSQNFSDSSESDTHPFVIAKTELSTAVQPNESTETTESLEVTWKPETYPETSEHFSGGEPDVFPTVPFHEEFESGTAKKGAESVTERDTEVGHQAHEHTEPVSLFPEESSGEIAIDQESQKIAFARATEVTFGEEVEKSTSVTYTPTIVPSSASAYVSEEEAVTLIGNPWPDDLLSTKESWVEATPRQVVELSGSSSIPITEGSGEAEEDEDTMFTMVTDLSQRNTTDTLITLDTSRIITESFFEVPATTIYPVSEQPSAKVVPTKFVSETDTSEWISSTTVEEKKRKEEEGTTGTASTFEVYSSTQRSDQLILPFELESPNVATSSDSGTRKSFMSLTTPTQSEREMTDSTPVFTETNTLENLGAQTTEHSSIHQPGVQEGLTTLPRSPASVFMEQGSGEAAADPETTTVSSFSLNVEYAIQAEKEVAGTLSPHVETTFSTEPTGLVLSTVMDRVVAENITQTSREIVISERLGEPNYGAEIRGFSTGFPLEEDFSGDFREYSTVSHPIAKEETVMMEGSGDAAFRDTQTSPSTVPTSVHISHISDSEGPSSTMVSTSAFPWEEFTSSAEGSGEQLVTVSSSVVPVLPSAVQKFSGTASSIIDEGLGEVGTVNEIDRRSTILPTAEVEGTKAPVEKEEVKVSGTVSTNFPQTIEPAKLWSRQEVNPVRQEIESETTSEEQIQEEKSFESPQNSPATEQTIFDSQTFTETELKTTDYSVLTTKKTYSDDKEMKEEDTSLVNMSTPDPDANGLESYTTLPEATEKSHFFLATALVTESIPAEHVVTDSPIKKEESTKHFPKGMRPTIQESDTELLFSGLGSGEEVLPTLPTESVNFTEVEQINNTLYPHTSQVESTSSDKIEDFNRMENVAKEVGPLVSQTDIFEGSGSVTSTTLIEILSDTGAEGPTVAPLPFSTDIGHPQNQTVRWAEEIQTSRPQTITEQDSNKNSSTAEINETTTSSTDFLARAYGFEMAKEFVTSAPKPSDLYYEPSGEGSGEVDIVDSFHTSATTQATRQESSTTFVSDGSLEKHPEVPSAKAVTADGFPTVSVMLPLHSEQNKSSPDPTSTLSNTVSYERSTDGSFQDRFREFEDSTLKPNRKKPTENIIIDLDKEDKDLILTITESTILEILPELTSDKNTIIDIDHTKPVYEDILGMQTDIDTEVPSEPHDSNDESNDDSTQVQEIYEAAVNLSLTEETFEGSADVLASYTQATHDESMTYEDRSQLDHMGFHFTTGIPAPSTETELDVLLPTATSLPIPRKSATVIPEIEGIKAEAKALDDMFESSTLSDGQAIADQSEIIPTLGQFERTQEEYEDKKHAGPSFQPEFSSGAEEALVDHTPYLSIATTHLMDQSVTEVPDVMEGSNPPYYTDTTLAVSTFAKLSSQTPSSPLTIYSGSEASGHTEIPQPSALPGIDVGSSVMSPQDSFKEIHVNIEATFKPSSEEYLHITEPPSLSPDTKLEPSEDDGKPELLEEMEASPTELIAVEGTEILQDFQNKTDGQVSGEAIKMFPTIKTPEAGTVITTADEIELEGATQWPHSTSASATYGVEAGVVPWLSPQTSERPTLSSSPEINPETQAALIRGQDSTIAASEQQVAARILDSNDQATVNPVEFNTEVATPPFSLLETSNETDFLIGINEESVEGTAIYLPGPDRCKMNPCLNGGTCYPTETSYVCTCVPGYSGDQCELDFDECHSNPCRNGATCVDGFNTFRCLCLPSYVGALCEQDTETCDYGWHKFQGQCYKYFAHRRTWDAAERECRLQGAHLTSILSHEEQMFVNRVGHDYQWIGLNDKMFEHDFRWTDGSTLQYENWRPNQPDSFFSAGEDCVVIIWHENGQWNDVPCNYHLTYTCKKGTVACGQPPVVENAKTFGKMKPRYEINSLIRYHCKDGFIQRHLPTIRCLGNGRWAIPKITCMNPSAYQRTYSMKYFKNSSSAKDNSINTSKHDHRWSRRWQESRR

SEQ ID NO: 62247 - DNA, 7230 bp, Artificial Sequence
  derived and/or modified sequence
atgttcatcaacatcaagagcatcctgtggatgtgcagcaccctgatcgtgacccacgccctgcacaaggtgaaggtgggcaagagcccccccgtgagaggcagcctgagcggcaaggtgagcctgccctgccacttcagcaccatgcccaccctgccccccagctacaacaccagcgagttcctgagaatcaagtggagcaagatcgaggtggacaagaacggcaaggacctgaaggagaccaccgtgctggtggcccagaacggcaacatcaagatcggccaggactacaagggcagagtgagcgtgcccacccaccccgaggccgtgggcgacgccagcctgaccgtggtgaagctgctggccagcgacgccggcctgtacagatgcgacgtgatgtacggcatcgaggacacccaggacaccgtgagcctgaccgtggacggcgtggtgttccactacagagccgccaccagcagatacaccctgaacttcgaggccgcccagaaggcctgcctggacgtgggcgccgtgatcgccacccccgagcagctgttcgccgcctacgaggacggcttcgagcagtgcgacgccggctggctggccgaccagaccgtgagataccccatcagagcccccagagtgggctgctacggcgacaagatgggcaaggccggcgtgagaacctacggcttcagaagcccccaggagacctacgacgtgtactgctacgtggaccacctggacggcgacgtgttccacctgaccgtgcccagcaagttcaccttcgaggaggccgccaaggagtgcgagaaccaggacgccagactggccaccgtgggcgagctgcaggccgcctggagaaacggcttcgaccagtgcgactacggctggctgagcgacgccagcgtgagacaccccgtgaccgtggccagagcccagtgcggcggcggcctgctgggcgtgagaaccctgtacagattcgagaaccagaccggcttccccccccccgacagcagattcgacgcctactgcttcaagagaagaatgagcgacctgagcgtgatcggccaccccatcgacagcgagagcaaggaggacgagccctgcagcgaggagaccgaccccgtgcacgacctgatggccgagatcctgcccgagttccccgacatcatcgagatcgacctgtaccacagcgaggagaacgaggaggaggaggaggagtgcgccaacgccaccgacgtgaccaccacccccagcgtgcagtacatcaacggcaagcacctggtgaccaccgtgcccaaggaccccgaggccgccgaggccagaagaggccagttcgagagcgtggcccccagccagaacttcagcgacagcagcgagagcgacacccaccccttcgtgatcgccaagaccgagctgagcaccgccgtgcagcccaacgagagcaccgagaccaccgagagcctggaggtgacctggaagcccgagacctaccccgagaccagcgagcacttcagcggcggcgagcccgacgtgttccccaccgtgcccttccacgaggagttcgagagcggcaccgccaagaagggcgccgagagcgtgaccgagagagacaccgaggtgggccaccaggcccacgagcacaccgagcccgtgagcctgttccccgaggagagcagcggcgagatcgccatcgaccaggagagccagaagatcgccttcgccagagccaccgaggtgaccttcggcgaggaggtggagaagagcaccagcgtgacctacacccccaccatcgtgcccagcagcgccagcgcctacgtgagcgaggaggaggccgtgaccctgatcggcaacccctggcccgacgacctgctgagcaccaaggagagctgggtggaggccacccccagacaggtggtggagctgagcggcagcagcagcatccccatcaccgagggcagcggcgaggccgaggaggacgaggacaccatgttcaccatggtgaccgacctgagccagagaaacaccaccgacaccctgatcaccctggacaccagcagaatcatcaccgagagcttcttcgaggtgcccgccaccaccatctaccccgtgagcgagcagcccagcgccaaggtggtgcccaccaagttcgtgagcgagaccgacaccagcgagtggatcagcagcaccaccgtggaggagaagaagagaaaggaggaggagggcaccaccggcaccgccagcaccttcgaggtgtacagcagcacccagagaagcgaccagctgatcctgcccttcgagctggagagccccaacgtggccaccagcagcgacagcggcaccagaaagagcttcatgagcctgaccacccccacccagagcgagagagagatgaccgacagcacccccgtgttcaccgagaccaacaccctggagaacctgggcgcccagaccaccgagcacagcagcatccaccagcccggcgtgcaggagggcctgaccaccctgcccagaagccccgccagcgtgttcatggagcagggcagcggcgaggccgccgccgaccccgagaccaccaccgtgagcagcttcagcctgaacgtggagtacgccatccaggccgagaaggaggtggccggcaccctgagcccccacgtggagaccaccttcagcaccgagcccaccggcctggtgctgagcaccgtgatggacagagtggtggccgagaacatcacccagaccagcagagagatcgtgatcagcgagagactgggcgagcccaactacggcgccgagatcagaggcttcagcaccggcttccccctggaggaggacttcagcggcgacttcagagagtacagcaccgtgagccaccccatcgccaaggaggagaccgtgatgatggagggcagcggcgacgccgccttcagagacacccagaccagccccagcaccgtgcccaccagcgtgcacatcagccacatcagcgacagcgagggccccagcagcaccatggtgagcaccagcgccttcccctgggaggagttcaccagcagcgccgagggcagcggcgagcagctggtgaccgtgagcagcagcgtggtgcccgtgctgcccagcgccgtgcagaagttcagcggcaccgccagcagcatcatcgacgagggcctgggcgaggtgggcaccgtgaacgagatcgacagaagaagcaccatcctgcccaccgccgaggtggagggcaccaaggcccccgtggagaaggaggaggtgaaggtgagcggcaccgtgagcaccaacttcccccagaccatcgagcccgccaagctgtggagcagacaggaggtgaaccccgtgagacaggagatcgagagcgagaccaccagcgaggagcagatccaggaggagaagagcttcgagagcccccagaacagccccgccaccgagcagaccatcttcgacagccagaccttcaccgagaccgagctgaagaccaccgactacagcgtgctgaccaccaagaagacctacagcgacgacaaggagatgaaggaggaggacaccagcctggtgaacatgagcacccccgaccccgacgccaacggcctggagagctacaccaccctgcccgaggccaccgagaagagccacttcttcctggccaccgccctggtgaccgagagcatccccgccgagcacgtggtgaccgacagccccatcaagaaggaggagagcaccaagcacttccccaagggcatgagacccaccatccaggagagcgacaccgagctgctgttcagcggcctgggcagcggcgaggaggtgctgcccaccctgcccaccgagagcgtgaacttcaccgaggtggagcagatcaacaacaccctgtacccccacaccagccaggtggagagcaccagcagcgacaagatcgaggacttcaacagaatggagaacgtggccaaggaggtgggccccctggtgagccagaccgacatcttcgagggcagcggcagcgtgaccagcaccaccctgatcgagatcctgagcgacaccggcgccgagggccccaccgtggcccccctgcccttcagcaccgacatcggccacccccagaaccagaccgtgagatgggccgaggagatccagaccagcagaccccagaccatcaccgagcaggacagcaacaagaacagcagcaccgccgagatcaacgagaccaccaccagcagcaccgacttcctggccagagcctacggcttcgagatggccaaggagttcgtgaccagcgcccccaagcccagcgacctgtactacgagcccagcggcgagggcagcggcgaggtggacatcgtggacagcttccacaccagcgccaccacccaggccaccagacaggagagcagcaccaccttcgtgagcgacggcagcctggagaagcaccccgaggtgcccagcgccaaggccgtgaccgccgacggcttccccaccgtgagcgtgatgctgcccctgcacagcgagcagaacaagagcagccccgaccccaccagcaccctgagcaacaccgtgagctacgagagaagcaccgacggcagcttccaggacagattcagagagttcgaggacagcaccctgaagcccaacagaaagaagcccaccgagaacatcatcatcgacctggacaaggaggacaaggacctgatcctgaccatcaccgagagcaccatcctggagatcctgcccgagctgaccagcgacaagaacaccatcatcgacatcgaccacaccaagcccgtgtacgaggacatcctgggcatgcagaccgacatcgacaccgaggtgcccagcgagccccacgacagcaacgacgagagcaacgacgacagcacccaggtgcaggagatctacgaggccgccgtgaacctgagcctgaccgaggagaccttcgagggcagcgccgacgtgctggccagctacacccaggccacccacgacgagagcatgacctacgaggacagaagccagctggaccacatgggcttccacttcaccaccggcatccccgcccccagcaccgagaccgagctggacgtgctgctgcccaccgccaccagcctgcccatccccagaaagagcgccaccgtgatccccgagatcgagggcatcaaggccgaggccaaggccctggacgacatgttcgagagcagcaccctgagcgacggccaggccatcgccgaccagagcgagatcatccccaccctgggccagttcgagagaacccaggaggagtacgaggacaagaagcacgccggccccagcttccagcccgagttcagcagcggcgccgaggaggccctggtggaccacaccccctacctgagcatcgccaccacccacctgatggaccagagcgtgaccgaggtgcccgacgtgatggagggcagcaaccccccctactacaccgacaccaccctggccgtgagcaccttcgccaagctgagcagccagacccccagcagccccctgaccatctacagcggcagcgaggccagcggccacaccgagatcccccagcccagcgccctgcccggcatcgacgtgggcagcagcgtgatgagcccccaggacagcttcaaggagatccacgtgaacatcgaggccaccttcaagcccagcagcgaggagtacctgcacatcaccgagccccccagcctgagccccgacaccaagctggagcccagcgaggacgacggcaagcccgagctgctggaggagatggaggccagccccaccgagctgatcgccgtggagggcaccgagatcctgcaggacttccagaacaagaccgacggccaggtgagcggcgaggccatcaagatgttccccaccatcaagacccccgaggccggcaccgtgatcaccaccgccgacgagatcgagctggagggcgccacccagtggccccacagcaccagcgccagcgccacctacggcgtggaggccggcgtggtgccctggctgagcccccagaccagcgagagacccaccctgagcagcagccccgagatcaaccccgagacccaggccgccctgatcagaggccaggacagcaccatcgccgccagcgagcagcaggtggccgccagaatcctggacagcaacgaccaggccaccgtgaaccccgtggagttcaacaccgaggtggccaccccccccttcagcctgctggagaccagcaacgagaccgacttcctgatcggcatcaacgaggagagcgtggagggcaccgccatctacctgcccggccccgacagatgcaagatgaacccctgcctgaacggcggcacctgctaccccaccgagaccagctacgtgtgcacctgcgtgcccggctacagcggcgaccagtgcgagctggacttcgacgagtgccacagcaacccctgcagaaacggcgccacctgcgtggacggcttcaacaccttcagatgcctgtgcctgcccagctacgtgggcgccctgtgcgagcaggacaccgagacctgcgactacggctggcacaagttccagggccagtgctacaagtacttcgcccacagaagaacctgggacgccgccgagagagagtgcagactgcagggcgcccacctgaccagcatcctgagccacgaggagcagatgttcgtgaacagagtgggccacgactaccagtggatcggcctgaacgacaagatgttcgagcacgacttcagatggaccgacggcagcaccctgcagtacgagaactggagacccaaccagcccgacagcttcttcagcgccggcgaggactgcgtggtgatcatctggcacgagaacggccagtggaacgacgtgccctgcaactaccacctgacctacacctgcaagaagggcaccgtggcctgcggccagccccccgtggtggagaacgccaagaccttcggcaagatgaagcccagatacgagatcaacagcctgatcagataccactgcaaggacggcttcatccagagacacctgcccaccatcagatgcctgggcaacggcagatgggccatccccaagatcacctgcatgaaccccagcgcctaccagagaacctacagcatgaagtacttcaagaacagcagcagcgccaaggacaacagcatcaacaccagcaagcacgaccacagatggagcagaagatggcaggagagcagaagatag

SEQ ID NO: 62248 - DNA, 7230 bp, Artificial Sequence
  derived and/or modified sequence
atgttcatcaacatcaaatctattctttggatgtgtagcaccctgatcgtgacccatgccctgcataaagtgaaggtgggaaagtccccacccgtccgtgggtctctcagcggaaaggtgtccctaccttgtcacttttctacaatgcccacactgccaccatcatataatacttcggagtttctgcggatcaaatggagcaagatcgaggtggacaagaatgggaaagacttgaaagaaactacggtgctcgttgcccagaatggcaacatcaaaatcggacaagattacaaggggcgcgtctcggtgcccactcaccctgaggccgtgggcgacgccagtttaaccgtggtcaaattgctggccagcgatgcgggcctgtacagatgtgatgtcatgtacggtatcgaggatacccaggacaccgtgagcttgaccgtcgacggggtagtgttccactatagggctgctacatccagatacaccctgaacttcgaagccgcacagaaagcctgtttagacgtgggggctgtgattgctacacctgagcagctctttgcagcgtacgaggacggttttgagcagtgtgatgctggctggctggctgatcagacggtacgataccccatcagagctcccagggtcggctgttatggcgacaagatgggtaaagccggtgtccgaacttatggattccgctccccccaagaaacatacgatgtttactgctatgtggatcacctggatggggatgttttccacctgacggttccgagtaagtttacctttgaggaagccgccaaggaatgcgaaaaccaagatgccaggctggccacagtcggcgaactccaggccgcctggaggaacggcttcgatcagtgtgactatggatggctgagcgatgcctctgtgcgccatcctgtcacagtggcccgcgctcaatgtgggggcgggctgctgggagtgcgtactctctaccggttcgagaatcagacaggctttcctccacccgatagtaggttcgatgcctattgtttcaaacgccgcatgagcgacctttccgtcatcgggcacccgattgattcagagagtaaagaggacgaaccatgctctgaggagaccgacccggttcacgacctcatggccgaaattttgcctgagtttccggatatcattgagatcgatctgtatcacagcgaagaaaacgaggaggaggaagaggaatgcgccaacgcaaccgacgtgaccactactccatccgtgcagtacattaacggtaagcacctggtgacaacagttccgaaagatccggaggccgcagaggcccgcaggggacagtttgagagtgtggcccctagccagaacttttctgattccagtgaatctgacactcacccattcgtaatcgccaaaacagaactgtcgactgcagtgcagcctaacgagtcgactgagaccacagaatcattggaggtgacctggaaaccagagacttaccctgaaacttctgagcacttctcagggggcgagcccgacgtgttcccaactgtcccattccacgaagaatttgaatcggggacagctaagaaaggtgcagaatcggtgaccgaaagggacactgaggtgggacaccaggcccacgaacacactgaaccggtttccctgttccctgaagagagttcaggcgagatagctatagatcaggaaagtcagaagatcgccttcgcccgagccactgaggttacttttggcgaagaagtggaaaagtcaacctccgtcacctatacacccactattgtccctagtagcgcaagtgcatacgtaagcgaggaggaggcagtaacactgattggaaatccatggccagacgacctcctgtccaccaaagaatcttgggtggaggccacaccccggcaggtggtggagctgtcaggcagttccagtattccgatcacagaaggctccggagaagccgaggaggacgaggatacaatgttcacaatggtgacggacctgtctcagcgcaatactacagatacccttatcaccctggacacctcccgcatcattaccgagagcttcttcgaagtgcccgctactaccatatatccagtgtctgaacagcctagcgctaaggtggtccctaccaagtttgtgtccgagaccgataccagcgaatggataagcagcaccactgttgaggagaaaaagcgtaaggaggaagagggaactaccggaacagcatctactttcgaagtttactcttctacgcagcgttcggatcagctgattctccccttcgagttggaatcgccaaatgtagcaactagttccgactccgggactcgcaagtctttcatgagtctgacgacccctactcagagtgaacgcgaaatgacagattccaccccggtgttcacggagaccaatacactggagaaccttggagcacagacaacggaacacagttcaatccaccagccaggcgtccaggaggggctaactaccttgcccaggtctccagcatcagtgttcatggaacaggggtccggtgaagcggcagccgatccagaaaccactactgtgagcagtttcagcctgaacgttgagtacgctatccaggcagagaaagaggttgcaggcactctgtcaccccacgtagagacaactttttccaccgagccaaccggactcgtgctgtccaccgtcatggacagggtcgttgcagaaaatatcacacagactagcagagaaatagtaatcagtgagagactgggtgagcccaactacggagctgagatccgcggattttccacgggctttcccttggaagaagacttctctggcgacttcagagagtactcaactgtttcacacccaattgcaaaagaagagaccgtgatgatggagggctcaggcgatgcggcattccgggacacacagaccagtccaagcactgtccctaccagcgtgcatattagccacattagcgactctgagggccctagcagtaccatggtatccaccagtgcctttccatgggaagaatttacatccagcgcagagggatctggagagcagctggtgacagtatccagtagcgtagtgcccgtgctgccatccgccgttcagaagtttagtggcacagcctcttctatcatcgacgagggattaggcgaagtggggactgtgaatgagatcgatcgtcgtagtacaatcctgcccacagcagaggttgagggcacaaaagcccccgtggagaaggaggaagtgaaagtgagcgggaccgttagcactaactttcctcagacgatcgaacccgctaagctgtggtcgcggcaggaggtgaaccctgtgcggcaggagattgaatctgagaccacttcggaggaacagatccaggaggaaaagagttttgaatcaccgcagaactcgcccgcaacggagcagacaatctttgacagccagacctttactgaaaccgagctgaaaaccactgattatagcgtccttactacaaaaaaaacatactccgatgacaaggagatgaaggaggaggatacatctctcgttaatatgtcaactcctgatccagatgccaatggactcgagtcatacactactctaccagaggctaccgagaagagccacttctttctcgcaactgctctggtgaccgagagtattccagcagagcacgtcgtcaccgattcaccgattaagaaagaggagtcgaccaaacatttccctaaggggatgcgccccacaattcaagaatcagacaccgaactgcttttcagtggtctgggctcaggagaagaggttctacccaccctcccaacagagtcagtgaatttcacagaagtggagcagatcaacaacactctctacccacacacaagccaggtggaatccacctcctctgacaagatcgaggattttaatcgcatggagaatgttgccaaggaagtgggaccgctagtctcacaaaccgatatatttgaagggtccggcagcgtaacctctacgacgcttatagagatcctgtctgacaccggcgcagagggacctacggtagcccctttgcctttctccaccgatataggccatccccaaaaccagacagtgcggtgggctgaagagatccaaacatcccgaccccagaccatcaccgagcaagactcaaataagaattcgtcaacagcagaaattaacgagactacaacgagttcaaccgatttcctagcaagagcatacggcttcgaaatggccaaggagttcgtgactagtgccccaaagccatcagatctgtattatgagcccagcggtgaagggagcggagaggtggacatcgtggattcatttcatacaagtgctaccactcaggcaacgagacaggagagttcaactacatttgtgtccgatggtagcttagagaaacaccccgaggtgcctagcgctaaggccgtgactgccgacggatttcccacagtgtcagtaatgttgcccttacacagtgaacagaataagtcctcgccagatcctacatcaaccctctctaataccgtgtcctacgaaaggagcactgacggtagctttcaggataggtttcgtgagtttgaagacagtaccttgaagcccaaccgaaaaaagccgacagagaatatcatcatcgacctggataaggaggataaagatctgattctgactatcactgaatcgactattctggagatcctaccagagctgacatccgacaaaaacactatcatcgacattgaccacaccaagccagtttatgaggatatccttggaatgcaaactgacatcgacacagaagtccctagtgagccccatgattctaatgatgaatccaacgacgactcaacccaagtgcaggagatctatgaggctgctgtgaatctgtcccttaccgaagagaccttcgagggctccgcagatgtgctggcatcatatacccaggccacccacgacgagagtatgacctatgaggacaggtcgcaactcgaccacatgggttttcattttaccaccggtatacccgctccttctacagagactgagctagacgttcttctaccaacggccacatcattaccaatacctcgcaagagcgccacagtgatccctgagattgagggtatcaaggctgaggcgaaggcccttgacgacatgttcgagtcctctaccctgagtgacggccaagccattgccgaccagagcgaaatcatccccacgctcggccaattcgagagaacccaggaggaatatgaggacaaaaaacacgccggtccatcattccagcctgaattttccagcggcgcagaggaggcactggttgatcataccccatacctgtcaatagccacaacacacctaatggatcagagtgttaccgaagtgcccgatgttatggagggatcaaatccaccttactacacagataccaccctagcagtttccactttcgctaagcttagttcacagacaccctcaagtcctctcacgatttatagtggaagcgaagcttcaggccacactgagatccctcagccctccgcactgccagggatagacgtgggaagttctgtgatgagccctcaggattcttttaaggagattcatgtaaacatcgaggcgacatttaagcccagctctgaagaatatcttcacataaccgagcctcccagcctatctcctgacactaaactcgagccctccgaagacgacgggaaacctgaactgctcgaagagatggaggcttcccctacggagctcatagccgtggagggaactgagatcctccaggactttcagaataaaacggatggccaagtgtccggcgaagcaatcaaaatgtttcctaccatcaaaactccagaggctggcacagtgatcacaactgccgacgagattgagctggagggcgctacccaatggccccactccaccagtgccagcgcaacttatggagtcgaggcgggggtggttccttggttaagccctcaaacctccgaaagacccacactgtcttcttcacccgagattaatccggagacccaggccgccttgattagagggcaggattccacaatagctgccagcgagcaacaggtcgctgcacgcatactggatagtaacgatcaggccacggttaaccccgtcgaattcaataccgaagttgctacaccccccttctctctattagaaacgtcaaacgaaacagacttcctgataggaatcaacgaagagagtgtggaagggaccgcaatatatttgcctggccccgacaggtgtaagatgaacccctgcctaaatgggggaacatgctaccctacagaaacatcatacgtgtgcacttgcgttcctggatatagcggggaccagtgtgagctcgatttcgatgaatgtcattctaatccatgtagaaatggggcgacctgtgtcgatgggttcaatacgttcagatgtctgtgcctgccgtcatacgtgggcgccctttgcgaacaggacacggaaacatgcgattacggttggcataaatttcaagggcagtgctacaaatattttgcccaccgccgaacttgggacgctgccgagcgagaatgccgacttcaaggggcacacctcacctcaatcctgtctcacgaggaacagatgtttgttaaccgggtggggcatgactatcagtggattggactgaatgataaaatgttcgagcacgatttccgttggaccgatggctcaacactccagtacgagaattggcgccccaaccagccagattcttttttctctgcgggcgaagattgtgtggtgatcatttggcacgagaatggacaatggaatgacgtgccctgcaattatcacctcacctatacttgcaagaagggaaccgtggcatgcggacagccacccgttgtggagaacgcaaagacgtttggcaagatgaagccgcgatacgagatcaactccctgatacggtatcactgcaaagatggcttcatccaaaggcatctgcccaccattagatgtctgggcaacgggcgttgggctattccaaagatcacctgcatgaacccctctgcttatcagcgaacttactccatgaaatacttcaagaattcaagcagtgccaaggacaattccataaatacctctaaacacgatcacaggtggtctcggaggtggcaggagagtagaagatag

SEQ ID NO: 62249 - DNA, 7230 bp, Artificial Sequence
  derived and/or modified sequence
atgttcatcaacatcaagagcatcctgtggatgtgcagcaccctcatcgtgacccacgccctgcacaaggtgaaggtgggcaagagcccccctgtgcggggcagcctgagcggcaaggtgtccctgccctgccacttcagcaccatgcccaccctgcccccatcctacaacaccagcgagttcctgcgcatcaagtggagcaagattgaggtggacaagaatggcaaggacctgaaggagaccaccgtgctggtggcccagaatggaaacatcaagattggccaggactacaagggccgggtgtctgtgcccacccaccctgaggccgtgggagatgccagcctgactgtggtgaagctgctggccagtgatgctggcctgtaccgctgtgatgtgatgtatggaattgaggacacccaggacacagtgtccctgactgtggatggagtggtgttccactaccgggccgccaccagccgctacaccctgaactttgaagctgcccagaaggcctgcctggatgtgggcgctgtgattgccaccccagagcagctgtttgctgcctatgaagatggctttgagcagtgtgatgctggctggctggccgaccagacagtgcgctaccccatccgggccccccgggtgggctgctacggggacaagatgggcaaggccggcgtgaggacctacggcttccgcagcccccaggagacctatgatgtgtactgctacgtggaccacctggatggagatgtgttccacctgactgtgcccagcaagttcacctttgaggaggccgccaaggaatgtgagaaccaggatgcccggctggccaccgtgggggagctgcaggccgcctggagaaatggatttgaccagtgtgactatggctggctgagtgatgcctctgtgcgccaccctgtgacagtggcccgggcccagtgtggcggcggcctgctgggcgtgaggaccctgtacagatttgagaaccagacaggcttccccccaccagacagcagatttgatgcctactgcttcaagaggaggatgtctgacctgagcgtcatcggccaccccatcgacagcgagagcaaggaggatgagccctgcagcgaggagacagatcctgtgcatgacctgatggccgagatcctgcctgagttcccagacatcatcgagattgacctgtaccacagtgaagaaaatgaggaggaggaggaggagtgtgccaatgccacagatgtgaccaccacccccagcgtgcagtacatcaatggcaagcacctggtgaccaccgtgcccaaggaccctgaggccgctgaggcccggcggggccagtttgaatctgtggcccccagccagaacttcagtgacagcagcgagagtgacacccacccctttgtgattgccaagacagagctgagcacagctgtgcagcccaatgaaagcacagagaccacagagagcctggaggtgacctggaagccagagacctacccagagaccagcgagcacttctctggaggagagccagatgtgttccccaccgtgcccttccacgaggagtttgaaagtggcacagccaagaagggagctgagagcgtgacagagcgggacacagaggtgggccaccaggcccacgagcacacagagcctgtgtccctcttccctgaggagagcagtggagagatcgccatcgaccaggagagccagaagatcgcctttgcccgggccacagaggtgacctttggagaggaggtggagaagagcacctctgtgacctacacccccaccatcgtgcccagcagcgccagcgcctacgtgtctgaggaggaggccgtgaccctgattggcaacccctggccagatgacctgctgagcaccaaggagagctgggtggaggccaccccccggcaggtggtggagctgagcggcagcagcagcatccccatcacagagggcagcggggaggccgaggaggatgaggacaccatgttcaccatggtgacagacctgagccagaggaacaccacagacaccctcatcaccctggacaccagccgcatcatcacagagagcttctttgaggtgcctgccaccaccatctaccctgtgtctgagcagcccagcgccaaggtggtgcccaccaagtttgtgtctgaaacagacaccagcgagtggatcagcagcaccaccgtggaggagaagaagaggaaggaggaggagggcaccactggaacagccagcacctttgaggtgtacagcagcacccagaggagtgaccagctgatcctgccctttgagctggagagccccaacgtggccaccagcagtgacagcggcaccaggaagagcttcatgagcctgaccacccccacccagagcgagcgggagatgacagacagcacccctgtgttcacagagaccaacaccctggagaacctgggcgcccagaccacagagcacagcagcatccaccagcccggggtgcaggagggcctgaccaccctgcccaggagccctgcctctgtgttcatggagcagggcagcggggaggccgctgctgaccctgagaccaccaccgtgagcagcttcagcctgaatgtggagtatgccatccaggccgagaaggaggtggccggcaccctgagcccccacgtggagaccaccttcagcacagagcccaccggcctggtgctgagcacagtgatggacagagtggtggccgagaacatcacccagaccagccgggagatcgtcatcagcgagcggctgggggagcccaactacggggctgagatccggggcttcagcacaggcttccccctggaggaggacttcagcggggacttccgggagtacagcacagtgagccaccccatcgccaaggaggagaccgtgatgatggagggcagcggagatgctgccttccgggacacccagaccagccccagcacagtgcccacctctgtgcacatcagccacatcagtgacagcgagggccccagcagcaccatggtgtccaccagcgccttcccctgggaggagttcaccagcagcgctgagggcagcggggagcagctggtgacagtgagcagctctgtggtgcctgtgctgcccagcgctgtgcagaagttctctggaacagccagcagcatcattgatgagggcctgggggaggtgggcaccgtgaatgaaattgacagaagaagcaccatcctgcccacagctgaggtggagggcaccaaggcccctgtggagaaggaggaggtgaaggtgtctggcaccgtgtccaccaacttcccccagaccattgaaccagccaagctgtggagccggcaggaggtgaaccctgtgcggcaggagattgaaagtgagaccaccagcgaggagcagatccaggaggagaagagctttgagagcccccagaacagccctgccacagagcagaccatctttgacagccagaccttcacagaaacagagctgaagaccacagactacagcgtgctgaccaccaagaagacctacagtgatgacaaggagatgaaggaggaggacaccagcctggtgaacatgagcaccccagaccctgatgccaacggcctggagagctacaccaccctgcctgaggccacagagaagagccacttcttcctggccacagccctggtgacagagagcatcccagctgagcacgtggtgacagacagccccatcaagaaggaggagagcaccaagcacttccccaagggcatgaggcccaccatccaggagagtgacacagagctgctcttcagcggcctgggcagcggggaggaggtgctgcccaccctgcccacagaatctgtgaacttcacagaggtggagcagatcaacaacaccctgtacccccacaccagccaggtggagagcaccagcagtgacaagattgaggacttcaacaggatggagaatgtggccaaggaggtgggccccctggtgtcccagacagacatctttgagggcagcggctctgtgaccagcaccaccctcatcgagatcctgagtgacaccggggctgagggccccaccgtggcccccctgcccttcagcacagacatcggccacccccagaaccagacagtgcgctgggccgaggagatccagaccagccggccccagaccatcacagagcaggacagcaacaagaacagcagcacagctgagatcaatgagaccaccaccagcagcacagacttcctggcccgggcctacggctttgagatggccaaggagtttgtgaccagcgcccccaagcccagcgacctgtactatgagcccagcggggagggcagcggggaggtggacatcgtggacagcttccacaccagcgccaccacccaggccacccggcaggagagcagcaccacctttgtgtctgatggcagcctggagaagcaccctgaggtgcccagcgccaaggctgtgacagcagatggcttccccaccgtgtctgtgatgctgcccctgcacagcgagcagaacaagagcagcccagaccccaccagcaccctgagcaacacagtgtcctatgaaagaagcacagatggcagcttccaggaccgcttccgggagtttgaggacagcaccctgaagcccaacaggaagaagcccacagagaacatcatcatcgacctggacaaggaggacaaggacctgatcctgaccatcacagagagcaccatcctggagatcctgcctgagctgaccagtgacaagaacaccatcattgatattgaccacaccaagcctgtgtatgaggacatcctgggcatgcagacagacatcgacacagaggtgcccagcgagccccatgacagcaatgatgagagcaatgatgacagcacccaggtgcaggagatctatgaggccgctgtgaacctgagcctgacagaggagacctttgagggcagcgcagatgtgctggccagctacacccaggccacccatgatgagagcatgacctatgaagatagaagccagctggaccacatgggcttccacttcaccaccggcatcccagcccccagcacagaaacagagctggatgtgctgctgcccacagccaccagcctgcccatccccaggaagagcgccaccgtcatccctgagattgagggcatcaaggccgaggccaaggccctggatgacatgtttgagagcagcaccctgagtgatggccaggccatcgctgaccagagcgagatcatccccaccctgggccagtttgagaggacccaggaggagtatgaggacaagaagcacgccggccccagcttccagcctgagttcagcagcggggctgaggaggccctggtggaccacaccccctacctgagcatcgccaccacccacctgatggaccagagcgtgacagaggtgcctgatgtgatggagggcagcaaccccccctactacacagacaccaccctggccgtgtccacctttgccaagctgagcagccagacccccagcagccccctgaccatctacagcggcagcgaggccagcggccacacagagatcccccagcccagcgccctgcccggcattgatgtgggcagctctgtgatgagcccccaggacagcttcaaggagatccacgtgaacatcgaggccaccttcaagcccagcagcgaggagtacctgcacatcacagagccccccagcctgagcccagacaccaagctggagcccagtgaagatgatggcaagccagagctgctggaggagatggaggccagccccacagagctgattgctgtggagggcacagagatcctgcaggacttccagaacaagacagatggccaggtgtctggagaggccatcaagatgttccccaccatcaagaccccagaggccggcaccgtcatcaccacagcagatgaaattgagctggagggcgccacccagtggccccacagcaccagcgccagcgccacctatggagtggaggccggcgtggtgccctggctgagcccccagaccagcgagcggcccaccctgagcagcagccctgagatcaaccctgagacccaggccgccctgatccggggccaggacagcaccatcgccgccagcgagcagcaggtggccgcccgcatcctggacagcaatgaccaggccaccgtgaaccctgtggagttcaacacagaggtggccaccccacccttcagcctgctggagaccagcaatgaaacagacttcctgattggcatcaatgaggagagcgtggagggcacagccatctacctgcccggccctgaccgctgcaagatgaacccctgcctgaatggaggcacctgctaccccacagagaccagctatgtgtgcacctgtgtgcccggctacagcggggaccagtgtgagctggactttgatgagtgccacagcaacccctgcagaaatggagccacctgtgtggatggcttcaacaccttccgctgcctgtgcctgcccagctatgtgggcgccctgtgtgagcaggacacagagacctgtgactatggctggcacaagttccagggccagtgctacaagtactttgcccacaggaggacctgggatgctgctgagagagaatgtcggctgcagggcgcccacctgaccagcatcctgagccatgaggagcagatgtttgtgaacagagtgggccatgactaccagtggattggcctgaatgacaagatgtttgaacatgacttccgctggacagatggcagcaccctgcagtatgagaactggaggcccaaccagcctgacagcttcttctctgctggggaggactgtgtggtgatcatctggcatgaaaatggccagtggaatgatgtgccctgcaactaccacctgacctacacctgcaagaagggcaccgtggcctgtggccagccccctgtggtggagaatgccaagaccttcggcaagatgaagcccaggtatgagatcaacagcctcatccgctaccactgcaaggatggcttcatccagaggcacctgcccaccatccgctgcctgggcaatggccgctgggccatccccaagatcacctgcatgaaccccagcgcctaccagaggacctacagcatgaagtacttcaagaacagcagcagcgccaaggacaacagcatcaacaccagcaagcatgaccaccgctggagccgccgctggcaggagagcagaagatag

SEQ ID NO: 62250 - DNA, 7230 bp, Artificial Sequence
  derived and/or modified sequence
atgttcatcaacatcaagagcatcctgtggatgtgcagcaccctgatcgtgacccacgcactacataaggttaaggtgggaaagtcacccccggtgaggggttctctgagcggcaaggtaagcctgccctgtcacttcagcacgatgccaactctgccgcctagctataatacctctgaattcctgagaatcaagtggtccaaaatcgaggttgacaagaacggaaaagatttgaaggaaacaaccgtgctcgtggctcagaacggcaacattaaaatcgggcaggattacaagggacgggtgagcgtgccaacgcacccagaggccgtcggggatgcgtccctgactgttgtgaagctgctggcctcagacgctgggctgtatcgatgcgacgtgatgtacgggattgaagacacccaggacactgtctctctgactgtagacggagttgtgtttcactatcgggctgcaacttccaggtacacgctcaacttcgaggctgcccaaaaagcttgtctggatgtaggggcagtgatcgcaaccccggagcagctgtttgccgcctatgaggacggcttcgagcagtgcgatgccggctggctggccgatcaaaccgttcgatatcccatccgtgcccctcgcgtggggtgctacggcgataaaatggggaaggctggagtgcgtacttacgggtttaggtcacctcaggagacgtacgacgtttattgttacgtagaccacctggatggtgacgtgtttcaccttaccgtgccatccaaattcaccttcgaggaggccgcaaaagaatgtgagaaccaggatgcacgcttggctactgtcggcgaactgcaagccgcctggcgcaatggctttgaccagtgcgactatggttggctgtccgacgcttccgtcaggcaccctgtcactgtagcccgcgcacagtgcggcggcggtctgctcggggtgcgaacactttaccggtttgagaatcaaacaggttttccacctcccgactctcggtttgacgcctattgtttcaagcgtagaatgagcgatctgtccgtgatcggccacccaatcgattctgaatctaaagaggacgaaccgtgttcagaggaaactgaccctgtccatgatctcatggctgagatcctgccggaatttcctgacattattgagatcgatctgtatcacagtgaagagaacgaggaagaggaagaggaatgcgccaacgccacagacgtgaccacaaccccctccgtccagtatatcaacggcaaacacctggtgactaccgtgcctaaagacccggaagctgctgaggctcgcagaggtcagtttgaatccgtggctccctctcagaatttcagcgacagcagcgagagcgacacgcatcccttcgtgattgcgaagacagagctgtctactgcagtgcagcctaatgaatcaaccgaaacaaccgaaagcctcgaggtgacttggaagcccgaaacttatcctgaaacaagcgagcattttagcggcggtgaaccagacgtttttcccaccgtcccctttcatgaggaatttgagtcagggactgcaaagaaaggcgccgagagcgtgaccgagcgcgacactgaggtgggccaccaggctcatgagcacacagaaccggtgagcttgttcccggaggaaagctcaggggaaattgcaatcgaccaagagtcccaaaagattgcgtttgctcgcgctaccgaagttacctttggcgaggaggtggagaagagcacatccgtgacatacacgcccacgatcgtcccttcttcggcctcggcttacgtgagtgaggaggaagctgtgactctgatcgggaatccctggcctgacgatttgctgagtaccaaggagtcttgggttgaagctactcctcgacaggtagtggagctaagcggctcatctagtataccaattactgaaggatccggcgaggctgaggaggatgaagacactatgttcacaatggtgaccgatctgtctcagaggaacactacagatacattgattacactggacacatctaggattatcaccgaatcatttttcgaagtgcccgctaccaccatttacccagtcagtgagcagccctccgctaaggttgtcccaacaaaatttgtgagcgagaccgatacaagcgaatggattagtagcaccacggtggaagaaaagaaaaggaaggaagaagagggcactactggtacagccagtaccttcgaggtctattcgagcacccagaggagtgatcaattaatcctacccttcgagcttgaatccccgaatgtggctacttcaagcgacagcggcacccggaagagctttatgtcacttaccacccccactcagagtgaacgggaaatgaccgattctactcctgtcttcactgagacaaacacactggagaaccttggcgcccagaccacagagcattcctctatccatcagcctggcgtgcaagagggccttacaacgctgcccaggagtccggcgtcagtctttatggagcagggttcaggagaggccgccgcggaccccgaaaccacgacagtttcatcctttagtctcaatgtagagtatgccattcaggcagaaaaggaggtggctggaactctatccccacacgtcgagacaacattctcaacagagcccacagggctggttttatctaccgtgatggatagggtggtcgccgagaacattacccagacatcaagagaaatcgtgattagcgaaaggctaggcgaacccaattacggcgctgagatccgcggattctcaactgggttccccttggaggaagacttcagcggcgattttcgcgagtattcaactgtgtctcaccccattgccaaggaggaaactgttatgatggaggggtcgggcgacgccgcttttcgagacacacagaccagtccctccacagtgcctacaagcgtccacataagccacataagtgattcagaggggccaagctccaccatggtctccacgtccgcttttccctgggaggaatttactagttccgcagaaggaagcggggaacagttggtgaccgtgtctagctccgtggtaccggtgttaccatctgccgtccagaaattcagcggaacagcttcgagcataatagacgaaggcctcggtgaggtcgggactgtgaacgaaatagatcgaagatctacgattctcccaaccgcggaggtggaaggaaccaaggctcctgtcgagaaggaggaggtgaaggtttccggaactgtttctacaaactttcctcagactatcgagcctgcaaagctatggagccggcaggaagtaaacccagtgcgccaggagatcgaaagcgaaacaactagtgaagaacaaattcaggaggaaaagtctttcgaatcccctcagaatagccccgccacagaacagacaattttcgattctcagacattcactgaaaccgaactcaagaccacggattattccgtcttgactaccaaaaagacctatagtgacgacaaggagatgaaggaagaggatacatcactggtaaacatgagcacgcccgacccggatgccaacggcctcgagagctataccactctcccagaagcgactgagaagtctcactttttcttggccacggccctggttacagagtcaattcccgcggagcatgtcgtaacagattccccaattaaaaaggaagagtccacaaagcacttccccaagggtatgagaccaactatccaggagtctgacactgagctattgtttagcggactcgggtcaggcgaggaggttctgcccacactgcctaccgaatctgtaaactttacggaggtcgaacagattaacaacacactgtatccgcacaccagccaagtagaatctacttcgtcagacaaaattgaggactttaacaggatggaaaatgtggcaaaggaggtcggcccccttgttagccagaccgatatcttcgagggctccggaagcgtgactagtacaactctgattgaaatactgtcggatacaggcgccgaaggccctacagtcgctcctcttcctttctcaacagacataggacaccctcaaaatcaaaccgtgcgctgggccgaggagattcaaacatcccggcctcagactatcaccgagcaggattccaacaaaaatagctcaacggctgagatcaatgagaccaccacctcctccaccgattttctggcccgggcttatggcttcgagatggccaaggagtttgtaaccagcgccccaaaaccaagtgatttatactacgagccaagtggtgagggatctggagaggtggacatcgtagactcttttcatacctccgccacaacccaggctacaaggcaggaaagttctaccacattcgtaagcgatgggtccctggaaaagcatccggaagtgcccagcgcaaaagcagtcacagcagacggcttccctacagtgtccgtgatgcttccactgcacagcgaacagaacaagagcagcccagatcccacctccacactgtccaatacagtgagttatgaacgatccacggatgggtcattccaggatcgctttagggagtttgaggactccaccttaaaaccaaacaggaagaagcccactgagaacataattattgacttggataaggaagacaaagatttaatcctaactatcaccgaatctactatcctggagattctccctgagctgacatccgataaaaacactatcatcgatattgaccacacaaagcctgtctacgaagatattcttggcatgcagactgacattgacaccgaggtgccctccgaaccgcacgactccaatgacgagtcaaacgacgattctacgcaggttcaggaaatttatgaggctgcagtgaacctatctctgaccgaggagacttttgagggatcggccgatgtgcttgccagttatacccaagccactcacgatgagagcatgacctatgaagatcgttcccagctggatcacatgggattccatttcaccactgggatcccagctccgtctacggagactgagctagatgttctcctgcccactgctacatctctgcccattcccagaaaatctgctacggtgatcccagaaatcgaagggataaaagccgaagccaaggccctggatgatatgtttgaatcgtcaacattgtctgacggacaggcgatagcggatcagtcagaaatcatccccaccctgggccaattcgagcgcacccaggaagagtacgaagacaagaagcacgcggggccttcatttcagccagagttcagtagcggagcggaagaggcactagtcgaccacacgccttatctaagtattgcaaccacacatctgatggatcaaagcgtcaccgaggtccctgacgtcatggagggttctaaccccccgtattacacagacactactctggcagtgtccaccttcgccaaacttagtagtcagacaccaagtagtcctttgacaatctattcagggtcagaagctagtggtcatacagagatcccccaaccatcagctctgcctgggatcgacgtcgggagcagtgtaatgtccccccaagacagtttcaaagagattcacgtcaacattgaggccacctttaaaccatcttccgaggagtacctccatatcacagagcctccctcactctcacctgacaccaagttggaaccaagtgaagacgacggaaaaccagagctgctggaggagatggaagcctcgcccaccgagcttatcgcggtggagggcaccgagattctacaggatttccaaaacaagacggatgggcaagtgtcaggggaggcgatcaagatgttcccaactataaagacaccagaagctgggacggtcatcacgaccgcggatgaaatcgagctggagggggccacacagtggccccacagcacctccgccagtgctacttacggggtggaagccggcgtggttccctggcttagcccccaaacttccgagaggcccaccctgagctccagccctgagattaacccagagacccaagcagcactgatacggggacaggactcgaccatagctgcttccgagcagcaggtcgccgctaggatactcgatagcaatgatcaggcaactgtgaaccccgtggagtttaacaccgaagttgctactcctccattcagtttgttggagacatccaacgagactgatttccttattggaatcaatgaggaaagcgtggagggcactgccatttacctgccaggccccgacagatgtaaaatgaatccttgcctgaatggaggaacctgctatcctactgaaacatcctacgtgtgcacttgtgtccccggctacagtggtgaccagtgcgaactcgactttgacgagtgccacagtaacccctgtaggaatggagcaacatgcgtcgacggctttaacaccttcagatgtttatgtctgcccagttacgtgggtgcactgtgtgaacaagacacggagacttgtgattacggatggcataaattccagggtcagtgctataagtactttgcccaccggcggacctgggatgccgccgagcgcgaatgccgcctccagggagctcatttgacaagtatcctgagccacgaagaacagatgttcgtgaacagggtaggccacgactaccagtggatcgggctcaacgacaagatgtttgaacatgatttcaggtggactgatggctctacattgcagtatgaaaattggcgccccaaccagccggatagttttttctctgcaggtgaggactgtgtggtcatcatctggcacgagaatggtcagtggaatgacgtgccttgcaactaccatttgacctacacctgcaaaaaagggacagtcgcctgcggtcaacccccagtggtcgagaatgcaaaaacatttggaaagatgaagcctcgatacgaaatcaactccctgattcgttaccactgcaaagacggctttatccagcgtcaccttccgacaattcgttgcctgggcaacgggaggtgggctatcccaaagatcacttgtatgaacccatctgcgtaccaacgaacatactctatgaaatactttaaaaattccagcagcgctaaggataatagcatcaacacgagcaagcacgaccaccgctggtcgcgaagatggcaagagagcaggcgttag

SEQ ID NO: 62251 - DNA, 7229 bp, Artificial Sequence
  derived and/or modified sequence
atgttcataaacattaaatctattctgtggatgtgcagcacactaatcgtgacccatgctctgcacaaggttaaggtaggtaagtcccctcctgtccgcggatcactgagcgggaaggtgagcttaccctgtcatttttccaccatgccgacgttgcctcccagttacaacacgagcgaattcttgaggatcaaatggtctaagattgaggttgataaaaatgggaaagatcttaaggaaaccacagtgctcgttgcccagaacgggaacattaagataggccaagactacaagggaagagtcagcgtgccgacccaccccgaggcagtaggcgatgcctctctgactgtggtcaagttgctcgctagcgatgctggtctatacaggtgcgacgtcatgtacggcatcgaggacactcaggataccgtgtctctcacagttgacggagtggtattccactatagggcagctacctcacgctataccctgaactttgaggccgctcaaaaggcatgcctggacgtgggggcagttattgcaactcccgagcaactgtttgcggcttatgaggatggcttcgagcagtgcgatgccggttggcttgccgatcagaccgtaagatacccaatccgggcacctcgcgtcggttgttacggagataagatgggtaaggcaggggttagaacttatggtttcagatcccctcaggagacatatgatgtctactgttatgtcgaccatctggacggggatgtgttccacctcacagtcccttctaaattcacctttgaggaagctgccaaagagtgtgagaatcaggatgcgagactggctactgtgggagagttgcaggcggcttggagaaacgggttcgaccagtgcgactacggttggctctctgacgcctctgtgaggcatccggtgactgttgctcgggctcaatgcggcggagggctgttgggtgtccgaaccctctatagattcgagaatcagacaggattcccacctcctgattcaagatttgacgcttactgttttaagcgaaggatgtctgacctgtctgtgattggacaccctatagactcagagtcaaaggaagacgaaccctgcagcgaggaaactgacccagtccatgacctcatggctgagattctgcccgagtttcccgacatcatagaaattgatctctatcactctgaagaaaacgaagaagaggaggaggagtgcgctaacgcaacagacgtgaccacgacaccgagcgttcaatatattaatggcaaacaccttgtgaccaccgtgcccaaagatcctgaagcggcagaggcccgacggggacagttcgagagtgtggcaccaagccagaatttttctgattcctccgagtctgatacgcatccattcgttattgctaaaacagaactctctacagccgtccagcctaatgagagcacggagacgaccgaaagcctggaggtgacatggaagcccgaaacctaccctgagactagcgaacacttctctggcggagagccagacgtgttcccaactgtcccctttcacgaagagttcgagtctggaacagccaagaagggagccgaaagcgtgactgaacgggatacagaagtcggacaccaggcccacgaacatactgagccagtgagcctgttccccgaggagtctagcggggagatcgcaatagaccaggaatcacagaagattgcctttgccagggccacagaggttacgtttggcgaggaagtggagaaatctaccagcgtcacttacacgcccacaatcgtgccctcctccgcctcggcgtatgtttcagaggaagaggctgtgacactaatcgggaacccatggcccgacgacttactctccactaaggagtcgtgggtagaggctaccccgagacaggtcgtggagctttcggggtctagttctatccccataacggagggatcaggcgaggcagaagaagatgaggacacaatgtttaccatggtgaccgacctgtcccaacgcaataccacggatactctgatcacgctagacacttcacgcatcatcacggagtctttctttgaagtacccgctaccacgatttatcccgtgtccgaacagccctcagcgaaggtggtgcctaccaagtttgttagcgagaccgatacaagcgagtggatcagctctactactgtggaggaaaagaaacgaaaagaggaagaaggtacgacagggacagcctcaacctttgaggtctatagtagtactcagcgcagcgaccagttgatacttccatttgaactggagagtccaaatgtcgctacatccagtgattccggaacacggaagagcttcatgagtcttactactcctacacagtcagaacgcgaaatgacggattctactccggtgttcactgagacaaacacactggagaatctgggcgctcaaaccaccgagcacagctccattcaccaacctggggtccaggaaggcctgactacccttcctcgctcccccgcatcggtatttatggagcaggggagcggcgaagcagcagctgaccccgaaacaacaacagtgtcctccttctcccttaatgtcgagtatgccatccaagccgaaaaagaagtagccggtactctgagcccccatgtggaaaccacattttccactgaacccacgggcctagttctttccactgtaatggacagggtggtggctgagaacattacccaaaccagtcgtgaaatcgtgatttccgagcggctgggggagcccaattacggcgctgagatcaggggcttttcaaccggctttccactggaggaggacttttcaggtgacttcagggagtacagtaccgtatcgcaccccatagccaaggaggagacagtgatgatggaaggctcaggggatgccgctttccgggacacccaaacctccccttctacagtcccaaccagtgtccacatctcgcacatttcagattctgagggcccaagtagcaccatggttagtacatctgctttcccatgggaagaattcacttctagtgccgaaggtagcggggagcaactggtgactgtgagcagttccgtagtccccgtgctgccttctgccgtgcagaaattcagtggaactgctagctcgatcatagacgagggactgggcgaagtgggtacggttaacgaaatcgacaggcggtcaaccatactcccgaccgccgaagttgaaggcaccaaagcacccgtcgaaaaggaggaggtgaaggtcagcgggactgtgagcactaactttccgcagaccatcgaacccgctaagctctggtcgcggcaggaggttaacccagtgagacaagagatcgagtctgagacaacatccgaagagcagattcaggaagaaaagtcgttcgagtcacctcaaaactcacctgcaaccgagcagactatcttcgattcccagaccttcactgagactgagctgaaaacaacagattatagcgtgcttacgaccaaaaagacatattcagacgacaaagaaatgaaggaagaggatacaagcctggtgaacatgagtacacccgaccccgacgctaacggactggagtcatatacaactctgcccgaggcgactgaaaaatctcatttctttctggccactgccctggtcaccgaaagcattcctgctgaacacgtggtcaccgattctccaatcaagaaggaagaatcaactaagcacttccctaagggaatgagacccactatacaggaaagcgacacagaacttctgttttccggactgggaagcggcgaagaagtgcttcccactctacccaccgagagcgtcaacttcaccgaagtggagcagattaacaacacactgtacccacatacatctcaggtggagtctacaagttcagacaagatcgaagactttaatcgcatggaaaacgtggccaaagaggtgggacccctagtgagccaaactgatatctttgaaggttcaggctctgtgacgtcaactaccctgattgagatcctgtcggacactggcgctgagggccctactgtggcacccttaccgttttctactgatattggtcatccccaaaaccaaactgtccgctgggctgaagaaatacagacatccagacctcagactatcacagaacaggactcaaacaaaaattctagcaccgcagaaatcaatgaaactacaacctcctcgactgattttctcgccagggcctatggatttgaaatggccaaggaattcgtcacctctgcccctaagccctctgatttatattatgagcctagcggtgaggggtccggcgaggtggatatagtcgactcattccatacttctgccaccacccaagccacccgccaggaaagctctacaacttttgtgtctgacggaagcctggaaaagcatcccgaggtcccttccgctaaggcagttaccgccgacggctttcctactgttagcgtgatgctgcccctgcacagcgagcagaacaagagttctcctgaccctacgagcaccctttcgaatacggtctcctacgaacgctctactgacggttcctttcaggacaggtttagagagttcgaggactctaccttgaagcccaatcgtaagaagccaactgaaaacatcatcatcgacttagacaaggaggacaaggacctgatcctcaccatcacagagtccacaatcctcgagatcttacctgagctgaccagcgacaaaaataccattatcgatattgatcacacaaagcctgtctatgaggatatcctcggtatgcagaccgatattgacacagaagtgccctctgaaccccacgattcgaatgatgagtccaacgatgatagcacccaggtgcaggagatttacgaagccgcagtcaatttatccctgacggaggagaccttcgaggggtctgcagatgttctcgcttcttacacccaggctactcatgatgagtctatgacgtacgaagacagatctcagctggaccacatgggcttccactttaccaccggaattcctgcaccatccacagaaactgaactggatgtcctattaccaacagccacatccttacccatccccagaaaatctgctaccgtgatccccgaaatagaagggatcaaagccgaagccaaggctctggacgacatgttcgaatcctctacactgagtgatggtcaggctatcgccgaccagtcagagatcatccctactctggggcagttcgaacggacccaggaggaatacgaggataagaagcatgccggaccgtccttccagcccgaattttcatccggagccgaggaggctttggtagaccacaccccctatttgtcaatcgctacaactcacctgatggatcagtccgtgacagaggtgccagatgtcatggaggggtccaatcctccatactacactgacaccacgctggctgtcagtacgttcgctaaattgtccagccagacaccttcctctcctctgacgatctactcaggttctgaagccagtggccacacagaaataccacaaccgagtgccctgcccggtattgacgttggcagtagcgtgatgagcccccaggacagttttaaggaaattcatgttaatattgaggctacctttaagccgtcctccgaggagtatcttcacatcaccgaacctcccagtctcagtcccgatacaaaactggagccatctgaagatgatgggaagcccgaactgctcgaagagatggaggcctcccccaccgagctcatcgctgtggagggcaccgagattctgcaagacttccaaaacaagacggacgggcaggtctctggcgaggccatcaaaatgttccccacaatcaaaacaccagaagcagggactgtgatcacaaccgcagatgaaatcgagttagagggcgctacccagtggcctcactcaacatccgcttctgcaacatatggggttgaagctggggttgttccatggctgagtccgcagacatctgaaaggcccaccctcagctcttcacctgagataaacccggagacccaggcagctctgatccgcggacaggatagcactattgccgcaagcgagcagcaagtggcagcacgcatccttgatagcaacgatcaggccacggtcaatcctgtagaatttaacactgaagtggccaccccaccattctctctgctcgagacaagcaacgagacggatttcttaattggcatcaacgaggagagcgttgaaggtacagccatctacttgcctgggccagacagatgtaaaatgaatccgtgcctcaacggcggtacttgctaccctaccgaaaccagctatgtgtgcacctgcgtccccggatattcaggagatcagtgcgagttagacttcgacgagtgccactccaatccttgccgcaacggagcaacttgcgtggatggttttaacacgtttagatgcttatgtttaccctcctacgtgggagcattatgcgagcaggacactgagacttgtgactacggctggcacaagtttcaaggtcagtgctataaatatttcgcgcacagacgcacttgggatgcggctgagagggagtgccggttacagggagcccatctgacaagtatcctgagccatgaggagcagatgtttgtgaacagagtcgggcacgactaccagtggataggactgaacgacaaaatgttcgaacatgattttcggtggaccgacggcagcacattgcagtacgagaactggcggccaaatcagccagattcgttcttttccgctggcgaggactgtgttgtgatcatctggcatgagaatgggcaatggaatgacgttccctgcaattatcacctgacatacacgtgcaaaaaaggcacagtggcttgcggacagccaccagtcgtggagaatgccaaaaccttcggcaagatgaaacctcggtacgagattaattctctcatccgctaccattgtaaggacggattcatacagcgacacctcccgaccattagatgtctaggaaatggcaggtgggcaattccaaagatcacatgtatgaacccatccgcttatcagcggacttatagcatgaaatacttcaaaaattctagctccgctaaagacaatagcatcaatacatccaagcacgaccacagatggtcccggagatggcaagaatctaggcgcta

SEQ ID NO: 62252 - DNA, 9455 bp, Artificial Sequence
  derived and/or modified sequence
cttcttctcgctgagtctcctcctcggctctgacggtacagtgatataatgatgatgggtgtcacaacccgcatttgaacttgcaggcgagctgccccgagcctttctggggaagaactccaggcgtgcggacgcaacagccgagaacattaggtgttgtggacaggagctgggaccaagatcttcggccagccccgcatcctcccgcatcttccagcaccgtcccgcaccctccgcatccttccccgggccaccacgcttcctatgtgacccgcctgggcaacgccgaacccagtcgcgcagcgctgcagtgaattttccccccaaactgcaataagccgccttccaaggccaagatgttcataaatataaagagcatcttatggatgtgttcaaccttaatagtaacccatgcgctacataaagtcaaagtgggaaaaagcccaccggtgaggggctccctctctggaaaagtcagcctaccttgtcatttttcaacgatgcctactttgccacccagttacaacaccagtgaatttctccgcatcaaatggtctaagattgaagtggacaaaaatggaaaagatttgaaagagactactgtccttgtggcccaaaatggaaatatcaagattggtcaggactacaaagggagagtgtctgtgcccacacatcccgaggctgtgggcgatgcctccctcactgtggtcaagctgctggcaagtgatgcgggtctttaccgctgtgacgtcatgtacgggattgaagacacacaagacacggtgtcactgactgtggatggggttgtgtttcactacagggcggcaaccagcaggtacacactgaattttgaggctgctcagaaggcttgtttggacgttggggcagtcatagcaactccagagcagctctttgctgcctatgaagatggatttgagcagtgtgacgcaggctggctggctgatcagactgtcagatatcccatccgggctcccagagtaggctgttatggagataagatgggaaaggcaggagtcaggacttatggattccgttctccccaggaaacttacgatgtgtattgttatgtggatcatctggatggtgatgtgttccacctcactgtccccagtaaattcaccttcgaggaggctgcaaaagagtgtgaaaaccaggatgccaggctggcaacagtgggggaactccaggcggcatggaggaacggctttgaccagtgcgattacgggtggctgtcggatgccagcgtgcgccaccctgtgactgtggccagggcccagtgtggaggtggtctacttggggtgagaaccctgtatcgttttgagaaccagacaggcttccctccccctgatagcagatttgatgcctactgctttaaacgtcgaatgagtgatttgagtgtaattggtcatccaatagattcagaatctaaagaagatgaaccttgtagtgaagaaacagatccagtgcatgatctaatggctgaaattttacctgaattccctgacataattgaaatagacctataccacagtgaagaaaatgaagaagaagaagaagagtgtgcaaatgctactgatgtgacaaccaccccatctgtgcagtacataaatgggaagcatctcgttaccactgtgcccaaggacccagaagctgcagaagctaggcgtggccagtttgaaagtgttgcaccttctcagaatttctcggacagctctgaaagtgatactcatccatttgtaatagccaaaacggaattgtctactgctgtgcaacctaatgaatctacagaaacaactgagtctcttgaagttacatggaagcctgagacttaccctgaaacatcagaacatttttcaggtggtgagcctgatgttttccccacagtcccattccatgaggaatttgaaagtggaacagccaaaaaaggggcagaatcagtcacagagagagatactgaagttggtcatcaggcacatgaacatactgaacctgtatctctgtttcctgaagagtcttcaggagagattgccattgaccaagaatctcagaaaatagcctttgcaagggctacagaagtaacatttggtgaagaggtagaaaaaagtacttctgtcacatacactcccactatagttccaagttctgcatcagcatatgtttcagaggaagaagcagttaccctaataggaaatccttggccagatgacctgttgtctaccaaagaaagctgggtagaagcaactcctagacaagttgtagagctctcagggagttcttcgattccaattacagaaggctctggagaagcagaagaagatgaagatacaatgttcaccatggtaactgatttatcacagagaaatactactgatacactcattactttagacactagcaggataatcacagaaagcttttttgaggttcctgcaaccaccatttatccagtttctgaacaaccttctgcaaaagtggtgcctaccaagtttgtaagtgaaacagacacttctgagtggatttccagtaccactgttgaggaaaagaaaaggaaggaggaggagggaactacaggtacggcttctacatttgaggtatattcatctacacagagatcggatcaattaattttaccctttgaattagaaagtccaaatgtagctacatctagtgattcaggtaccaggaaaagttttatgtccttgacaacaccaacacagtctgaaagggaaatgacagattctactcctgtctttacagaaacaaatacattagaaaatttgggggcacagaccactgagcacagcagtatccatcaacctggggttcaggaagggctgaccactctcccacgtagtcctgcctctgtctttatggagcagggctctggagaagctgctgccgacccagaaaccaccactgtttcttcattttcattaaacgtagagtatgcaattcaagccgaaaaggaagtagctggcactttgtctccgcatgtggaaactacattctccactgagccaacaggactggttttgagtacagtaatggacagagtagttgctgaaaatataacccaaacatccagggaaatagtgatttcagagcgattaggagaaccaaattatggggcagaaataaggggcttttccacaggttttcctttggaggaagatttcagtggtgactttagagaatactcaacagtgtctcatcccatagcaaaagaagaaacggtaatgatggaaggctctggagatgcagcatttagggacacccagacttcaccatctacagtacctacttcagttcacatcagtcacatatctgactcagaaggacccagtagcaccatggtcagcacttcagccttcccctgggaagagtttacatcctcagctgagggctcaggtgagcaactggtcacagtcagcagctctgttgttccagtgcttcccagtgctgtgcaaaagttttctggtacagcttcctccattatcgacgaaggattgggagaagtgggtactgtcaatgaaattgatagaagatccaccattttaccaacagcagaagtggaaggtacgaaagctccagtagagaaggaggaagtaaaggtcagtggcacagtttcaacaaactttccccaaactatagagccagccaaattatggtctaggcaagaagtcaaccctgtaagacaagaaattgaaagtgaaacaacatcagaggaacaaattcaagaagaaaagtcatttgaatcccctcaaaactctcctgcaacagaacaaacaatctttgattcacagacatttactgaaactgaactcaaaaccacagattattctgtactaacaacaaagaaaacttacagtgatgataaagaaatgaaggaggaagacacttctttagttaacatgtctactccagatccagatgcaaatggcttggaatcttacacaactctccctgaagctactgaaaagtcacattttttcttagctactgcattagtaactgaatctataccagctgaacatgtagtcacagattcaccaatcaaaaaggaagaaagtacaaaacattttccgaaaggcatgagaccaacaattcaagagtcagatactgagctcttattctctggactgggatcaggagaagaagttttacctactctaccaacagagtcagtgaattttactgaagtggaacaaatcaataacacattatatccccacacttctcaagtggaaagtacctcaagtgacaaaattgaagactttaacagaatggaaaatgtggcaaaagaagttggaccactcgtatctcaaacagacatctttgaaggtagtgggtcagtaaccagcacaacattaatagaaattttaagtgacactggagcagaaggacccacggtggcacctctccctttctccacggacatcggacatcctcaaaatcagactgtcaggtgggcagaagaaatccagactagtagaccacaaaccataactgaacaagactctaacaagaattcttcaacagcagaaattaacgaaacaacaacctcatctactgattttctggctagagcttatggttttgaaatggccaaagaatttgttacatcagcaccaaaaccatctgacttgtattatgaaccttctggagaaggatctggagaagtggatattgttgattcatttcacacttctgcaactactcaggcaaccagacaagaaagcagcaccacatttgtttctgatgggtccctggaaaaacatcctgaggtgccaagcgctaaagctgttactgctgatggattcccaacagtttcagtgatgctgcctcttcattcagagcagaacaaaagctcccctgatccaactagcacactgtcaaatacagtgtcatatgagaggtccacagacggtagtttccaagaccgtttcagggaattcgaggattccaccttaaaacctaacagaaaaaaacccactgaaaatattatcatagacctggacaaagaggacaaggatttaatattgacaattacagagagtaccatccttgaaattctacctgagctgacatcggataaaaatactatcatagatattgatcatactaaacctgtgtatgaagacattcttggaatgcaaacagatatagatacagaggtaccatcagaaccacatgacagtaatgatgaaagtaatgatgacagcactcaagttcaagagatctatgaggcagctgtcaacctttctttaactgaggaaacatttgagggctctgctgatgttctggctagctacactcaggcaacacatgatgaatcaatgacttatgaagatagaagccaactagatcacatgggctttcacttcacaactgggatccctgctcctagcacagaaacagaattagacgttttacttcccacggcaacatccctgccaattcctcgtaagtctgccacagttattccagagattgaaggaataaaagctgaagcaaaagccctggatgacatgtttgaatcaagcactttgtctgatggtcaagctattgcagaccaaagtgaaataataccaacattgggccaatttgaaaggactcaggaggagtatgaagacaaaaaacatgctggtccttcttttcagccagaattctcttcaggagctgaggaggcattagtagaccatactccctatctaagtattgctactacccaccttatggatcagagtgtaacagaggtgcctgatgtgatggaaggatccaatcccccatattacactgatacaacattagcagtttcaacatttgcgaagttgtcttctcagacaccatcatctcccctcactatctactcaggcagtgaagcctctggacacacagagatcccccagcccagtgctctgccaggaatagacgtcggctcatctgtaatgtccccacaggattcttttaaggaaattcatgtaaatattgaagcgactttcaaaccatcaagtgaggaataccttcacataactgagcctccctctttatctcctgacacaaaattagaaccttcagaagatgatggtaaacctgagttattagaagaaatggaagcttctcccacagaacttattgctgtggaaggaactgagattctccaagatttccaaaacaaaaccgatggtcaagtttctggagaagcaatcaagatgtttcccaccattaaaacacctgaggctggaactgttattacaactgccgatgaaattgaattagaaggtgctacacagtggccacactctacttctgcttctgccacctatggggtcgaggcaggtgtggtgccttggctaagtccacagacttctgagaggcccacgctttcttcttctccagaaataaaccctgaaactcaagcagctttaatcagagggcaggattccacgatagcagcatcagaacagcaagtggcagcgagaattcttgattccaatgatcaggcaacagtaaaccctgtggaatttaatactgaggttgcaacaccaccattttcccttctggagacttctaatgaaacagatttcctgattggcattaatgaagagtcagtggaaggcacggcaatctatttaccaggacctgatcgctgcaaaatgaacccgtgccttaacggaggcacctgttatcctactgaaacttcctacgtatgcacctgtgtgccaggatacagcggagaccagtgtgaacttgattttgatgaatgtcactctaatccctgtcgtaatggagccacttgtgttgatggttttaacacattcaggtgcctctgccttccaagttatgttggtgcactttgtgagcaagataccgagacatgtgactatggctggcacaaattccaagggcagtgctacaaatactttgcccatcgacgcacatgggatgcagctgaacgggaatgccgtctgcagggtgcccatctcacaagcatcctgtctcacgaagaacaaatgtttgttaatcgtgtgggccatgattatcagtggataggcctcaatgacaagatgtttgagcatgacttccgttggactgatggcagcacactgcaatacgagaattggagacccaaccagccagacagcttcttttctgctggagaagactgtgttgtaatcatttggcatgagaatggccagtggaatgatgttccctgcaattaccatctcacctatacgtgcaagaaaggaacagtcgcttgcggccagccccctgttgtagaaaatgccaagacctttggaaagatgaaacctcgttatgaaatcaactccctgattagataccactgcaaagatggtttcattcaacgtcaccttccaactatccggtgcttaggaaatggaagatgggctatacctaaaattacctgcatgaacccatctgcataccaaaggacttattctatgaaatactttaaaaattcctcatcagcaaaggacaattcaataaatacatccaaacatgatcatcgttggagccggaggtggcaggagtcgaggcgctgatccctaaaatggcgaacatgtgttttcatcatttcagccaaagtcctaacttcctgtgcctttcctatcacctcgagaagtaattatcagttggtttggatttttggaccaccgttcagtcattttgggttgccgtgctcccaaaacattttaaatgaaagtattggcattcaaaaagacagcagacaaaatgaaagaaaatgagagcagaaagtaagcatttccagcctatctaatttctttagttttctatttgcctccagtgcagtccatttcctaatgtataccagcctactgtactatttaaaatgctcaatttcagcaccgatggccatgtaaataagatgatttaatgttgattttaatcctgtatataaaataaaaagtcacaatgagtttgggcatatttaatgatgattatggagccttagaggtctttaatcattggttcggctgcttttatgtagtttaggctggaaatggtttcacttgctctttgactgtcagcaagactgaagatggcttttcctggacagctagaaaacacaaaatcttgtaggtcattgcacctatctcagccataggtgcagtttgcttctacatgatgctaaaggctgcgaatgggatcctgatggaactaaggactccaatgtcgaactcttctttgctgcattcctttttcttcacttacaagaaaggcctgaatggaggacttttctgtaaccaggaacattttttaggggtcaaagtgctaataattaactcaaccaggtctactttttaatggctttcataacactaactcataaggttaccgatcaatgcatttcatacggatatagacctagggctctggagggtgggggattgttaaaacacatgcaaaaaaaaaaaaaaaaaaaaaaaaagaaattttgtatatataaccattttaatcttttataaagttttgaatgttcatgtatgaatgctgcagctgtgaagcatacataaataaatgaagtaagccatactgatttaatttattggatgttattttccctaagacctgaaaatgaacatagtatgctagttatttttcagtgttagccttttactttcctcacacaatttggaatcatataatataggtactttgtccctgattaaataatgtgacggatagaatgcatcaagtgtttattatgaaaagagtggaaaagtatatagcttttagcaaaaggtgtttgcccattctaagaaatgagcgaatatatagaaatagtgtgggcatttcttcctgttaggtggagtgtatgtgttgacatttctccccatctcttcccactctgttttctccccattatttgaataaagtgactgctgaagatgactttgaatccttatccacttaatttaatgtttaaagaaaaacctgtaatggaaagtaagactccttccctaatttcagtttagagcaacttgaagaagagtagacaaaaaataaaatgcacatagaaaaagagaaaaagggcacaaagggattggcccaatattgattctttttttataaaacctcctttggcttagaaggaatgactctagctacaataatacacagtatgtttaagcaggttcccttggttgttgcattaaatgtaatccacctttaggtattttagagcacagaacaacactgtgttgatctagtaggtttctatttttcctttctctttacaatgcacataatactttcctgtatttatatcataacgtgtatagtgtaaaatgtgaatgactttttttgtgaatgaaaatctaaaatctttgtaactttttatatctgcttttgtttcaccaaagaaacctaaaatccttcttttactacac

SEQ ID NO: 62253 - protein, 1642 aa, Artificial Sequence
  derived and/or modified sequence
MFINIKSILWMCSTLIVTHALHKVKVGKSPPVRGSLSGKVSLPCHFSTMPTLPPSYNTSEFLRIKWSKIEVDKNGKDLKETTVLVAQNGNIKIGQDYKGRVSVPTHPEAVGDASLTVVKLLASDAGLYRCDVMYGIEDTQDTVSLTVDGVVFHYRAATSRYTLNFEAAQKACLDVGAVIATPEQLFAAYEDGFEQCDAGWLADQTVRYPIRAPRVGCYGDKMGKAGVRTYGFRSPQETYDVYCYVDHLDGDVFHLTVPSKFTFEEAAKECENQDARLATVGELQAAWRNGFDQCDYGWLSDASVRHPVTVARAQCGGGLLGVRTLYRFENQTGFPPPDSRFDAYCFKPKEATTIDLSILAETASPSLSKEPQMVSDRTTPIIPLVDELPVIPTEFPPVGNIVSFEQKATVQPQAITDSLATKLPTPTGSTKKPWDMDDYSPSASGPLGKLDISEIKEEVLQSTTGVSHYATDSWDGVVEDKQTQESVTQIEQIEVGPLVTSMEILKHIPSKEFPVTETPLVTARMILESKTEKKMVSTVSELVTTGHYGFTLGEEDDEDRTLTVGSDESTLIFDQIPEVITVSKTSEDTIHTHLEDLESVSASTTVSPLIMPDNNGSSMDDWEERQTSGRITEEFLGKYLSTTPFPSQHRTEIELFPYSGDKILVEGISTVIYPSLQTEMTHRRERTETLIPEMRTDTYTDEIQEEITKSPFMGKTEEEVFSGMKLSTSLSEPIHVTESSVEMTKSFDFPTLITKLSAEPTEVRDMEEDFTATPGTTKYDENITTVLLAHGTLSVEAATVSKWSWDEDNTTSKPLESTEPSASSKLPPALLTTVGMNGKDKDIPSFTEDGADEFTLIPDSTQKQLEEVTDEDIAAHGKFTIRFQPTTSTGIAEKSTLRDSTTEEKVPPITSTEGQVYATMEGSALGEVEDVDLSKPVSTVPQFAHTSEVEGLAFVSYSSTQEPTTYVDSSHTIPLSVIPKTDWGVLVPSVPSEDEVLGEPSQDILVIDQTRLEATISPETMRTTKITEGTTQEEFPWKEQTAEKPVPALSSTAWTPKEAVTPLDEQEGDGSAYTVSEDELLTGSERVPVLETTPVGKIDHSVSYPPGAVTEHKVKTDEVVTLTPRIGPKVSLSPGPEQKYETEGSSTTGFTSSLSPFSTHITQLMEETTTEKTSLEDIDLGSGLFEKPKATELIEFSTIKVTVPSDITTAFSSVDRLHTTSAFKPSSAITKKPPLIDREPGEETTSDMVIIGESTSHVPPTTLEDIVAKETETDIDREYFTTSSPPATQPTRPPTVEDKEAFGPQALSTPQPPASTKFHPDINVYIIEVRENKTGPDRCKMNPCLNGGTCYPTETSYVCTCVPGYSGDQCELDFDECHSNPCRNGATCVDGFNTFRCLCLPSYVGALCEQDTETCDYGWHKFQGQCYKYFAHRRTWDAAERECRLQGAHLTSILSHEEQMFVNRVGHDYQWIGLNDKMFEHDFRWTDGSTLQYENWRPNQPDSFFSAGEDCVVIIWHENGQWNDVPCNYHLTYTCKKGTVACGQPPVVENAKTFGKMKPRYEINSLIRYHCKDGFIQRHLPTIRCLGNGRWAIPKITCMNPSAYQRTYSMKYFKNSSSAKDNSINTSKHDHRWSRRWQESRR

SEQ ID NO: 62254 - protein, 1594 aa, Artificial Sequence
  derived and/or modified sequence
MPTLPPSYNTSEFLRIKWSKIEVDKNGKDLKETTVLVAQNGNIKIGQDYKGRVSVPTHPEAVGDASLTVVKLLASDAGLYRCDVMYGIEDTQDTVSLTVDGVVFHYRAATSRYTLNFEAAQKACLDVGAVIATPEQLFAAYEDGFEQCDAGWLADQTVRYPIRAPRVGCYGDKMGKAGVRTYGFRSPQETYDVYCYVDHLDGDVFHLTVPSKFTFEEAAKECENQDARLATVGELQAAWRNGFDQCDYGWLSDASVRHPVTVARAQCGGGLLGVRTLYRFENQTGFPPPDSRFDAYCFKPKEATTIDLSILAETASPSLSKEPQMVSDRTTPIIPLVDELPVIPTEFPPVGNIVSFEQKATVQPQAITDSLATKLPTPTGSTKKPWDMDDYSPSASGPLGKLDISEIKEEVLQSTTGVSHYATDSWDGVVEDKQTQESVTQIEQIEVGPLVTSMEILKHIPSKEFPVTETPLVTARMILESKTEKKMVSTVSELVTTGHYGFTLGEEDDEDRTLTVGSDESTLIFDQIPEVITVSKTSEDTIHTHLEDLESVSASTTVSPLIMPDNNGSSMDDWEERQTSGRITEEFLGKYLSTTPFPSQHRTEIELFPYSGDKILVEGISTVIYPSLQTEMTHRRERTETLIPEMRTDTYTDEIQEEITKSPFMGKTEEEVFSGMKLSTSLSEPIHVTESSVEMTKSFDFPTLITKLSAEPTEVRDMEEDFTATPGTTKYDENITTVLLAHGTLSVEAATVSKWSWDEDNTTSKPLESTEPSASSKLPPALLTTVGMNGKDKDIPSFTEDGADEFTLIPDSTQKQLEEVTDEDIAAHGKFTIRFQPTTSTGIAEKSTLRDSTTEEKVPPITSTEGQVYATMEGSALGEVEDVDLSKPVSTVPQFAHTSEVEGLAFVSYSSTQEPTTYVDSSHTIPLSVIPKTDWGVLVPSVPSEDEVLGEPSQDILVIDQTRLEATISPETMRTTKITEGTTQEEFPWKEQTAEKPVPALSSTAWTPKEAVTPLDEQEGDGSAYTVSEDELLTGSERVPVLETTPVGKIDHSVSYPPGAVTEHKVKTDEVVTLTPRIGPKVSLSPGPEQKYETEGSSTTGFTSSLSPFSTHITQLMEETTTEKTSLEDIDLGSGLFEKPKATELIEFSTIKVTVPSDITTAFSSVDRLHTTSAFKPSSAITKKPPLIDREPGEETTSDMVIIGESTSHVPPTTLEDIVAKETETDIDREYFTTSSPPATQPTRPPTVEDKEAFGPQALSTPQPPASTKFHPDINVYIIEVRENKTGPDRCKMNPCLNGGTCYPTETSYVCTCVPGYSGDQCELDFDECHSNPCRNGATCVDGFNTFRCLCLPSYVGALCEQDTETCDYGWHKFQGQCYKYFAHRRTWDAAERECRLQGAHLTSILSHEEQMFVNRVGHDYQWIGLNDKMFEHDFRWTDGSTLQYENWRPNQPDSFFSAGEDCVVIIWHENGQWNDVPCNYHLTYTCKKGTVACGQPPVVENAKTFGKMKPRYEINSLIRYHCKDGFIQRHLPTIRCLGNGRWAIPKITCMNPSAYQRTYSMKYFKNSSSAKDNSINTSKHDHRWSRRWQESRR

SEQ ID NO: 62255 - DNA, 4929 bp, Artificial Sequence
  derived and/or modified sequence
atgttcatcaacatcaagagcatcctgtggatgtgcagcaccctgatcgtgacccacgccctgcacaaggtgaaggtgggcaagagcccccccgtgagaggcagcctgagcggcaaggtgagcctgccctgccacttcagcaccatgcccaccctgccccccagctacaacaccagcgagttcctgagaatcaagtggagcaagatcgaggtggacaagaacggcaaggacctgaaggagaccaccgtgctggtggcccagaacggcaacatcaagatcggccaggactacaagggcagagtgagcgtgcccacccaccccgaggccgtgggcgacgccagcctgaccgtggtgaagctgctggccagcgacgccggcctgtacagatgcgacgtgatgtacggcatcgaggacacccaggacaccgtgagcctgaccgtggacggcgtggtgttccactacagagccgccaccagcagatacaccctgaacttcgaggccgcccagaaggcctgcctggacgtgggcgccgtgatcgccacccccgagcagctgttcgccgcctacgaggacggcttcgagcagtgcgacgccggctggctggccgaccagaccgtgagataccccatcagagcccccagagtgggctgctacggcgacaagatgggcaaggccggcgtgagaacctacggcttcagaagcccccaggagacctacgacgtgtactgctacgtggaccacctggacggcgacgtgttccacctgaccgtgcccagcaagttcaccttcgaggaggccgccaaggagtgcgagaaccaggacgccagactggccaccgtgggcgagctgcaggccgcctggagaaacggcttcgaccagtgcgactacggctggctgagcgacgccagcgtgagacaccccgtgaccgtggccagagcccagtgcggcggcggcctgctgggcgtgagaaccctgtacagattcgagaaccagaccggcttccccccccccgacagcagattcgacgcctactgcttcaagcccaaggaggccaccaccatcgacctgagcatcctggccgagaccgccagccccagcctgagcaaggagccccagatggtgagcgacagaaccacccccatcatccccctggtggacgagctgcccgtgatccccaccgagttcccccccgtgggcaacatcgtgagcttcgagcagaaggccaccgtgcagccccaggccatcaccgacagcctggccaccaagctgcccacccccaccggcagcaccaagaagccctgggacatggacgactacagccccagcgccagcggccccctgggcaagctggacatcagcgagatcaaggaggaggtgctgcagagcaccaccggcgtgagccactacgccaccgacagctgggacggcgtggtggaggacaagcagacccaggagagcgtgacccagatcgagcagatcgaggtgggccccctggtgaccagcatggagatcctgaagcacatccccagcaaggagttccccgtgaccgagacccccctggtgaccgccagaatgatcctggagagcaagaccgagaagaagatggtgagcaccgtgagcgagctggtgaccaccggccactacggcttcaccctgggcgaggaggacgacgaggacagaaccctgaccgtgggcagcgacgagagcaccctgatcttcgaccagatccccgaggtgatcaccgtgagcaagaccagcgaggacaccatccacacccacctggaggacctggagagcgtgagcgccagcaccaccgtgagccccctgatcatgcccgacaacaacggcagcagcatggacgactgggaggagagacagaccagcggcagaatcaccgaggagttcctgggcaagtacctgagcaccacccccttccccagccagcacagaaccgagatcgagctgttcccctacagcggcgacaagatcctggtggagggcatcagcaccgtgatctaccccagcctgcagaccgagatgacccacagaagagagagaaccgagaccctgatccccgagatgagaaccgacacctacaccgacgagatccaggaggagatcaccaagagccccttcatgggcaagaccgaggaggaggtgttcagcggcatgaagctgagcaccagcctgagcgagcccatccacgtgaccgagagcagcgtggagatgaccaagagcttcgacttccccaccctgatcaccaagctgagcgccgagcccaccgaggtgagagacatggaggaggacttcaccgccacccccggcaccaccaagtacgacgagaacatcaccaccgtgctgctggcccacggcaccctgagcgtggaggccgccaccgtgagcaagtggagctgggacgaggacaacaccaccagcaagcccctggagagcaccgagcccagcgccagcagcaagctgccccccgccctgctgaccaccgtgggcatgaacggcaaggacaaggacatccccagcttcaccgaggacggcgccgacgagttcaccctgatccccgacagcacccagaagcagctggaggaggtgaccgacgaggacatcgccgcccacggcaagttcaccatcagattccagcccaccaccagcaccggcatcgccgagaagagcaccctgagagacagcaccaccgaggagaaggtgccccccatcaccagcaccgagggccaggtgtacgccaccatggagggcagcgccctgggcgaggtggaggacgtggacctgagcaagcccgtgagcaccgtgccccagttcgcccacaccagcgaggtggagggcctggccttcgtgagctacagcagcacccaggagcccaccacctacgtggacagcagccacaccatccccctgagcgtgatccccaagaccgactggggcgtgctggtgcccagcgtgcccagcgaggacgaggtgctgggcgagcccagccaggacatcctggtgatcgaccagaccagactggaggccaccatcagccccgagaccatgagaaccaccaagatcaccgagggcaccacccaggaggagttcccctggaaggagcagaccgccgagaagcccgtgcccgccctgagcagcaccgcctggacccccaaggaggccgtgacccccctggacgagcaggagggcgacggcagcgcctacaccgtgagcgaggacgagctgctgaccggcagcgagagagtgcccgtgctggagaccacccccgtgggcaagatcgaccacagcgtgagctacccccccggcgccgtgaccgagcacaaggtgaagaccgacgaggtggtgaccctgacccccagaatcggccccaaggtgagcctgagccccggccccgagcagaagtacgagaccgagggcagcagcaccaccggcttcaccagcagcctgagccccttcagcacccacatcacccagctgatggaggagaccaccaccgagaagaccagcctggaggacatcgacctgggcagcggcctgttcgagaagcccaaggccaccgagctgatcgagttcagcaccatcaaggtgaccgtgcccagcgacatcaccaccgccttcagcagcgtggacagactgcacaccaccagcgccttcaagcccagcagcgccatcaccaagaagccccccctgatcgacagagagcccggcgaggagaccaccagcgacatggtgatcatcggcgagagcaccagccacgtgccccccaccaccctggaggacatcgtggccaaggagaccgagaccgacatcgacagagagtacttcaccaccagcagcccccccgccacccagcccaccagaccccccaccgtggaggacaaggaggccttcggcccccaggccctgagcaccccccagccccccgccagcaccaagttccaccccgacatcaacgtgtacatcatcgaggtgagagagaacaagaccggccccgacagatgcaagatgaacccctgcctgaacggcggcacctgctaccccaccgagaccagctacgtgtgcacctgcgtgcccggctacagcggcgaccagtgcgagctggacttcgacgagtgccacagcaacccctgcagaaacggcgccacctgcgtggacggcttcaacaccttcagatgcctgtgcctgcccagctacgtgggcgccctgtgcgagcaggacaccgagacctgcgactacggctggcacaagttccagggccagtgctacaagtacttcgcccacagaagaacctgggacgccgccgagagagagtgcagactgcagggcgcccacctgaccagcatcctgagccacgaggagcagatgttcgtgaacagagtgggccacgactaccagtggatcggcctgaacgacaagatgttcgagcacgacttcagatggaccgacggcagcaccctgcagtacgagaactggagacccaaccagcccgacagcttcttcagcgccggcgaggactgcgtggtgatcatctggcacgagaacggccagtggaacgacgtgccctgcaactaccacctgacctacacctgcaagaagggcaccgtggcctgcggccagccccccgtggtggagaacgccaagaccttcggcaagatgaagcccagatacgagatcaacagcctgatcagataccactgcaaggacggcttcatccagagacacctgcccaccatcagatgcctgggcaacggcagatgggccatccccaagatcacctgcatgaaccccagcgcctaccagagaacctacagcatgaagtacttcaagaacagcagcagcgccaaggacaacagcatcaacaccagcaagcacgaccacagatggagcagaagatggcaggagagcagaagatag

SEQ ID NO: 62256 - DNA, 4785 bp, Artificial Sequence
  derived and/or modified sequence
atgcccaccctgccccccagctacaacaccagcgagttcctgagaatcaagtggagcaagatcgaggtggacaagaacggcaaggacctgaaggagaccaccgtgctggtggcccagaacggcaacatcaagatcggccaggactacaagggcagagtgagcgtgcccacccaccccgaggccgtgggcgacgccagcctgaccgtggtgaagctgctggccagcgacgccggcctgtacagatgcgacgtgatgtacggcatcgaggacacccaggacaccgtgagcctgaccgtggacggcgtggtgttccactacagagccgccaccagcagatacaccctgaacttcgaggccgcccagaaggcctgcctggacgtgggcgccgtgatcgccacccccgagcagctgttcgccgcctacgaggacggcttcgagcagtgcgacgccggctggctggccgaccagaccgtgagataccccatcagagcccccagagtgggctgctacggcgacaagatgggcaaggccggcgtgagaacctacggcttcagaagcccccaggagacctacgacgtgtactgctacgtggaccacctggacggcgacgtgttccacctgaccgtgcccagcaagttcaccttcgaggaggccgccaaggagtgcgagaaccaggacgccagactggccaccgtgggcgagctgcaggccgcctggagaaacggcttcgaccagtgcgactacggctggctgagcgacgccagcgtgagacaccccgtgaccgtggccagagcccagtgcggcggcggcctgctgggcgtgagaaccctgtacagattcgagaaccagaccggcttccccccccccgacagcagattcgacgcctactgcttcaagcccaaggaggccaccaccatcgacctgagcatcctggccgagaccgccagccccagcctgagcaaggagccccagatggtgagcgacagaaccacccccatcatccccctggtggacgagctgcccgtgatccccaccgagttcccccccgtgggcaacatcgtgagcttcgagcagaaggccaccgtgcagccccaggccatcaccgacagcctggccaccaagctgcccacccccaccggcagcaccaagaagccctgggacatggacgactacagccccagcgccagcggccccctgggcaagctggacatcagcgagatcaaggaggaggtgctgcagagcaccaccggcgtgagccactacgccaccgacagctgggacggcgtggtggaggacaagcagacccaggagagcgtgacccagatcgagcagatcgaggtgggccccctggtgaccagcatggagatcctgaagcacatccccagcaaggagttccccgtgaccgagacccccctggtgaccgccagaatgatcctggagagcaagaccgagaagaagatggtgagcaccgtgagcgagctggtgaccaccggccactacggcttcaccctgggcgaggaggacgacgaggacagaaccctgaccgtgggcagcgacgagagcaccctgatcttcgaccagatccccgaggtgatcaccgtgagcaagaccagcgaggacaccatccacacccacctggaggacctggagagcgtgagcgccagcaccaccgtgagccccctgatcatgcccgacaacaacggcagcagcatggacgactgggaggagagacagaccagcggcagaatcaccgaggagttcctgggcaagtacctgagcaccacccccttccccagccagcacagaaccgagatcgagctgttcccctacagcggcgacaagatcctggtggagggcatcagcaccgtgatctaccccagcctgcagaccgagatgacccacagaagagagagaaccgagaccctgatccccgagatgagaaccgacacctacaccgacgagatccaggaggagatcaccaagagccccttcatgggcaagaccgaggaggaggtgttcagcggcatgaagctgagcaccagcctgagcgagcccatccacgtgaccgagagcagcgtggagatgaccaagagcttcgacttccccaccctgatcaccaagctgagcgccgagcccaccgaggtgagagacatggaggaggacttcaccgccacccccggcaccaccaagtacgacgagaacatcaccaccgtgctgctggcccacggcaccctgagcgtggaggccgccaccgtgagcaagtggagctgggacgaggacaacaccaccagcaagcccctggagagcaccgagcccagcgccagcagcaagctgccccccgccctgctgaccaccgtgggcatgaacggcaaggacaaggacatccccagcttcaccgaggacggcgccgacgagttcaccctgatccccgacagcacccagaagcagctggaggaggtgaccgacgaggacatcgccgcccacggcaagttcaccatcagattccagcccaccaccagcaccggcatcgccgagaagagcaccctgagagacagcaccaccgaggagaaggtgccccccatcaccagcaccgagggccaggtgtacgccaccatggagggcagcgccctgggcgaggtggaggacgtggacctgagcaagcccgtgagcaccgtgccccagttcgcccacaccagcgaggtggagggcctggccttcgtgagctacagcagcacccaggagcccaccacctacgtggacagcagccacaccatccccctgagcgtgatccccaagaccgactggggcgtgctggtgcccagcgtgcccagcgaggacgaggtgctgggcgagcccagccaggacatcctggtgatcgaccagaccagactggaggccaccatcagccccgagaccatgagaaccaccaagatcaccgagggcaccacccaggaggagttcccctggaaggagcagaccgccgagaagcccgtgcccgccctgagcagcaccgcctggacccccaaggaggccgtgacccccctggacgagcaggagggcgacggcagcgcctacaccgtgagcgaggacgagctgctgaccggcagcgagagagtgcccgtgctggagaccacccccgtgggcaagatcgaccacagcgtgagctacccccccggcgccgtgaccgagcacaaggtgaagaccgacgaggtggtgaccctgacccccagaatcggccccaaggtgagcctgagccccggccccgagcagaagtacgagaccgagggcagcagcaccaccggcttcaccagcagcctgagccccttcagcacccacatcacccagctgatggaggagaccaccaccgagaagaccagcctggaggacatcgacctgggcagcggcctgttcgagaagcccaaggccaccgagctgatcgagttcagcaccatcaaggtgaccgtgcccagcgacatcaccaccgccttcagcagcgtggacagactgcacaccaccagcgccttcaagcccagcagcgccatcaccaagaagccccccctgatcgacagagagcccggcgaggagaccaccagcgacatggtgatcatcggcgagagcaccagccacgtgccccccaccaccctggaggacatcgtggccaaggagaccgagaccgacatcgacagagagtacttcaccaccagcagcccccccgccacccagcccaccagaccccccaccgtggaggacaaggaggccttcggcccccaggccctgagcaccccccagccccccgccagcaccaagttccaccccgacatcaacgtgtacatcatcgaggtgagagagaacaagaccggccccgacagatgcaagatgaacccctgcctgaacggcggcacctgctaccccaccgagaccagctacgtgtgcacctgcgtgcccggctacagcggcgaccagtgcgagctggacttcgacgagtgccacagcaacccctgcagaaacggcgccacctgcgtggacggcttcaacaccttcagatgcctgtgcctgcccagctacgtgggcgccctgtgcgagcaggacaccgagacctgcgactacggctggcacaagttccagggccagtgctacaagtacttcgcccacagaagaacctgggacgccgccgagagagagtgcagactgcagggcgcccacctgaccagcatcctgagccacgaggagcagatgttcgtgaacagagtgggccacgactaccagtggatcggcctgaacgacaagatgttcgagcacgacttcagatggaccgacggcagcaccctgcagtacgagaactggagacccaaccagcccgacagcttcttcagcgccggcgaggactgcgtggtgatcatctggcacgagaacggccagtggaacgacgtgccctgcaactaccacctgacctacacctgcaagaagggcaccgtggcctgcggccagccccccgtggtggagaacgccaagaccttcggcaagatgaagcccagatacgagatcaacagcctgatcagataccactgcaaggacggcttcatccagagacacctgcccaccatcagatgcctgggcaacggcagatgggccatccccaagatcacctgcatgaaccccagcgcctaccagagaacctacagcatgaagtacttcaagaacagcagcagcgccaaggacaacagcatcaacaccagcaagcacgaccacagatggagcagaagatggcaggagagcagaagatag

SEQ ID NO: 62257 - DNA, 4929 bp, Artificial Sequence
  derived and/or modified sequence
atgttcattaatatcaagtctatcctctggatgtgcagcacgttgatagttacccacgcactccacaaagtgaaagtcggcaaatccccacctgtgaggggctccttaagtggaaaggtgtcgctcccttgtcatttttctacgatgcccaccctccctcccagttacaatacctcagaatttttgaggatcaagtggtctaaaatcgaagtagataagaacggaaaagaccttaaagaaactacggtgctggtcgctcagaatgggaatatcaaaattgggcaggattacaagggtagggtgagcgtgcccacacatcctgaggcggtcggggacgcgtctctgaccgtggtgaagcttctcgcttctgacgcaggcttgtaccggtgcgacgtcatgtatggtattgaggacacacaagacactgtcagcttgaccgtggatggagttgtgttccactatcgcgcggcgacatctcgttacactttgaacttcgaggccgcccagaaagcgtgtttagatgtgggcgcagtcatcgccacccccgagcagcttttcgctgcctacgaagatgggtttgagcagtgcgacgccggatggttggctgaccaaacagtccggtacccaatacgggcccccagggtgggttgttacggggacaaaatgggcaaggccggggtcagaacctatggtttccgttctccccaagaaacctacgacgtttactgctatgtggaccacttagatggtgatgtttttcatctgaccgtgcctagcaagttcaccttcgaagaggccgcaaaggaatgcgaaaatcaggatgcgcgactggcaacagtgggtgagctccaagccgcctggcgtaatggttttgatcagtgcgactatggctggcttagtgatgcctcggtgagacaccccgtcacagttgcaagagctcagtgtggtggcggcctgcttggcgttaggaccctttatagattcgagaaccagaccggcttcccaccacctgacagtaggttcgacgcatactgtttcaaacctaaagaggcgacgaccatcgatctctcaatcctggccgagacagctagtccctccctatctaaggaacctcagatggtttcagaccgtacaacgcccattattcccctcgtggacgagctccccgttattcctaccgagttccccccagtaggcaacattgtttcgttcgagcagaaagctactgtacagccacaggccatcaccgactcgctcgcaacgaagctacctacaccaacaggatctaccaaaaagccttgggacatggatgactactccccttccgctagcggcccgctgggcaagctggatatttctgagattaaagaggaagtattacagagcacgacgggggtctcacactatgccaccgacagttgggacggtgtggtagaggacaagcagacacaggagtcggtcacacagatcgagcagatagaagttggacccttagtcacaagtatggagattctgaagcacattcccagcaaagaattccctgtgacagagaccccccttgtgactgcccggatgatcctggaatccaagactgagaaaaagatggtttcaactgtgtcagagctcgtcacgacaggccactacggcttcacgctgggagaagaagatgatgaggatagaacgctaacagttggttcagatgagagcacgctaatctttgaccagatcccagaggttataacagtgtctaaaacgtccgaagacacaattcacactcatctcgaagacctggaaagcgtgtctgcatctactactgtctctccacttattatgcctgacaataatggctcgagcatggacgattgggaggaaagacagacctctggtcgcattacagaggagttcctgggcaaatacctgtccaccaccccttttcccagccagcaccgtaccgagatcgaactttttccctactccggtgataaaatcctcgttgagggtatttccacagttatttatccttccctccagactgagatgacccatcgtagggaacggacagagactctcatccctgaaatgcggactgatacctacaccgacgagatacaggaggaaattactaagagtccgttcatgggaaaaaccgaagaggaagtgtttagcgggatgaagctatccacgagcctatcagaaccaattcatgtcaccgaatcctccgtggagatgaccaagtctttcgacttcccaactctgattaccaaactcagtgccgaacccactgaggttcgggatatggaagaagacttcacagccacacctggtacaaccaagtacgatgagaatattactacggttctgctggctcacggcactctgagtgtggaagccgcaactgtgagcaagtggtcatgggatgaagacaatactacctccaagcccctcgagtccaccgaaccatctgccagctctaagcttccacctgccctgctgaccacagttgggatgaatggcaaagacaaggatattcccagctttacggaggacggagcagacgagttcacccttataccagactctacacagaagcagctggaggaggttaccgatgaggacatagctgcccatggcaaattcaccatcaggtttcaaccgaccacttccaccggtatcgccgagaaatctaccctccgtgactctacaaccgaggagaaagttcccccgattacatctacagaggggcaggtctacgcaaccatggaaggatctgctctcggcgaggtggaggacgtggacttgtcgaagcctgtatccactgtgccccagttcgctcatacttctgaggtggaaggactggctttcgtgtcttattcaagcacacaggagccaacaacctatgtagacagcagtcacaccattcctctcagtgtgatacctaaaaccgactggggagtgcttgtgccgtccgtaccaagtgaagacgaggttcttggggagcccagtcaagatatacttgtcatcgatcagacccgactggaagccactataagtcccgagaccatgagaactactaaaattaccgagggtacaacgcaggaggagtttccgtggaaagagcaaacggcggagaagccagtacctgcccttagctctaccgcctggactcccaaggaggctgtgacacctctggatgaacaggagggcgacgggtcagcctacaccgtgtccgaagacgagctgctcaccggatctgagcgagtgcctgtgctggaaaccaccccagtcgggaaaatcgatcacagtgttagctatcctcccggtgccgtcaccgagcacaaggtcaagaccgatgaggtggtgactttgacacctcgcatcggccccaaggtgtctttgagccccggtcccgagcagaagtatgagacggaaggaagtagcacaacaggctttactagcagtctctcgcctttcagcacacacataacccagcttatggaagaaaccacgactgagaagacctccctggaagatattgacctggggtcaggcctctttgagaagccaaaggccacagaactgatcgagttttccaccatcaaggtcacagtgcctagtgacataacaactgcattcagctctgtcgatagacttcacaccacgtccgccttcaaaccatcatcagctatcaccaagaaaccgccgttaatagaccgggagccaggcgaagagaccacctcggacatggtgataataggcgaatccactagccatgtcccccctaccaccttggaagacatagtggcaaaggaaaccgagaccgacatcgacagagaatactttaccacaagtagccccccagctacacagcccaccagaccccccaccgtcgaggacaaggaagcatttgggcctcaggcgctgagcactccccaaccccctgcctctacaaagttccacccggatatcaatgtgtacattatcgaggtgcgcgaaaacaagaccggaccagaccggtgtaaaatgaacccttgccttaatggaggcacatgctaccccacagagacctcctatgtctgcacttgcgtgcctggatattccggtgatcagtgcgagcttgattttgatgagtgccactctaacccctgtcgaaacggtgctacctgtgtagatgggttcaatactttcagatgcctttgcctgcctagttatgtaggagctctgtgtgaacaggacaccgaaacctgtgattatggatggcacaaatttcaaggccaatgctacaaatacttcgcacacagacggacctgggacgcagcagagcgagagtgtcgcctgcagggagcccacttaacatccatcctgtcacacgaagaacaaatgtttgtcaacagggtgggccacgattaccagtggattggcctcaacgataagatgtttgaacacgacttcaggtggaccgacgggagtaccctgcagtatgagaattggagaccaaaccagcccgactctttctttagtgcaggcgaagactgcgtggtgatcatctggcacgagaatgggcaatggaatgatgtgccctgtaattaccatctgacatacacctgcaagaagggcacagttgcttgtgggcagccccccgtcgtggagaatgcaaaaacattcggcaagatgaagcctagatacgagattaattctctgatccgatatcattgtaaagacggttttattcaaagacatcttcctacaattcggtgtctcggcaatggccgatgggcaattcctaaaatcacctgtatgaaccctagtgcttaccaaaggacctactccatgaaatattttaagaactctagttccgcgaaggacaattccattaatacaagtaaacatgatcatcggtggtcacggaggtggcaagagtcccgccgttag

SEQ ID NO: 62258 - DNA, 4785 bp, Artificial Sequence
  derived and/or modified sequence
atgccgaccttacctccttcgtacaacactagtgagtttctgcgcattaaatggtccaagatcgaagttgacaagaacggcaaggatctaaaagagactaccgtgttggtggcccagaatggtaacataaaaatcggtcaggactataaagggcgggttagtgtgcctacccatccggaggcggtcggcgatgccagcctgaccgtggttaaactgcttgccagtgacgcaggtctgtatcgctgtgatgtgatgtatggaatcgaggacacccaagacactgtcagtctgaccgtggatggggtggtattccactatcgggctgcaacatctcgatataccttgaattttgaggccgcccaaaaggcatgtttggatgttggcgcagtgatcgcaacaccagagcagctcttcgccgcgtatgaagatggtttcgagcaatgtgacgctggctggctagctgatcagactgttagatacccaataagggcccctcgcgtaggttgttatggcgacaagatggggaaggctggtgttagaacttacggctttaggtcaccccaggagacctatgacgtatattgttacgtggaccatctggacggggacgtgttccacctgacagtgcccagtaagttcacttttgaggaagctgcaaaagaatgcgagaaccaggacgctaggctcgccaccgtgggtgagctgcaggctgcatggagaaacgggtttgatcagtgcgactacggatggttgtccgacgcttcagtgcgacaccccgtgacagtggcaagggcacagtgcggtggcgggctactgggcgtgcgtaccctgtacagatttgaaaatcaaacaggctttccccccccagatagccggtttgacgcttactgtttcaaacctaaggaagccacaaccattgatctgagtattctcgccgagactgccagcccgtcactgagcaaagaacctcagatggtgtccgaccgaacgactccaatcatccctctggtcgacgagctacccgttattcccactgaattccctccggtggggaacatagtatcatttgagcagaaggctaccgttcagccacaggctatcacagattccctggcaactaagttgccaactcctaccggttctactaaaaaaccgtgggacatggacgattattctccatctgcctccggcccgctagggaaattagacatatctgagattaaggaggaggttctgcaatctacgacaggagtatcccactatgcaacggactcctgggacggcgtcgtggaggacaagcagacacaagagagcgtcactcagatcgaacagattgaggtggggcctctggtgacatccatggagatccttaaacacatcccttcaaaggagttccctgtgaccgaaaccccgcttgtaacggctcggatgatactcgagtccaaaaccgagaaaaagatggtgtctacggtgtctgagctcgtcacaacggggcactatggatttaccctcggtgaggaggacgacgaggatagaactctcaccgtcggttccgacgaatccacattgatcttcgaccagatccctgaggtgatcacagtgtccaagacgagtgaagacacaatccatactcatctggaggatctggaatccgtttcagcatctaccaccgtgtcacccttgatcatgcctgataacaacgggtcttcaatggatgactgggaagaacgacaaacttctgggagaattactgaagagtttctaggcaagtacctgagcacaaccccctttccctcccaacacaggactgagattgagcttttcccctattccggagacaaaattctggtggaaggtatcagcacagtgatctacccttcgttgcagaccgagatgactcaccgccgtgaacgcacagagacattgatccccgagatgcgaaccgacacatacacagatgagattcaggaagagattactaaatcgcccttcatgggaaagaccgaagaggaggtattctccgggatgaagctgtcgacctccctgtccgaaccaatccacgtgacagagtcctccgtggagatgactaagtcgtttgatttccctacgctgattaccaaactgtcagccgagcccacagaagtgagggacatggaagaagattttaccgcaacccctggaactacgaaatacgatgaaaacattaccacagtgctactagcacatggcaccctgagcgtcgaggcagctaccgtgagtaaatggagttgggatgaggacaacactacgagcaagccgctcgagtccacagagccgagcgctagcagcaagttgcctccagccctcttgacaactgtcggaatgaatggaaaagataaagacattccttcattcaccgaggacggcgcagatgaatttactcttatcccagattccacccagaagcagctggaagaggtcaccgacgaggatatcgccgcgcatggaaaatttacaatccgtttccaaccaacgacttcaacgggcatagcagagaagagcaccctgagagactcgactaccgaggagaaagtgccgccgattacaagcaccgagggccaggtgtacgccaccatggaaggttccgccttgggggaagtcgaagatgtagacctgagtaaacctgtttccactgtgccgcagtttgcacatacaagtgaagtagaggggttagcttttgtctcttactcttctacccaggagccaaccacttatgtagacagctcacacaccatccccctgtcagttatacccaaaactgactggggagtgctggtgccttccgtgccttcagaggacgaagtacttggagagccaagccaggatattctggtcatcgaccagacgcgcctggaggctacaattagcccagagaccatgagaactacaaagatcactgaaggcacgacccaagaagaatttccatggaaggagcaaacagccgaaaaaccggttcccgccctgtcttctaccgcctggaccccaaaggaagcggttacacctctggacgagcaggagggcgacggctcggcctacaccgtaagtgaggacgaactcctcacagggtcagagagggtgcctgtactcgaaaccactccagtgggaaaaattgatcacagcgtgtcataccctccaggcgccgtgacagagcacaaagttaaaactgatgaagttgtcacgctgacccctcgcattggtcccaaagtctcactgtcacccggaccagaacagaaatacgaaaccgagggcagctccactacaggcttcacttcctctttgagccccttctccacacacatcacgcagctcatggaggagactacgactgaaaagacttccctcgaggacatcgacctggggagcggattatttgaaaagcctaaggcgacggagctaatagagttctccaccattaaggttacggtgccctctgatatcactaccgcattcagttctgtggaccggctgcatactaccagcgcctttaagccatcttctgcaattacgaagaagccccctctgattgaccgggagccaggagaagagacaacctccgacatggtgataatcggcgagagcacatctcacgtcccccctaccactctggaggacatcgtggccaaagaaacggagactgatattgatcgggagtactttacaacctccagcccacctgctacgcagcctacccgcccccctaccgtggaggataaggaagccttcggtccccaggccctgtccacgcctcagccacctgctagcaccaagttccaccctgatattaacgtctacatcattgaggtgcgcgaaaataagacaggcccggatagatgtaaaatgaatccttgcctgaatggtggcacttgctaccccaccgaaacctcttacgtttgcacgtgcgttcccggctattccggtgatcaatgcgagctcgatttcgatgaatgccactctaatccatgtaggaatggtgccacgtgtgtcgatggcttcaacacattcagatgtctgtgtctcccatcctatgtgggggctctgtgtgagcaggacaccgagacttgcgactacggatggcataagtttcagggccaatgttacaaatacttcgctcatcggcgcacgtgggacgctgctgaacgagagtgccgccttcaaggcgcgcacttaacctccatcttgtcccacgaagaacagatgttcgtaaacagagtgggccatgattaccagtggattggcctgaatgacaagatgttcgaacatgatttcagatggacagatggatccactctgcagtacgagaactggcgtccaaatcagcccgactcgttttttagcgcaggtgaggactgcgttgtgatcatttggcacgagaacggccagtggaacgacgtgccctgcaattaccatttaacttatacatgcaagaagggcactgtggcttgtggacagccccccgtagtcgagaacgccaagacatttggaaagatgaagccccggtatgaaatcaatagcctgattcgctatcattgcaaagacggctttatccaaaggcatttgcccacgattcggtgccttggaaacggaagatgggccatccctaaaataacttgtatgaatccctcagcttatcaacgaacatactcgatgaaatatttcaagaacagttcatcagctaaggataactcgattaatacctccaagcacgaccaccggtggtcgcggcgctggcaggagtcccgtaggtag

SEQ ID NO: 62259 - DNA, 4929 bp, Artificial Sequence
  derived and/or modified sequence
atgttcatcaacatcaagagcatcctgtggatgtgcagcaccctcatcgtgacccacgccctgcacaaggtgaaggtgggcaagagcccccctgtgcggggcagcctgagcggcaaggtgtccctgccctgccacttcagcaccatgcccaccctgcccccatcctacaacaccagcgagttcctgcgcatcaagtggagcaagattgaggtggacaagaatggcaaggacctgaaggagaccaccgtgctggtggcccagaatggaaacatcaagattggccaggactacaagggccgggtgtctgtgcccacccaccctgaggccgtgggagatgccagcctgactgtggtgaagctgctggccagtgatgctggcctgtaccgctgtgatgtgatgtatggaattgaggacacccaggacacagtgtccctgactgtggatggagtggtgttccactaccgggccgccaccagccgctacaccctgaactttgaagctgcccagaaggcctgcctggatgtgggcgctgtgattgccaccccagagcagctgtttgctgcctatgaagatggctttgagcagtgtgatgctggctggctggccgaccagacagtgcgctaccccatccgggccccccgggtgggctgctacggggacaagatgggcaaggccggcgtgaggacctacggcttccgcagcccccaggagacctatgatgtgtactgctacgtggaccacctggatggagatgtgttccacctgactgtgcccagcaagttcacctttgaggaggccgccaaggaatgtgagaaccaggatgcccggctggccaccgtgggggagctgcaggccgcctggagaaatggatttgaccagtgtgactatggctggctgagtgatgcctctgtgcgccaccctgtgacagtggcccgggcccagtgtggcggcggcctgctgggcgtgaggaccctgtacagatttgagaaccagacaggcttccccccaccagacagcagatttgatgcctactgcttcaagcccaaggaggccaccaccatcgacctgagcatcctggccgagacagccagccccagcctgagcaaggagccccagatggtgtctgacaggaccacccccatcatccccctggtggatgagctgcctgtgatccccacagagttcccccctgtgggcaacatcgtgtcctttgagcagaaggccaccgtgcagccccaggccatcacagacagcctggccaccaagctgcccacccccaccggcagcaccaagaagccctgggacatggatgactacagccccagcgccagcggccccctgggcaagctggacatcagcgagatcaaggaggaggtgctgcagagcaccaccggggtgagccactacgccacagacagctgggatggagtggtggaggacaagcagacccaggagagcgtgacccagatcgagcagatcgaggtgggccccctggtgacctccatggagatcctgaagcacatccccagcaaggagttccctgtgacagagacccccctggtgacagccaggatgatcctggagagcaagacagagaagaagatggtgtccacagtgtctgagctggtgaccaccggccactacggcttcaccctgggggaggaggatgatgaggacaggaccctgactgtgggcagtgatgagagcaccctcatctttgaccagatccctgaggtgatcaccgtgtccaagaccagcgaggacaccatccacacccacctggaggacctggagagcgtgtctgccagcaccaccgtgagccccctcatcatgccagacaacaacggcagctccatggatgactgggaggagcggcagaccagcggccgcatcacagaggagttcctgggcaagtacctgagcaccacccccttccccagccagcacaggacagaaattgagctgttcccctacagcggggacaagatcctggtggagggcatcagcaccgtcatctaccccagcctgcagacagagatgacccacagaagagagaggacagagaccctcatccctgagatgaggacagacacctacacagatgagatccaggaggagatcaccaagagccccttcatgggcaagacagaggaggaggtgttcagcggcatgaagctgagcaccagcctgtctgagcccatccacgtgacagagagctctgtggagatgaccaagagctttgacttccccaccctcatcaccaagctgtctgctgagcccacagaggtgcgggacatggaggaggacttcaccgccaccccaggcaccaccaagtatgatgagaacatcaccaccgtgctgctggcccacggcaccctgtctgtggaggccgccaccgtgtccaagtggagctgggatgaggacaacaccaccagcaagcccctggagagcacagagcccagcgccagcagcaagctgcccccagccctgctgaccaccgtgggcatgaatggcaaggacaaggacatccccagcttcacagaagatggagcagatgagttcaccctcatcccagacagcacccagaagcagctggaggaggtgacagatgaagatattgctgcccacggcaagttcaccatccgcttccagcccaccaccagcactggaattgctgagaagagcaccctgcgggacagcaccacagaggagaaggtgccccccatcaccagcacagagggccaggtgtatgccaccatggagggcagcgccctgggggaggtggaggatgtggacctgagcaagcctgtgtccacagtgccccagtttgcccacaccagcgaggtggagggcctggcctttgtgtcctacagcagcacccaggagcccaccacctacgtggacagcagccacaccatccccctgagcgtcatccccaagacagactggggcgtgctggtgcccagcgtgcccagtgaagatgaggtgctgggggagcccagccaggacatcctggtgattgaccagacccggctggaggccaccatcagccctgagaccatgaggaccaccaagatcacagagggcaccacccaggaggagttcccctggaaggagcagacagctgagaagcctgtgcctgccctgagcagcacagcctggacccccaaggaggccgtgacccccctggatgagcaggagggagatggcagcgcctacacagtgtctgaagatgagctgctgaccggcagcgagcgggtgcctgtgctggagaccacccctgtgggcaagattgaccacagcgtgtcctacccacctggagctgtgacagagcacaaggtgaagacagatgaggtggtgaccctgaccccccgcatcggccccaaggtgtccctgagccctggccctgagcagaagtatgaaacagagggcagcagcaccaccggcttcaccagcagcctgagccccttcagcacccacatcacccagctgatggaggagaccaccacagagaagaccagcctggaggacatcgacctgggcagcggcctgtttgagaagcccaaggccacagagctgattgagttcagcaccatcaaggtgacagtgcccagcgacatcaccacagccttcagctctgtggaccggctgcacaccaccagcgccttcaagcccagcagcgccatcaccaagaagccacccctgattgaccgggagcccggggaggagaccaccagtgacatggtgatcattggagagagcaccagccacgtgccccccaccaccctggaggacatcgtggccaaggagacagaaacagacatcgaccgggagtacttcaccaccagcagccccccagccacccagcccacccggcccccaacagtggaggacaaggaggccttcggcccccaggccctgagcaccccccagcccccagccagcaccaagttccacccagacatcaacgtgtacatcatcgaggtgcgggagaacaagacaggccctgaccgctgcaagatgaacccctgcctgaatggaggcacctgctaccccacagagaccagctatgtgtgcacctgtgtgcccggctacagcggggaccagtgtgagctggactttgatgagtgccacagcaacccctgcagaaatggagccacctgtgtggatggcttcaacaccttccgctgcctgtgcctgcccagctatgtgggcgccctgtgtgagcaggacacagagacctgtgactatggctggcacaagttccagggccagtgctacaagtactttgcccacaggaggacctgggatgctgctgagcgggagtgccgcctgcagggcgcccacctgaccagcatcctgagccatgaggagcagatgtttgtgaacagagtgggccatgactaccagtggattggcctgaatgacaagatgtttgaacatgacttccgctggacagatggcagcaccctgcagtatgagaactggaggcccaaccagcctgacagcttcttctctgctggggaggactgtgtggtgatcatctggcatgaaaatggccagtggaatgatgtgccctgcaactaccacctgacctacacctgcaagaagggcaccgtggcctgtggccagccccctgtggtggagaatgccaagaccttcggcaagatgaagcccaggtatgagatcaacagcctcatccgctaccactgcaaggatggcttcatccagaggcacctgcccaccatccgctgcctgggcaatggccgctgggccatccccaagatcacctgcatgaaccccagcgcctaccagaggacctacagcatgaagtacttcaagaacagcagcagcgccaaggacaacagcatcaacaccagcaagcatgaccaccgctggagccgccgctggcaggagagcagaagatag

SEQ ID NO: 62260 - DNA, 4785 bp, Artificial Sequence
  derived and/or modified sequence
atgcccaccctgcccccatcctacaacaccagcgagttcctgcgcatcaagtggagcaagattgaggtggacaagaatggcaaggacctgaaggagaccaccgtgctggtggcccagaatggaaacatcaagattggccaggactacaagggccgggtgtctgtgcccacccaccctgaggccgtgggagatgccagcctgactgtggtgaagctgctggccagtgatgctggcctgtaccgctgtgatgtgatgtatggaattgaggacacccaggacacagtgtccctgactgtggatggagtggtgttccactaccgggccgccaccagccgctacaccctgaactttgaagctgcccagaaggcctgcctggatgtgggcgctgtgattgccaccccagagcagctgtttgctgcctatgaagatggctttgagcagtgtgatgctggctggctggccgaccagacagtgcgctaccccatccgggccccccgggtgggctgctacggggacaagatgggcaaggccggcgtgaggacctacggcttccgcagcccccaggagacctatgatgtgtactgctacgtggaccacctggatggagatgtgttccacctgactgtgcccagcaagttcacctttgaggaggccgccaaggaatgtgagaaccaggatgcccggctggccaccgtgggggagctgcaggccgcctggagaaatggatttgaccagtgtgactatggctggctgagtgatgcctctgtgcgccaccctgtgacagtggcccgggcccagtgtggcggcggcctgctgggcgtgaggaccctgtacagatttgagaaccagacaggcttccccccaccagacagcagatttgatgcctactgcttcaagcccaaggaggccaccaccatcgacctgagcatcctggccgagacagccagccccagcctgagcaaggagccccagatggtgtctgacaggaccacccccatcatccccctggtggatgagctgcctgtgatccccacagagttcccccctgtgggcaacatcgtgtcctttgagcagaaggccaccgtgcagccccaggccatcacagacagcctggccaccaagctgcccacccccaccggcagcaccaagaagccctgggacatggatgactacagccccagcgccagcggccccctgggcaagctggacatcagcgagatcaaggaggaggtgctgcagagcaccaccggggtgagccactacgccacagacagctgggatggagtggtggaggacaagcagacccaggagagcgtgacccagatcgagcagatcgaggtgggccccctggtgacctccatggagatcctgaagcacatccccagcaaggagttccctgtgacagagacccccctggtgacagccaggatgatcctggagagcaagacagagaagaagatggtgtccacagtgtctgagctggtgaccaccggccactacggcttcaccctgggggaggaggatgatgaggacaggaccctgactgtgggcagtgatgagagcaccctcatctttgaccagatccctgaggtgatcaccgtgtccaagaccagcgaggacaccatccacacccacctggaggacctggagagcgtgtctgccagcaccaccgtgagccccctcatcatgccagacaacaacggcagctccatggatgactgggaggagcggcagaccagcggccgcatcacagaggagttcctgggcaagtacctgagcaccacccccttccccagccagcacaggacagaaattgagctgttcccctacagcggggacaagatcctggtggagggcatcagcaccgtcatctaccccagcctgcagacagagatgacccacagaagagagaggacagagaccctcatccctgagatgaggacagacacctacacagatgagatccaggaggagatcaccaagagccccttcatgggcaagacagaggaggaggtgttcagcggcatgaagctgagcaccagcctgtctgagcccatccacgtgacagagagctctgtggagatgaccaagagctttgacttccccaccctcatcaccaagctgtctgctgagcccacagaggtgcgggacatggaggaggacttcaccgccaccccaggcaccaccaagtatgatgagaacatcaccaccgtgctgctggcccacggcaccctgtctgtggaggccgccaccgtgtccaagtggagctgggatgaggacaacaccaccagcaagcccctggagagcacagagcccagcgccagcagcaagctgcccccagccctgctgaccaccgtgggcatgaatggcaaggacaaggacatccccagcttcacagaagatggagcagatgagttcaccctcatcccagacagcacccagaagcagctggaggaggtgacagatgaagatattgctgcccacggcaagttcaccatccgcttccagcccaccaccagcactggaattgctgagaagagcaccctgcgggacagcaccacagaggagaaggtgccccccatcaccagcacagagggccaggtgtatgccaccatggagggcagcgccctgggggaggtggaggatgtggacctgagcaagcctgtgtccacagtgccccagtttgcccacaccagcgaggtggagggcctggcctttgtgtcctacagcagcacccaggagcccaccacctacgtggacagcagccacaccatccccctgagcgtcatccccaagacagactggggcgtgctggtgcccagcgtgcccagtgaagatgaggtgctgggggagcccagccaggacatcctggtgattgaccagacccggctggaggccaccatcagccctgagaccatgaggaccaccaagatcacagagggcaccacccaggaggagttcccctggaaggagcagacagctgagaagcctgtgcctgccctgagcagcacagcctggacccccaaggaggccgtgacccccctggatgagcaggagggagatggcagcgcctacacagtgtctgaagatgagctgctgaccggcagcgagcgggtgcctgtgctggagaccacccctgtgggcaagattgaccacagcgtgtcctacccacctggagctgtgacagagcacaaggtgaagacagatgaggtggtgaccctgaccccccgcatcggccccaaggtgtccctgagccctggccctgagcagaagtatgaaacagagggcagcagcaccaccggcttcaccagcagcctgagccccttcagcacccacatcacccagctgatggaggagaccaccacagagaagaccagcctggaggacatcgacctgggcagcggcctgtttgagaagcccaaggccacagagctgattgagttcagcaccatcaaggtgacagtgcccagcgacatcaccacagccttcagctctgtggaccggctgcacaccaccagcgccttcaagcccagcagcgccatcaccaagaagccacccctgattgaccgggagcccggggaggagaccaccagtgacatggtgatcattggagagagcaccagccacgtgccccccaccaccctggaggacatcgtggccaaggagacagaaacagacatcgaccgggagtacttcaccaccagcagccccccagccacccagcccacccggcccccaacagtggaggacaaggaggccttcggcccccaggccctgagcaccccccagcccccagccagcaccaagttccacccagacatcaacgtgtacatcatcgaggtgcgggagaacaagacaggccctgaccgctgcaagatgaacccctgcctgaatggaggcacctgctaccccacagagaccagctatgtgtgcacctgtgtgcccggctacagcggggaccagtgtgagctggactttgatgagtgccacagcaacccctgcagaaatggagccacctgtgtggatggcttcaacaccttccgctgcctgtgcctgcccagctatgtgggcgccctgtgtgagcaggacacagagacctgtgactatggctggcacaagttccagggccagtgctacaagtactttgcccacaggaggacctgggatgctgctgagcgggagtgccgcctgcagggcgcccacctgaccagcatcctgagccatgaggagcagatgtttgtgaacagagtgggccatgactaccagtggattggcctgaatgacaagatgtttgaacatgacttccgctggacagatggcagcaccctgcagtatgagaactggaggcccaaccagcctgacagcttcttctctgctggggaggactgtgtggtgatcatctggcatgaaaatggccagtggaatgatgtgccctgcaactaccacctgacctacacctgcaagaagggcaccgtggcctgtggccagccccctgtggtggagaatgccaagaccttcggcaagatgaagcccaggtatgagatcaacagcctcatccgctaccactgcaaggatggcttcatccagaggcacctgcccaccatccgctgcctgggcaatggccgctgggccatccccaagatcacctgcatgaaccccagcgcctaccagaggacctacagcatgaagtacttcaagaacagcagcagcgccaaggacaacagcatcaacaccagcaagcatgaccaccgctggagccgccgctggcaggagagcagaagatag

SEQ ID NO: 62261 - DNA, 4929 bp, Artificial Sequence
  derived and/or modified sequence
atgttcatcaacatcaagagcatcctgtggatgtgcagcaccctgattgtgacccatgcacttcataaggtgaaagtcgggaaaagccctccagtcagaggctccctcagtggaaaagtatctctcccatgtcacttcagcacgatgccaactttgccgccttcctataacacctctgagtttttgagaattaaatggtcgaagatagaagtggacaaaaatggcaaagacctgaaggagacaacagtcctggtcgcgcagaacggcaatattaaaatcggacaagactataagggtcgcgtttctgtgcccacgcaccccgaggccgttggggatgcgtcactgaccgtcgtgaagcttttagcaagcgatgccggcctgtaccgctgcgatgtcatgtatggtattgaagacacacaggatactgtatcattaactgtcgatggcgtggtcttccactatagagcggcaactagccgctatacgttgaatttcgaggccgcacagaaagcctgcctggacgtgggagcagttattgctacccccgagcagctgttcgcggcctatgaagacggcttcgagcagtgtgacgcggggtggcttgccgaccagacagtccgataccctattagagcccctcgcgtgggatgttatggtgacaaaatgggcaaagcaggagtgaggacatatggatttaggtcgcctcaggagacctatgacgtatactgctatgtggatcacctcgatggggatgtgtttcaccttactgttccttccaaattcacttttgaagaggcggctaaagaatgcgaaaaccaggatgctcgccttgccaccgtgggcgaactgcaggccgcatggagaaatggcttcgaccagtgtgactatgggtggctctccgacgcctcagtccgccatcctgtgacagtcgcccgagcacagtgtggtggtggcctcctcggagtgaggaccttatacaggttcgagaatcagaccgggttcccaccacccgatagtcgcttcgacgcttactgcttcaagcctaaagaggccaccactattgatctctcaatactcgccgaaactgcttcccccagtctgagcaaagaaccacaaatggtatcagatagaacaacgcccataatccctttggttgatgagctacccgtgattcctaccgagtttcctccggtgggaaatattgttagtttcgaacagaaggcaaccgtccagccgcaggccattaccgatagtctcgccaccaaactgccaacccctacgggaagtacgaaaaagccatgggatatggatgactacagcccatcggcttccgggccattgggcaagctggatattagtgaaattaaggaggaagtgttacagagtactactggcgtgagtcattatgccacggactcttgggacggagtggttgaggacaagcagacccaagaatctgtcacccaaatcgaacagattgaagtgggacccctggtgacttctatggagattttaaagcacatccccagcaaggagtttccagtgacagaaacccccttggtgaccgcaaggatgatccttgaaagtaaaacagaaaagaagatggtttccacagtgtccgagctggtcacgacaggccactacgggttcactctgggcgaggaggacgatgaagatcggaccctgacggtcgggagtgatgaatcaaccttgatcttcgaccagattcctgaagtgattaccgtttcgaaaacttccgaagatacaatccacacacatctggaagacttagaatcagtgtccgcaagtaccactgttagtcccctgatcatgcctgataacaacggaagttctatggatgactgggaagagcggcagaccagcgggagaatcacagaggagttcttgggcaaatacttaagcaccacaccattcccttctcagcatcgaaccgaaatcgaattgtttccctacagcggtgacaaaatactggtggagggaatctccacggtaatctacccatctcttcagacggaaatgacccatcggcgggagaggaccgagacactgatccccgaaatgcgaacggacacgtataccgacgaaatccaggaagaaataaccaaatcgccgttcatggggaaaaccgaagaggaggtgttttcagggatgaagctgagcacatctttgagcgaacccatacacgtgaccgaatcgagtgtggaaatgacaaaaagcttcgattttcctacattgataaccaagctttcagccgaacccactgaggtgcgtgacatggaggaagatttcaccgccacacctggaacaaccaagtacgatgagaacatcaccaccgttctactggcccacggcacgttatcagtagaagccgctaccgtgagcaaatggtcttgggacgaagacaatacaacaagcaagcctctcgagtccaccgagccttctgcatcttctaagctgcctcccgctctcctgacgacagtgggaatgaacgggaaagataaagacatccccagctttactgaggatggtgcagatgaatttacattgattcctgactctacccagaagcagctggaggaggtgaccgatgaggatatagccgcccacggtaaattcaccatcagatttcagcctaccacctcaacaggaatcgcggagaaatctacactgcgggattcaactactgaggagaaggtgccaccaatcacaagtaccgaaggccaagtgtatgcaacaatggagggaagcgcccttggagaggtggaagacgtcgacctgtcaaaacccgtgtctactgttccacagtttgcccatacgtctgaagttgagggtctagccttcgtatcttattccagtacacaggaaccaacaacttatgtggacagtagtcacacaatcccactgtctgtgattcctaagacggactggggcgtcctggtccctagtgttccgagcgaggacgaggttttgggcgagccctcacaggacattctggtcatcgatcagactcgtcttgaagcaaccattagccctgaaaccatgcggaccacaaagattaccgaggggacaactcaggaggaattcccttggaaagaacaaaccgccgaaaagcctgtgccagccctatcctccacagcttggactccgaaggaggccgtcacgccactggatgaacaggagggcgacggctccgcctataccgtgagtgaggacgaactgctgaccggcagtgaacgggttcctgtgctggaaaccactcctgttggaaagattgatcactccgtgtcctatccccctggcgctgtcacagagcataaggtgaaaactgatgaggtcgtcactctaacgccccgaatcgggcctaaggtgagtctcagtccaggtcccgagcaaaagtatgagacagaggggtcctcaactaccggcttcacatcttccctctcaccattctccactcacattacccagctaatggaggaaactacaactgagaagacaagcctggaggacatcgatctgggtagcggcctctttgagaaaccgaaagccacagagctgatcgaattttcaactataaaggtgaccgttccgagcgacataacaaccgcgttcagctctgtggaccgtcttcacaccacgtccgctttcaagcccagctccgcaattaccaagaaacctcccctgatagatcgcgaacctggcgaagaaactacatctgacatggttattattggcgagtccaccagccacgtaccaccaactactctggaagacatcgtggctaaagagaccgagaccgatatcgaccgggaatatttcactacctcctcaccacccgcgactcaaccaacacggccccccactgtggaggacaaggaagccttcggtcctcaggccttatctactccccaacccccagcttccacaaaattccatccagacatcaacgtctatataattgaagtccgggagaacaagactggtcccgaccggtgtaagatgaatccatgcttgaatgggggaacttgttaccctaccgaaaccagctatgtatgtacttgcgtgcctgggtattctggcgatcagtgcgaactagacttcgatgagtgtcatagtaacccgtgccgcaacggagcaacatgcgtagatggatttaacacgtttagatgcctgtgcttgcctagttatgtcggggccctgtgtgagcaagatacagagacctgtgattacggctggcataaattccagggccagtgttacaagtactttgcccacagacgtacgtgggatgcggctgagcgggaatgccggttgcagggagcacatttgacgtccatcctgagccacgaggaacagatgtttgttaaccgcgttggacacgactatcagtggattggcttgaacgacaagatgtttgaacatgattttaggtggactgacgggagtactcttcagtatgaaaattggcgccctaatcagcctgactcttttttttcagccggggaagattgtgttgtcatcatctggcatgagaacggccagtggaacgacgttccctgcaattatcaccttacatacacctgtaaaaaaggaactgtggcttgcggacagcctccggtggtcgagaacgccaaaactttcggcaagatgaaaccaaggtacgaaatcaactcactcataaggtaccactgcaaggatgggttcatacagcgacatctgcctacaatacgatgcctgggcaatggcaggtgggctatccccaaaatcacttgtatgaatcccagtgcatatcagcggacttacagcatgaagtactttaagaatagcagcagtgccaaagataattcgatcaatacctctaaacatgaccaccgctggtctcggagatggcaggagtcaagaagatag

SEQ ID NO: 62262 - DNA, 4785 bp, Artificial Sequence
  derived and/or modified sequence
atgcccaccctgccccccagctacaacaccagcgagttcctgcggattaagtggtctaaaatcgaggtagataagaatggaaaagatctcaaggagaccaccgtcctggttgcccagaacgggaacataaagatcggacaagattataagggcagggtatctgtacccacgcatcccgaagcagtaggtgatgcctctctgaccgtagtcaaactgctggcatccgatgcaggcctgtatcgctgcgatgtgatgtatggcatagaagatacacaagataccgttagcctgacagttgatggcgtcgtcttccattatagagcggccacatcacggtatactttgaactttgaggctgcacagaaagcctgtctggacgtgggggccgtgattgccactcccgaacagctgtttgccgcgtacgaagatggctttgagcagtgtgatgcgggttggctagcagatcaaaccgtgagatacccaatacgtgccccaagagtgggatgctacggagataaaatgggtaaagccggtgtgcggacatacggatttcgatccccacaggagacctacgacgtgtactgctatgtggaccatctggacggagacgtcttccacttaactgtcccctcaaaatttacctttgaggaagctgcaaaagagtgtgaaaatcaggatgcccggcttgccacagttggagaattacaggctgcctggcgaaatggatttgaccagtgcgactacggttggctgagcgacgcatctgtgcgtcaccctgtcacagtggcccgggcccagtgtgggggtggccttctcggcgtgcgcacactgtatagattcgagaaccagaccggtttccctcctcccgacagccggtttgacgcttattgttttaagcctaaggaggcaaccaccatagacttgtccattctagcagaaactgccagtcccagcctctccaaggagccacaaatggtgtctgatcgcaccactcctatcattccactcgtggatgaattaccagtgatcccaaccgagttccctccggtgggcaacattgtgagctttgagcagaaagctaccgtccaaccgcaggcgattaccgactcgttggcaacaaagctccctaccccaactggcagcactaaaaagccttgggacatggatgactacagcccctccgcatcgggccccttggggaagttggatatctctgaaattaaggaggaggtcctccagagtacaacaggcgtgtctcactatgctactgactcatgggatggagtggtcgaagataagcagacgcaagagagcgtcactcagattgaacaaatcgaggtcgggccgctggttacctcaatggaaattctgaagcacattccgtcaaaagaattccccgtcacggaaacccccctcgtaaccgcacgaatgatcttggaatctaaaaccgagaaaaagatggtgtctactgtgagcgagctggtcaccactggccattacggctttactctcggggaagaggatgatgaagaccgaacgctgactgttggttccgatgaatccaccctcatcttcgaccagatccccgaagtcattactgtgtcgaaaacctccgaggacaccattcatactcacctggaggacctggaatccgtgtctgcaagcaccacagttagccctctcattatgcctgacaacaacgggtcttccatggacgattgggaggagcgacagacatctggacgcatcaccgaggagtttctgggaaagtacttatcgacgacaccgtttccctcccagcaccgaacagagatcgagttgttcccctacagcggggacaagatattggttgagggaatttcaaccgtgatatatccttcactgcagacagaaatgacacatagacgggagcggactgagacattgataccagaaatgcgaacagatacttacaccgacgaaattcaggaggaaattaccaaatcaccttttatggggaagactgaagaggaagttttttcaggcatgaaactctcgaccagcttgtcagaacctattcacgtaaccgagagttccgttgagatgacaaaatccttcgattttccaaccctgattactaagctgtcagcagaacccaccgaggtgagagatatggaggaagacttcactgctactccagggaccaccaagtatgacgagaacatcaccacagtgctgctggctcacgggaccctatctgttgaagccgcaacagtgagtaagtggtcgtgggatgaagacaacacaacaagtaaacccctggaatcaactgagccctcagcgagtagtaaactgccccccgccctcctgaccactgtgggtatgaacggcaaagataaagatatcccatccttcaccgaagatggtgctgatgagttcactctcattcccgattctacacaaaaacaacttgaagaggtaactgacgaagacattgccgcacatggaaagttcacgatcaggtttcagccgacgacatccacgggcatcgcagagaaatccactctgcgggatagtactaccgaagaaaaagttccgcctataacatccacagagggccaggtatacgcgactatggagggcagcgctcttggagaggttgaagacgttgacctttctaagcctgtctccacagttccccagttcgcccacacctctgaagtcgagggcttggcatttgtctcctattcaagcactcaggaaccaaccacatatgtcgactctagtcataccatcccactttccgtcattcctaaaacagattggggagtgctggtgccctctgtgccatctgaggatgaagtcttgggtgagcccagccaggatatcctggtgattgaccagacccgcttggaggccactatcagccccgagacaatgcgcactaccaaaatcaccgagggtaccacacaggaggaattcccttggaaggaacaaacggccgagaagccagttcccgctctatcatctacagcctggaccccgaaggaagcagtgactccactggacgagcaagagggagacggctccgcctacactgtgagcgaagacgagcttctgactgggagcgaaagggtccccgtcctagagaccacccccgttggtaagatcgaccatagcgtcagttacccaccaggggcagtgactgagcacaaagttaaaaccgatgaggtcgtcaccctcacgcccagaatcggaccaaaagtaagtctgagtccggggcccgaacagaaatatgaaacagagggcagcagcacaactgggtttaccagctcgctgtctccattttctacgcacattactcagctgatggaagaaaccaccacagaaaagacaagcttagaggacatcgatcttggttctggcttgtttgagaagccgaaggccaccgagctcatagaattttccacaatcaaggtaaccgtgccttccgacataactaccgccttttcctcggttgatagactccacacaacaagtgcgttcaaacctagctccgccattaccaagaaacccccactgattgaccgcgagccaggtgaggagactactagtgacatggtcattatcggcgaaagcacaagccatgtgccgccgacaacactcgaagatatagttgccaaagagaccgagacagacattgaccgggagtatttcaccacctccagtccccccgccacccagcccactaggccacctacagtggaggacaaagaggcatttgggccccaggccctctcaaccccacagccccccgcgtctacaaagttccatccggacattaacgtctatatcattgaggtaagggagaataagaccggcccagaccggtgcaaaatgaatccctgcctaaacggagggacttgttatccaaccgaaacttcatacgtgtgtacctgtgtgcctggctactcaggtgaccagtgcgagttagacttcgatgagtgtcatagtaacccatgtcgaaacggcgcaacatgtgtcgatggcttcaacacgtttcggtgtctatgcctgccaagttacgtgggagccctttgtgaacaagacacagaaacctgcgactacgggtggcataagtttcaggggcagtgttataagtactttgctcatagacgcacttgggatgcagccgagcgagagtgccgattacagggcgcacacctgacctccatcctgtcacatgaagagcagatgttcgtaaaccgggtcggacacgactaccagtggataggactgaatgataagatgtttgagcacgacttccgttggaccgatgggagcaccctgcagtacgaaaactggcggccaaaccagcctgactctttttttagcgccggtgaggactgtgtggttataatttggcacgaaaatgggcagtggaatgatgtgccatgtaactaccacctgacctatacttgtaaaaaggggaccgtggcatgtggccagcctccagtcgtcgaaaacgccaagacattcggtaaaatgaaaccccggtacgaaattaacagcctgatcaggtaccattgtaaagacggcttcatacaacgtcacctgcccaccatcagatgcctgggcaacggccgctgggctatccctaaaattacctgcatgaatccaagtgcatatcagaggacttattccatgaaatattttaaaaacagtagttctgcaaaagacaatagtattaatacaagcaaacatgatcaccgctggagccggcggtggcaagaaagtcgaagatag

SEQ ID NO: 62263 - DNA, 4928 bp, Artificial Sequence
  derived and/or modified sequence
atgtttataaacatcaaatctatcctgtggatgtgctcaacccttatagttacgcacgcactacataaagtgaaggtgggtaagtcaccccctgtgagggggagtctctcggggaaagtatccttgccttgccatttctctaccatgccaaccctcccacccagctacaacacgtccgaattcctgcggatcaaatggtccaagatcgaagtagataagaatgggaaagatttgaaggaaacaacagtcttggtggcccagaacggtaacattaagatcggccaggactacaagggacgtgtgtccgtgcctacacaccctgaggcggtgggcgacgcctctttgaccgttgttaagttgctggcctctgatgctggtctttatagatgtgacgtgatgtacgggatcgaagatacacaggataccgtaagcctcactgtagacggcgtggtgtttcactatagggctgctactagcaggtatactctgaacttcgaggccgcacaaaaagcatgcctcgatgtgggagccgtgatcgctactcccgagcaacttttcgccgcttacgaggacgggttcgagcagtgcgacgccggttggctggccgatcaaactgttcggtatccaattcgggctcctagagtgggttgctatggtgacaaaatgggaaaagccggagtgcgcacctacggattcaggagcccacaagaaacctatgacgtttattgttacgtggaccatttagatggcgatgtgtttcacctcaccgtcccctcaaaattcacgttcgaggaggctgccaaggaatgtgagaatcaggatgcccgactggccacagttggggaattgcaggcagcctggcgcaacggcttcgaccagtgcgattatggttggctgagtgatgcaagcgtgagacaccccgtgactgtggcccgtgcccagtgtgggggaggcctcctgggtgttcggactctataccgttttgagaaccagaccggttttcctccgccagattctcgctttgacgcgtattgttttaaaccaaaagaagccacaactattgatctgagcatactcgcggagacagcttcaccttccctcagtaaagagcctcaaatggtgtctgaccggactacccccatcattccactggttgatgaactgcccgtaattcctacagagttccccccagtgggaaacatcgtctcattcgagcagaaagccacggtgcagccccaggcaattaccgattcccttgcgactaagctaccaacgcctaccggatccactaagaagccatgggatatggatgactacagcccatctgcctcaggccctctgggaaagttagatatcagcgagataaaagaggaagtcctgcaaagcaccacaggagtgtcccactatgcaaccgactcttgggatggcgtcgtggaggataaacagacccaggagagtgtcactcagatagagcaaattgaggttggcccactggtcaccagcatggagatcctgaaacatatcccctccaaggaatttcctgttacggagacacctcttgtcaccgccagaatgatcctggaaagtaagacggaaaagaagatggtaagtacggtgtctgaactggtgacgaccggccattacgggtttacccttggagaggaggatgacgaggataggaccctgacagttggttccgacgaatccaccctgatctttgaccagattcccgaggtgatcactgtgtccaagacttccgaggacaccatccatacacaccttgaagatttagaaagtgtttccgcctcaaccactgtcagtcccctcattatgcccgacaacaacgggagctctatggacgattgggaagagcggcaaaccagtggcaggattacagaggagttcctgggtaaatacctgagcacaaccccattcccgagtcaacaccgcacagaaatcgaactcttcccctactccggcgacaagattttggttgagggcatctcaaccgtgatctatccttcgctccagaccgaaatgacacatcgccgtgaacggacagagactctgataccggagatgagaactgatacctacaccgacgaaattcaggaagaaatcacaaagagtcccttcatgggtaaaaccgaagaagaagtgtttagcgggatgaagctctctacttcgctgtctgagccaatccatgtgactgaaagctctgttgaaatgacaaagagttttgatttccccaccctgataaccaaactgtccgcggagccaaccgaggtgcgggatatggaagaagactttacagcaactccaggaacaacaaagtacgatgagaatattacaacagttttactggcacacggcacgttgtccgttgaggctgcgacggtttccaaatggtcatgggacgaagacaacaccacttccaagcccttggagtctacggaaccttccgcctcctcgaagcttcccccagccctactaacaacagtgggaatgaacggtaaggataaagacataccttctttcacagaagacggggcagatgagtttactctaatcccggacagcacgcagaagcagctggaagaggtcacagacgaggacattgccgctcacggcaagttcacaatccgatttcaaccaactacatccactggcatagcggaaaagagtacattgcgagacagtacaactgaggaaaaggtccccccaattacatccacggagggacaagtttacgccacaatggaaggatccgccttgggcgaggtggaagatgttgacctgtctaaacccgtgtccacagtcccccagttcgctcatacgagcgaagtcgaaggccttgcattcgtaagctactcgagtacacaggaacctacaacatatgtcgatagcagccacacgatccccttgagtgttattcctaaaacagactggggagtcctggttccgtcagtcccctctgaagacgaggtccttggcgaaccttcccaggacatcctcgtgatcgaccagacccggttggaagccacaataagccctgagacaatgagaacaactaaaataacagagggtacaacccaggaagagtttccttggaaggaacagaccgcagaaaaacctgtacccgctctgagttctacggcgtggactcctaaggaagcagtgacacctctcgacgagcaggaaggggacggtagcgcttacacggtcagcgaggatgaactgctgaccggatccgagagggttcccgtcctcgagacgacacccgtcggcaaaattgatcacagcgtctcttatccaccgggagcagtaactgaacacaaagtcaagacagacgaagttgtgactttgactccaagaattgggcctaaagtgagcctttcgccaggcccagaacaaaaatatgaaactgaaggctcctcaacaaccggctttacctccagcctttctccattctcgactcatattacccagcttatggaagaaaccaccacagagaaaacttctctggaagacatcgacttgggctccggcctctttgagaaacccaaagcaacagaactgattgaattcagcacgataaaggtcacagtacctagcgatataacaacagcattcagctctgtggataggctccacaccacctccgctttcaaaccttcctccgccattactaaaaaaccccctctaattgaccgtgagccgggagaagaaacaacatcagatatggtgatcattggtgaatctacctcgcacgtccccccaacgactctcgaggatattgttgcaaaagagaccgagactgatatagatcgcgagtatttcacaacaagcagtccacctgccactcagcccacgcggcctcccacggttgaggacaaggaggcgtttggaccacaggccctgtccacgcctcagcctccagcctcaacaaaattccaccctgacatcaacgtatacattattgaagtgcgagagaataagaccggcccagacagatgcaagatgaacccatgtctgaacggtggaacatgctacccgacggagacgagttacgtttgcacctgtgttccaggatactctggagaccagtgcgagctggacttcgacgagtgccattccaatccatgtcgcaatggagctacatgcgtagatggttttaatacttttaggtgcctttgcttgccctcatacgtgggcgcattgtgtgagcaggatacagagacctgtgattatggatggcacaagtttcaaggacagtgctataagtattttgctcataggcgaacgtgggacgctgctgagcgtgagtgccggctgcagggagcccacctgactagcatcctgagccacgaagagcagatgtttgtgaatcgagtagggcacgattatcagtggatcggcctgaatgacaagatgttcgaacacgacttcaggtggacagatggttctaccctccagtacgaaaactggcgtccaaaccagcccgacagcttctttagtgccggagaggactgtgtagtcatcatttggcacgagaacggacagtggaacgacgtcccatgtaactatcacctgacatatacatgtaaaaaggggactgtggcctgtggtcaaccccctgtggtggagaatgcaaaaacctttggcaagatgaagccaagatatgaaatcaattcactgatcagataccattgtaaggacggattcattcagcgtcatctacctaccattaggtgtctggggaacgggaggtgggccattccaaagattacatgcatgaacccctccgcttatcaacgtacctattctatgaaatattttaagaactcaagctcagccaaagataatagcattaacacctccaagcacgatcaccggtggagtcggagatggcaagaaagcagaaggta

SEQ ID NO: 62264 - DNA, 4785 bp, Artificial Sequence
  derived and/or modified sequence
atgccaaccctccctcccagttacaacaccagcgaattccttaggatcaagtggtctaagattgaagtcgataagaatggcaaagacctgaaggagaccactgtattagtcgctcagaatggtaatatcaagattggtcaagactacaagggcagggtgagcgtaccaacgcatcccgaagctgtgggtgacgccagtctaactgtggtaaaattgttagctagcgatgccggactgtaccggtgtgatgttatgtacggaatcgaggacacacaggatacagtctctctaaccgtcgacggagtggttttccattaccgcgctgcaacgtcccgctatacgcttaatttcgaggcagcacaaaaggcttgtctcgacgtgggagccgtgatcgcaacgccagagcagctcttcgcagcctatgaggatggcttcgagcaatgcgatgcaggatggctagccgaccaaacagtgcgttatcccatcagagctcccagggtcggttgctacggggacaaaatggggaaagccggtgttagaacctacggattccggagccctcaagagacctacgacgtgtattgctacgtagatcaccttgatggagacgtgtttcatttaactgtgccatcaaaattcacattcgaggaggctgccaaagagtgcgaaaatcaagatgcaagattggccaccgtgggtgagctgcaggccgcttggcgcaacggcttcgaccagtgtgactacggttggctgagtgatgcctccgtgcggcatcccgtaaccgtggcgcgtgctcagtgtggcggtggcttgctgggggtcagaaccttgtaccgtttcgaaaatcagaccggtttccctccccctgacagccgattcgacgcttactgtttcaagcccaaagaagctaccacaatcgatttaagcatcctggcagagacagctagtccaagcttgtccaaagaacctcagatggtgtccgatcggaccacacccatcatcccattagtcgatgaattgcccgtgatccctaccgagttccctcctgtagggaatatcgttagttttgaacagaaggcaaccgtgcagccccaagccattacagactccctcgcaactaaattgcctacaccaaccggctctactaagaagccgtgggacatggatgactactccccttctgcctccggaccactaggtaagttggacatcagcgaaattaaagaagaagtcctgcagagcacgacaggggtctcccactacgctacggactcctgggacggtgtcgtggaggataaacagactcaggagtccgtgacccagatcgagcagattgaggtgggccctctggtgacatcgatggagattctgaaacacatcccttccaaagaattccccgtcaccgagaccccactcgttacggccagaatgatcttggaaagcaagacggaaaagaaaatggtttccacggtatccgagctcgtcactacagggcattatggattcaccctaggtgaagaggacgatgaggaccgaacgctgaccgtgggctcagacgagagcacgttgattttcgaccaaattccggaggtgattacagtgtctaaaaccagtgaggatactatccacacgcatctggaggatctcgaatctgtaagcgcaagtactactgtgagcccactcataatgccggataacaatggcagcagcatggacgactgggaggaacgacaaacgtccggacgcatcaccgaagaattcctcggtaagtatctgtccacaactccgtttcccagtcagcatagaacagaaatagagctgtttccctacagcggtgataaaatcctagtggaaggcatctcgaccgtgatctatccttctcttcagaccgagatgacacaccgaagagagaggaccgagaccttaattccagagatgcgcactgatacttacacagacgagatccaggaagagatcactaaaagccctttcatgggcaagactgaagaggaagtgttctctggaatgaagttatccacctctttatccgagccgatacatgtgaccgagtcatcggttgaaatgactaagagttttgacttccccaccctgattactaagctgtcggcagagcccaccgaggtccgggatatggaggaggatttcacagctactcccggtaccacaaagtacgatgaaaacattacgaccgtgctactggctcatgggactctatccgtcgaagcagcaacagtgagtaagtggtcttgggacgaggataatacaacatctaagccattagaatctacggaaccgagcgcttcttctaaactgccacccgctctgttaactactgtaggcatgaatggcaaggacaaggatatcccttccttcactgaagacggagctgatgagttcacgctaatccccgactctactcagaagcagctcgaagaagtcacagacgaagacattgcggcacacggtaagtttacaatcaggtttcagcccactacaagcactgggatcgccgaaaaatctacgcttcgagacagcaccactgaagaaaaagtcccgccaatcacctctaccgagggacaggtctatgccaccatggaagggtccgctttaggtgaagtggaggatgttgatttatccaagcccgtgagcactgtgccccaatttgcccacacctccgaagtggagggtctggctttcgtgagctatagctcaacacaggagcctactacatacgtcgacagctctcacacaatccctttgtctgtcatccccaaaacagattggggcgtcctggtcccctctgtcccatcagaggatgaggtactgggagagccgtcgcaggatatcctagttatcgatcaaaccaggctcgaggccacgatatcccctgagacaatgcgcacaaccaaaatcacagagggcactacccaggaagaattcccctggaaagaacagactgccgaaaagcccgtgccagccctctcatccactgcgtggacacctaaagaagctgtcaccccacttgatgagcaggagggagatggtagtgcatacacggtcagtgaggacgaactgttgaccggatctgagcgggtgccggttcttgaaacaacccctgtcggcaaaatagaccattcagtctcttacccccctggggctgtcacagaacataaggtcaagactgatgaggtggtcaccctgactcctaggataggtcctaaggtctctttatccccaggaccggaacagaaatatgagactgaaggatcaagtaccaccgggtttaccagcagcctcagccctttcagtacccatattacccagctcatggaggagactaccaccgagaagacaagcctcgaagacattgaccttgggtcaggcctgtttgagaagcccaaggctaccgaacttattgagtttagtactatcaaggtgacagtacccagcgacattaccaccgctttttcctcagttgaccggttacacacgacatccgcgttcaagccatcaagcgccatcacaaagaaaccaccgctcatcgacagggagcctggggaggagaccactagcgacatggtgatcataggggagagcacttcccatgttcccccaaccacgctggaggacatcgtggccaaagaaacagaaaccgacattgaccgcgaatatttcacaactagcagcccacccgctacccagcccacccgccctcccactgtggaagataaagaagctttcgggcctcaagctctgtcaactccccaaccgcctgccagcaccaaattccatcccgatataaatgtttatatcatagaagtgagggaaaacaagaccggaccagaccgctgtaagatgaacccgtgtctgaatggagggacatgttatcctacagagacgtcgtatgtctgtacctgcgtgcccggatactcaggggatcagtgcgagttggattttgacgagtgccactcgaacccttgtcgaaatggcgcaacctgcgtggacgggttcaatacctttcggtgtttgtgtctgccatcctacgtgggggcactctgtgagcaggacaccgaaacatgtgactacggttggcacaaatttcaagggcagtgctataagtacttcgctcacaggagaacttgggatgccgcagaaagggagtgtcgcctccagggtgcgcacctgacatcaatcttgtcccacgaagagcaaatgtttgtcaaccgtgtggggcacgactatcagtggattggactcaatgacaaaatgtttgaacacgattttcggtggacggacggatctactctgcaatatgagaactggcggccaaatcagccagatagtttcttttctgccggagaggactgcgtagtcattatctggcacgagaatggccaatggaacgatgtgccatgcaactaccacctgacctacacgtgtaagaaggggacagtggcctgtggccaaccgccagtggtagagaatgccaaaaccttcggcaaaatgaagcctagatacgagattaatagccttatcaggtatcattgcaaggatggctttatccagcggcatctgcctacgatcaggtgtttgggtaatggccgatgggccattcctaagatcacttgtatgaaccctagtgcctatcagcggacatactcaatgaaatactttaaaaattcatcttctgctaaggacaactcaattaacaccagtaaacacgatcaccgttggagccgccgttggcaagagagccgacgttag

SEQ ID NO: 62265 - DNA, 7154 bp, Artificial Sequence
  derived and/or modified sequence
cttcttctcgctgagtctcctcctcggctctgacggtacagtgatataatgatgatgggtgtcacaacccgcatttgaacttgcaggcgagctgccccgagcctttctggggaagaactccaggcgtgcggacgcaacagccgagaacattaggtgttgtggacaggagctgggaccaagatcttcggccagccccgcatcctcccgcatcttccagcaccgtcccgcaccctccgcatccttccccgggccaccacgcttcctatgtgacccgcctgggcaacgccgaacccagtcgcgcagcgctgcagtgaattttccccccaaactgcaataagccgccttccaaggccaagatgttcataaatataaagagcatcttatggatgtgttcaaccttaatagtaacccatgcgctacataaagtcaaagtgggaaaaagcccaccggtgaggggctccctctctggaaaagtcagcctaccttgtcatttttcaacgatgcctactttgccacccagttacaacaccagtgaatttctccgcatcaaatggtctaagattgaagtggacaaaaatggaaaagatttgaaagagactactgtccttgtggcccaaaatggaaatatcaagattggtcaggactacaaagggagagtgtctgtgcccacacatcccgaggctgtgggcgatgcctccctcactgtggtcaagctgctggcaagtgatgcgggtctttaccgctgtgacgtcatgtacgggattgaagacacacaagacacggtgtcactgactgtggatggggttgtgtttcactacagggcggcaaccagcaggtacacactgaattttgaggctgctcagaaggcttgtttggacgttggggcagtcatagcaactccagagcagctctttgctgcctatgaagatggatttgagcagtgtgacgcaggctggctggctgatcagactgtcagatatcccatccgggctcccagagtaggctgttatggagataagatgggaaaggcaggagtcaggacttatggattccgttctccccaggaaacttacgatgtgtattgttatgtggatcatctggatggtgatgtgttccacctcactgtccccagtaaattcaccttcgaggaggctgcaaaagagtgtgaaaaccaggatgccaggctggcaacagtgggggaactccaggcggcatggaggaacggctttgaccagtgcgattacgggtggctgtcggatgccagcgtgcgccaccctgtgactgtggccagggcccagtgtggaggtggtctacttggggtgagaaccctgtatcgttttgagaaccagacaggcttccctccccctgatagcagatttgatgcctactgctttaaacctaaagaggctacaaccatcgatttgagtatcctcgcagaaactgcatcacccagtttatccaaagaaccacaaatggtttctgatagaactacaccaatcatccctttagttgatgaattacctgtcattccaacagagttccctcccgtgggaaatattgtcagttttgaacagaaagccacagtccaacctcaggctatcacagatagtttagccaccaaattacccacacctactggcagtaccaagaagccctgggatatggatgactactcaccttctgcttcaggacctcttggaaagctagacatatcagaaattaaggaagaagtgctccagagtacaactggcgtctctcattatgctacggattcatgggatggtgtcgtggaagataaacaaacacaagaatcggttacacagattgaacaaatagaagtgggtcctttggtaacatctatggaaatcttaaagcacattccttccaaggaattccctgtaactgaaacaccattggtaactgcaagaatgatcctggaatccaaaactgaaaagaaaatggtaagcactgtttctgaattggtaaccacaggtcactatggattcaccttgggagaagaggatgatgaagacagaacacttacagttggatctgatgagagcaccttgatctttgaccaaattcctgaagtcattacggtgtcaaagacttcagaagacaccatccacactcatttagaagacttggagtcagtctcagcatccacaactgtttcccctttaattatgcctgataataatggatcatccatggatgactgggaagagagacaaactagtggtaggataacggaagagtttcttggcaaatatctgtctactacaccttttccatcacagcatcgtacagaaatagaattgtttccttattctggtgataaaatattagtagagggaatttccacagttatttatccttctctacaaacagaaatgacacatagaagagaaagaacagaaacactaataccagagatgagaacagatacttatacagatgaaatacaagaagagatcactaaaagtccatttatgggaaaaacagaagaagaagtcttctctgggatgaaactctctacatctctctcagagccaattcatgttacagagtcttctgtggaaatgaccaagtcttttgatttcccaacattgataacaaagttaagtgcagagccaacagaagtaagagatatggaggaagactttacagcaactccaggtactacaaaatatgatgaaaatattacaacagtgcttttggcccatggtactttaagtgttgaagcagccactgtatcaaaatggtcatgggatgaagataatacaacatccaagcctttagagtctacagaaccttcagcctcttcaaaattgccccctgccttactcacaactgtggggatgaatggaaaggataaagacatcccaagtttcactgaagatggagcagatgaatttactcttattccagatagtactcaaaagcagttagaggaggttactgatgaagacatagcagcccatggaaaattcacaattagatttcagccaactacatcaactggtattgcagaaaagtcaactttgagagattctacaactgaagaaaaagttccacctatcacaagcactgaaggccaagtttatgcaaccatggaaggaagtgctttgggtgaagtagaagatgtggacctctctaagccagtatctactgttccccaatttgcacacacttcagaggtggaaggattagcatttgttagttatagtagcacccaagagcctactacttatgtagactcttcccataccattcctctttctgtaattcccaagacagactggggagtgttagtaccttctgttccatcagaagatgaagttctaggtgaaccctctcaagacatacttgtcattgatcagactcgccttgaagcgactatttctccagaaactatgagaacaacaaaaatcacagagggaacaactcaggaagaattcccttggaaagaacagactgcagagaaaccagttcctgctctcagttctacagcttggactcccaaggaggcagtaacaccactggatgaacaagagggcgatggatcagcatatacagtctctgaagatgaattgttgacaggttctgagagggtcccagttttagaaacaactccagttggaaaaattgatcacagtgtgtcttatccaccaggtgctgtaactgagcacaaagtgaaaacagatgaagtggtaacactaacaccacgcattgggccaaaagtatctttaagtccagggcctgaacaaaaatatgaaacagaaggtagtagtacaacaggatttacatcatctttgagtccttttagtacccacattacccagcttatggaagaaaccactactgagaaaacatccctagaggatattgatttaggctcaggattatttgaaaagcccaaagccacagaactcatagaattttcaacaatcaaagtcacagttccaagtgatattaccactgccttcagttcagtagacagacttcacacaacttcagcattcaagccatcttccgcgatcactaagaaaccacctctcatcgacagggaacctggtgaagaaacaaccagtgacatggtaatcattggagaatcaacatctcatgttcctcccactacccttgaagatattgtagccaaggaaacagaaaccgatattgatagagagtatttcacgacttcaagtcctcctgctacacagccaacaagaccacccactgtggaagacaaagaggcctttggacctcaggcgctttctacgccacagcccccagcaagcacaaaatttcaccctgacattaatgtttatattattgaggtcagagaaaataagacaggacctgatcgctgcaaaatgaacccgtgccttaacggaggcacctgttatcctactgaaacttcctacgtatgcacctgtgtgccaggatacagcggagaccagtgtgaacttgattttgatgaatgtcactctaatccctgtcgtaatggagccacttgtgttgatggttttaacacattcaggtgcctctgccttccaagttatgttggtgcactttgtgagcaagataccgagacatgtgactatggctggcacaaattccaagggcagtgctacaaatactttgcccatcgacgcacatgggatgcagctgaacgggaatgccgtctgcagggtgcccatctcacaagcatcctgtctcacgaagaacaaatgtttgttaatcgtgtgggccatgattatcagtggataggcctcaatgacaagatgtttgagcatgacttccgttggactgatggcagcacactgcaatacgagaattggagacccaaccagccagacagcttcttttctgctggagaagactgtgttgtaatcatttggcatgagaatggccagtggaatgatgttccctgcaattaccatctcacctatacgtgcaagaaaggaacagtcgcttgcggccagccccctgttgtagaaaatgccaagacctttggaaagatgaaacctcgttatgaaatcaactccctgattagataccactgcaaagatggtttcattcaacgtcaccttccaactatccggtgcttaggaaatggaagatgggctatacctaaaattacctgcatgaacccatctgcataccaaaggacttattctatgaaatactttaaaaattcctcatcagcaaaggacaattcaataaatacatccaaacatgatcatcgttggagccggaggtggcaggagtcgaggcgctgatccctaaaatggcgaacatgtgttttcatcatttcagccaaagtcctaacttcctgtgcctttcctatcacctcgagaagtaattatcagttggtttggatttttggaccaccgttcagtcattttgggttgccgtgctcccaaaacattttaaatgaaagtattggcattcaaaaagacagcagacaaaatgaaagaaaatgagagcagaaagtaagcatttccagcctatctaatttctttagttttctatttgcctccagtgcagtccatttcctaatgtataccagcctactgtactatttaaaatgctcaatttcagcaccgatggccatgtaaataagatgatttaatgttgattttaatcctgtatataaaataaaaagtcacaatgagtttgggcatatttaatgatgattatggagccttagaggtctttaatcattggttcggctgcttttatgtagtttaggctggaaatggtttcacttgctctttgactgtcagcaagactgaagatggcttttcctggacagctagaaaacacaaaatcttgtaggtcattgcacctatctcagccataggtgcagtttgcttctacatgatgctaaaggctgcgaatgggatcctgatggaactaaggactccaatgtcgaactcttctttgctgcattcctttttcttcacttacaagaaaggcctgaatggaggacttttctgtaaccaggaacattttttaggggtcaaagtgctaataattaactcaaccaggtctactttttaatggctttcataacactaactcataaggttaccgatcaatgcatttcatacggatatagacctagggctctggagggtgggggattgttaaaacacatgcaaaaaaaaaaaaaaaaaaaaaaaaagaaattttgtatatataaccattttaatcttttataaagttttgaatgttcatgtatgaatgctgcagctgtgaagcatacataaataaatgaagtaagccatactgatttaatttattggatgttattttccctaagacctgaaaatgaacatagtatgctagttatttttcagtgttagccttttactttcctcacacaatttggaatcatataatataggtactttgtccctgattaaataatgtgacggatagaatgcatcaagtgtttattatgaaaagagtggaaaagtatatagcttttagcaaaaggtgtttgcccattctaagaaatgagcgaatatatagaaatagtgtgggcatttcttcctgttaggtggagtgtatgtgttgacatttctccccatctcttcccactctgttttctccccattatttgaataaagtgactgctgaagatgactttgaatccttatccacttaatttaatgtttaaagaaaaacctgtaatggaaagtaagactccttccctaatttcagtttagagcaacttgaagaagagtagacaaaaaataaaatgcacatagaaaaagagaaaaagggcacaaagggattggcccaatattgattctttttttataaaacctcctttggcttagaaggaatgactctagctacaataatacacagtatgtttaagcaggttcccttggttgttgcattaaatgtaatccacctttaggtattttagagcacagaacaacactgtgttgatctagtaggtttctatttttcctttctctttacaatgcacataatactttcctgtatttatatcataacgtgtatagtgtaaaatgtgaatgactttttttgtgaatgaaaatctaaaatctttgtaactttttatatctgcttttgtttcaccaaagaaacctaaaatccttcttttactacac

SEQ ID NO: 62266 - DNA, 5923 bp, Artificial Sequence
  derived and/or modified sequence
gctgccccgagcctttctggggaagaactccaggcgtgcggacgcaacagccgagaacattaggtgttgtggacaggagctgggaccaagatcttcggccagccccgcatcctcccgcatcttccagcaccgtcccgcaccctccgcatccttccccgggccaccacgcttcctatgtgacccgcctgggcaacgccgaacccagtcgcgcagcgctgcagtgaattttccccccaaactgcaataagccgccttccaaggccaagatgttcataaatataaagagcatcttatggatgtgttcaaccttaatagtaacccatgcgctacataaagtcaaagtgggaaaaagcccaccggtgaggggctccctctctggaaaagtcagcctaccttgtcatttttcaacgatgcctactttgccacccagttacaacaccagtgaatttctccgcatcaaatggtctaagattgaagtggacaaaaatggaaaagatttgaaagagactactgtccttgtggcccaaaatggaaatatcaagattggtcaggactacaaagggagagtgtctgtgcccacacatcccgaggctgtgggcgatgcctccctcactgtggtcaagctgctggcaagtgatgcgggtctttaccgctgtgacgtcatgtacgggattgaagacacacaagacacggtgtcactgactgtggatggggttgtgtttcactacagggcggcaaccagcaggtacacactgaattttgaggctgctcagaaggcttgtttggacgttggggcagtcatagcaactccagagcagctctttgctgcctatgaagatggatttgagcagtgtgacgcaggctggctggctgatcagactgtcagatatcccatccgggctcccagagtaggctgttatggagataagatgggaaaggcaggagtcaggacttatggattccgttctccccaggaaacttacgatgtgtattgttatgtggatcatctggatggtgatgtgttccacctcactgtccccagtaaattcaccttcgaggaggctgcaaaagagtgtgaaaaccaggatgccaggctggcaacagtgggggaactccaggcggcatggaggaacggctttgaccagtgcgattacgggtggctgtcggatgccagcgtgcgccaccctgtgactgtggccagggcccagtgtggaggtggtctacttggggtgagaaccctgtatcgttttgagaaccagacaggcttccctccccctgatagcagatttgatgcctactgctttaaacctaaagaggctacaaccatcgatttgagtatcctcgcagaaactgcatcacccagtttatccaaagaaccacaaatggtttctgatagaactacaccaatcatccctttagttgatgaattacctgtcattccaacagagttccctcccgtgggaaatattgtcagttttgaacagaaagccacagtccaacctcaggctatcacagatagtttagccaccaaattacccacacctactggcagtaccaagaagccctgggatatggatgactactcaccttctgcttcaggacctcttggaaagctagacatatcagaaattaaggaagaagtgctccagagtacaactggcgtctctcattatgctacggattcatgggatggtgtcgtggaagataaacaaacacaagaatcggttacacagattgaacaaatagaagtgggtcctttggtaacatctatggaaatcttaaagcacattccttccaaggaattccctgtaactgaaacaccattggtaactgcaagaatgatcctggaatccaaaactgaaaagaaaatggtaagcactgtttctgaattggtaaccacaggtcactatggattcaccttgggagaagaggatgatgaagacagaacacttacagttggatctgatgagagcaccttgatctttgaccaaattcctgaagtcattacggtgtcaaagacttcagaagacaccatccacactcatttagaagacttggagtcagtctcagcatccacaactgtttcccctttaattatgcctgataataatggatcatccatggatgactgggaagagagacaaactagtggtaggataacggaagagtttcttggcaaatatctgtctactacaccttttccatcacagcatcgtacagaaatagaattgtttccttattctggtgataaaatattagtagagggaatttccacagttatttatccttctctacaaacagaaatgacacatagaagagaaagaacagaaacactaataccagagatgagaacagatacttatacagatgaaatacaagaagagatcactaaaagtccatttatgggaaaaacagaagaagaagtcttctctgggatgaaactctctacatctctctcagagccaattcatgttacagagtcttctgtggaaatgaccaagtcttttgatttcccaacattgataacaaagttaagtgcagagccaacagaagtaagagatatggaggaagactttacagcaactccaggtactacaaaatatgatgaaaatattacaacagtgcttttggcccatggtactttaagtgttgaagcagccactgtatcaaaatggtcatgggatgaagataatacaacatccaagcctttagagtctacagaaccttcagcctcttcaaaattgccccctgccttactcacaactgtggggatgaatggaaaggataaagacatcccaagtttcactgaagatggagcagatgaatttactcttattccagatagtactcaaaagcagttagaggaggttactgatgaagacatagcagcccatggaaaattcacaattagatttcagccaactacatcaactggtattgcagaaaagtcaactttgagagattctacaactgaagaaaaagttccacctatcacaagcactgaaggccaagtttatgcaaccatggaaggaagtgctttgggtgaagtagaagatgtggacctctctaagccagtatctactgttccccaatttgcacacacttcagaggtggaaggattagcatttgttagttatagtagcacccaagagcctactacttatgtagactcttcccataccattcctctttctgtaattcccaagacagactggggagtgttagtaccttctgttccatcagaagatgaagttctaggtgaaccctctcaagacatacttgtcattgatcagactcgccttgaagcgactatttctccagaaactatgagaacaacaaaaatcacagagggaacaactcaggaagaattcccttggaaagaacagactgcagagaaaccagttcctgctctcagttctacagcttggactcccaaggaggcagtaacaccactggatgaacaagagggcgatggatcagcatatacagtctctgaagatgaattgttgacaggttctgagagggtcccagttttagaaacaactccagttggaaaaattgatcacagtgtgtcttatccaccaggtgctgtaactgagcacaaagtgaaaacagatgaagtggtaacactaacaccacgcattgggccaaaagtatctttaagtccagggcctgaacaaaaatatgaaacagaaggtagtagtacaacaggatttacatcatctttgagtccttttagtacccacattacccagcttatggaagaaaccactactgagaaaacatccctagaggatattgatttaggctcaggattatttgaaaagcccaaagccacagaactcatagaattttcaacaatcaaagtcacagttccaagtgatattaccactgccttcagttcagtagacagacttcacacaacttcagcattcaagccatcttccgcgatcactaagaaaccacctctcatcgacagggaacctggtgaagaaacaaccagtgacatggtaatcattggagaatcaacatctcatgttcctcccactacccttgaagatattgtagccaaggaaacagaaaccgatattgatagagagtatttcacgacttcaagtcctcctgctacacagccaacaagaccacccactgtggaagacaaagaggcctttggacctcaggcgctttctacgccacagcccccagcaagcacaaaatttcaccctgacattaatgtttatattattgaggtcagagaaaataagacaggacctgatcgctgcaaaatgaacccgtgccttaacggaggcacctgttatcctactgaaacttcctacgtatgcacctgtgtgccaggatacagcggagaccagtgtgaacttgattttgatgaatgtcactctaatccctgtcgtaatggagccacttgtgttgatggttttaacacattcaggtgcctctgccttccaagttatgttggtgcactttgtgagcaagataccgagacatgtgactatggctggcacaaattccaagggcagtgctacaaatactttgcccatcgacgcacatgggatgcagctgaacgggaatgccgtctgcagggtgcccatctcacaagcatcctgtctcacgaagaacaaatgtttgttaatcgtgtgggccatgattatcagtggataggcctcaatgacaagatgtttgagcatgacttccgttggactgatggcagcacactgcaatacgagaattggagacccaaccagccagacagcttcttttctgctggagaagactgtgttgtaatcatttggcatgagaatggccagtggaatgatgttccctgcaattaccatctcacctatacgtgcaagaaaggaacagtcgcttgcggccagccccctgttgtagaaaatgccaagacctttggaaagatgaaacctcgttatgaaatcaactccctgattagataccactgcaaagatggtttcattcaacgtcaccttccaactatccggtgcttaggaaatggaagatgggctatacctaaaattacctgcatgaacccatctgcataccaaaggacttattctatgaaatactttaaaaattcctcatcagcaaaggacaattcaataaatacatccaaacatgatcatcgttggagccggaggtggcaggagtcgaggcgctgatccctaaaatggcgaacatgtgttttcatcatttcagccaaagtcctaacttcctgtgcctttcctatcacctcgagaagtaattatcagttggtttggatttttggaccaccgttcagtcattttgggttgccgtgctcccaaaacattttaaatgaaagtattggcattcaaaaagacagcagacaaaatgaaagaaaatgagagcagaaagtaagcatttccagcctatctaatttctttagttttctatttgcctccagtgcagtccatttcctaatgtataccagcctactgtactatttaaaatgctcaatttcagcaccgatggccatgtaaataagatgatttaatgttgattttaatcctgtatataaaataaaaagtcacaatgagtttgggcatatttaatgatgattatggagccttagaggtctttaatcattggttcggctgcttttatgtagtttaggctggaaatggtttcacttgctctttgactgtcagcaagactgaagatggcttttcctggacagctagaaaacacaaaatcttgtaggtcattgcacctatctcagccataggtgcagtttgcttctacatgatgctaaaggctgcgaatgggatcctgatggaactaaggactccaatgtcgaactcttctttgctgcattcctttttcttcacttacaagaaaggcctgaatggaggacttttctgtaaccagg

SEQ ID NO: 62267 - protein, 1165 aa, Artificial Sequence
  derived and/or modified sequence
MLSLAAKLVAFFWRTADTPREEAGQLEPELAEGDTKLKTVRGVVTRYCSDYGMIDDMIYFSSDAVTSRVLLNVGQEVIAVVEENKVSNGLKAIRVEAVSDKWEDDSRNHGSPSDCGPRVLIGCVTSLVEGAGCISQTTYFSLESVCEGFEPCKGDWVEAEYRIRPGTWSSEATSVKPLRYKRVDKVCISSLCGRNGVLEESIFFTLDSLKLPDGYTPRRGDVVNAVVVESSQSCYVWRALCMTLVKRRDAAPVHEATHFYGTILLKNKGDIEVTQVTHFGTLKEGRSKTMVIWIENKGDIPQNLVSCKLAGWDKSKQFRFQMLDKDQMCPVVSFVSVPEKENSSDENINSLNSHTKNKTSQMSESSLVNNRGISPGDCTCKGENGEKDNILSRKQMTEPEPGGLVPPGGKTFIVVICDGKNPGRCKELLLLCFSDFLIGRYLEVNVISGEESLIAAREPFSWKKLKSSQALTSAKTTVVVTAQKRNSRRQLPSFLPQYPIPDRLRKCVEQKIDILTFQPLLAELLNMSNYKEKFSTLLWLEEIYAEMELKEYNMSGIILRRNGDLLVLEVPGLAEGRPSLYAGDKLILKTQEYNGHAIEYISYVTEIHEEDVTLKINPEFEQAYNFEPMDVEFTYNRTTSRRCHFALEHVIHLGVKVLFPEEIILQSPQVTGNWNHAQDTKSSGQSTSKKNRKTMTDQAEHGTEERRVGDKDLPVLAPFTAEMSDWVDEIQTPKARKMEFFNPVLNENQKLAVKRILSGDCRPLPYILFGPPGTGKTVTIIEAVLQVHFALPDSRILVCAPSNSAADLVCLRLHESKVLQPATMVRVNATCRFEEIVIDAVKPYCRDGEDIWKASRFRIIITTCSSSGLFYQIGVRVGHFTHVFVDEAGQASEPECLIPLGLMSDISGQIVLAGDPMQLGPVIKSRLAMAYGLNVSFLERLMSRPAYQRDENAFGACGAHNPLLVTKLVKNYRSHEALLMLPSRLFYHRELEVCADPTVVTSLLGWEKLPKKGFPLIFHGVRGSEAREGKSPSWFNPAEAVQVLRYCCLLAHSISSQVSASDIGVITPYRKQVEKIRILLRNVDLMDIKVGSVEEFQGQEYLVIIISTDPCFGALLEYSITNGVYMGCDLPPALQSLQNCGEGVADPSYPVVPESTGPEKHQEPS

SEQ ID NO: 62268 - DNA, 3498 bp, Artificial Sequence
  derived and/or modified sequence
atgctgtctctcgcggctaagttagtcgcctttttctggagaaccgctgacacgccacgcgaagaagcgggccaattggagcctgagctggccgaaggagatactaagctaaagaccgtgcggggggttgtgacacggtattgtagtgattacggcatgattgacgacatgatttatttttctagcgatgccgtgacttcgagggtattgttgaacgtaggccaggaggtgatcgcggtggttgaggagaataaagtgagtaacggcttgaaagcgataagagtggaagcagtgagcgataagtgggaagacgatagtcgaaaccacggatcacccagcgactgcggcccccgcgtgcttattggctgcgttacaagtctggtggagggagcgggatgtatttctcagactacatatttcagcctggaatctgtgtgcgagggattcgagccatgcaaaggggactgggttgaagccgaatatcgtattagacccggcacatggagttctgaggccacctcagtgaaaccacttagatataaacgcgtagataaggtatgcataagtagcctctgcggacgaaatggtgtgcttgaagagtccatcttttttacactagactccttgaagctaccggacgggtatacacctagaagaggtgacgtagtcaatgccgtggtagttgaatcttcgcagagctgttatgtatggagagcactgtgcatgacgttggtgaagcgccgtgatgctgcaccagttcatgaggctacccacttttacggcaccattctgctgaaaaacaaaggtgacattgaggtcacacaggtaacgcactttgggacccttaaggagggtagatctaaaactatggtcatttggattgaaaacaaaggcgatattccccaaaacctcgtgagttgcaaactggctgggtgggataaatctaagcagttccggttccagatgcttgataaagatcagatgtgcccagtggtgagcttcgtttcagtgcccgagaaagagaattctagcgacgaaaacatcaactccctgaattcccacacgaagaacaaaaccagccagatgtccgagtcctcactggttaacaatcgtggtatctcacctggagactgcacatgcaaaggcgagaacggagagaaggataacatcctttctcggaagcaaatgacagagcctgaaccaggagggctggtcccaccaggaggcaaaaccttcattgtcgttatttgtgatggaaagaatcccgggcggtgcaaggagttattattactgtgcttttctgactttctaatagggagatatttggaggtaaacgtgataagtggagaagaaagccttatagcagcgcgggaaccgttctcctggaagaagttaaagtcctcccaagctcttacatctgccaagacaaccgtggtggtcaccgcccaaaagaggaattctagacgtcaactgccctccttcttgcctcagtaccccataccagaccggttgaggaagtgcgtcgagcagaagatcgacatcctcactttccagcctcttttggcggaactcctgaacatgtcaaattacaaggagaagttctctacactgctgtggttagaagagatctatgccgaaatggagctcaaggaatataatatgtccgggataattctgcgcaggaatggcgatctactcgtcctggaagtgcccgggcttgcggaaggtagaccctccttgtatgcgggcgataagctcattctcaaaactcaagaatataacgggcatgccatcgagtatatctcttatgtgaccgagattcacgaggaggacgttacactcaagattaatccagaatttgaacaggcatataacttcgagcccatggacgtggagttcacctacaataggaccacctccagaaggtgccatttcgccctcgaacacgtgatccatctgggagttaaggttctttttcccgaggaaattatcctgcagtcccctcaggtcacaggaaactggaatcacgcgcaggacaccaagtccagtggtcagtcaacgagtaaaaagaacagaaaaactatgaccgatcaggctgagcacggaacagaggaacgcagggtcggcgacaaagaccttccagtactggcccctttcaccgcagaaatgagcgattgggttgatgagatccagacccccaaagccagaaagatggagtttttcaaccccgtgctgaacgaaaaccagaagctggctgtgaaaaggatcttgagcggtgactgcaggccattgccttacatactctttggcccacctggaactggcaaaaccgtcaccattattgaggctgtgcttcaggtgcactttgcactccctgatagcagaattctcgtttgcgctcctagtaatagcgctgccgatttagtgtgtcttagacttcacgaatccaaagtgctgcagcccgccaccatggtgcgcgttaacgccacttgccgcttcgaggaaattgttattgacgccgtgaagccctactgtcgggacggcgaggacatttggaaagcttctcgcttccgcattataatcacgacgtgtagctcaagcggactcttctaccaaattggtgtgagggtgggacacttcactcacgtgttcgtcgatgaagcaggtcaggccagcgagccagaatgtcttatcccattggggttgatgtcagacatttctggccaaatagtgctggccggcgatcctatgcaattaggtccagttattaaatctagactggctatggcatacggtcttaatgtcagctttctggagaggttaatgtcccgcccagcgtatcaacgggacgagaatgcgtttggtgcttgcggggcgcataatccccttctggtgaccaaactcgtgaaaaactacaggtcccatgaggcattgttgatgctcccctcccgcctgttttaccacagagaactagaggtctgtgctgatcctacagtcgtcacctccctgctcgggtgggagaagctccccaagaagggttttccgctcattttccatggagtgcgaggatccgaagcccgggaaggtaagagtccatcatggttcaatcctgccgaggccgtccaggtgttgcggtattgttgtcttctcgctcactcaatttccagccaggtgtctgcctctgacataggagtaatcacgccatataggaaacaggtcgagaagatccgtattctgctgcggaatgtggacctaatggatatcaaagtgggcagcgtagaggaatttcaggggcaggaatacctggtaatcataatttccaccgatccatgttttggcgcgctgcttgaatacagcatcaccaacggagtttatatggggtgcgacctgccccccgctctccaatccttacagaactgtggagagggcgtcgcggacccatcctaccctgtagtccccgagtctacgggccctgagaaacaccaagagccaagctag

SEQ ID NO: 62269 - DNA, 3498 bp, Artificial Sequence
  derived and/or modified sequence
atgctgagcctggccgccaagctggtggccttcttctggaggacagctgacaccccccgggaggaggccggccagctggagcctgagctggccgagggggacaccaagctgaagacagtgcggggcgtggtgacccgctactgcagcgactatggcatgattgatgacatgatctacttcagcagtgatgctgtgaccagccgggtgctgctgaatgtgggccaggaggtgattgctgtggtggaggagaacaaggtgtccaatggcctgaaggccatccgggtggaggccgtgtctgacaagtgggaggatgacagcagaaatcatggcagccccagcgactgtggcccccgggtgctgattggctgtgtgaccagcctggtggagggcgccggctgcatcagccagaccacctacttcagcctggagagcgtgtgtgagggctttgagccctgcaagggggactgggtggaggccgagtaccgcatccggcccggcacctggagcagcgaggccacctctgtgaagcccctgcgctacaagagggtggacaaggtgtgcatcagcagcctgtgtggcagaaatggagtgctggaggagagcatcttcttcaccctggacagcctgaagctgcctgatggctacacccccaggagaggagatgtggtgaatgctgtggtggtggagagcagccagagctgctacgtgtggagggccctgtgcatgaccctggtgaagagaagagatgctgcccctgtgcatgaggccacccacttctacggcaccatcctgctgaagaacaagggggacatcgaggtgacccaggtgacccacttcggcaccctgaaggagggccgcagcaagaccatggtgatctggattgaaaataaaggagacatcccccagaacctggtgtcctgcaagctggccggctgggacaagagcaagcagttccgcttccagatgctggacaaggaccagatgtgccctgtggtgtcctttgtgtctgtgcctgagaaggagaacagcagtgatgagaacatcaacagcctgaacagccacaccaagaacaagaccagccagatgtctgagagcagcctggtgaacaacagaggcatcagccctggggactgcacctgcaagggagaaaatggagagaaggacaacatcctgagcaggaagcagatgacagagcctgagcccggcggcctggtgcccccaggcggcaagaccttcatcgtggtgatctgtgatggcaagaaccctggccgctgcaaggagctgctgctgctgtgcttcagtgacttcctgattggccgctacctggaggtgaatgtcatcagcggggaggagagcctgattgctgcccgggagcccttctcctggaagaagctgaagagcagccaggccctgaccagcgccaagaccaccgtggtggtgacagcccagaagaggaacagccggcggcagctgcccagcttcctgccccagtaccccatcccagaccggctgaggaaatgtgtggagcagaagattgacatcctgaccttccagcccctgctggccgagctgctgaacatgagcaactacaaggagaagttcagcaccctgctgtggctggaggagatctatgcagagatggagctgaaggagtacaacatgagcggcatcatcctgcggagaaatggagacctgctggtgctggaggtgcccggcctggccgagggccggcccagcctgtatgctggggacaagctgatcctgaagacccaggagtacaacggccacgccatcgagtacatctcctatgtgacagagatccacgaggaggatgtgaccctgaagatcaaccctgagtttgagcaggcctacaactttgagcccatggatgtggagttcacctacaacagaaccaccagccgccgctgccactttgccctggagcacgtgatccacctgggcgtgaaggtgctcttccctgaggagatcatcctgcagagcccccaggtgactggaaactggaaccacgcccaggacaccaagagcagcggccagagcaccagcaagaagaacaggaagaccatgacagaccaggccgagcacggcacagaggagcggcgggtgggggacaaggacctgcctgtgctggcccccttcaccgctgagatgtctgactgggtggatgagatccagacccccaaggccaggaagatggagttcttcaaccctgtgctgaatgaaaaccagaagctggccgtgaagaggatcctgagcggggactgccggcccctgccctacatcctgtttggacctcctggcaccgggaagacagtgaccatcattgaagctgtgctgcaggtgcactttgccctgcctgacagccgcatcctggtgtgtgcccccagcaacagcgctgctgacctggtgtgcctgcggctgcacgagagcaaggtgctgcagcctgccaccatggtgcgggtgaatgccacctgccgctttgaggagatcgtgattgatgctgtgaagccctactgcagagatggagaggacatctggaaggccagccgcttccgcatcatcatcaccacctgcagcagcagcggcctcttctaccagattggagtgcgggtgggccacttcacccacgtgtttgtggatgaggccggccaggccagcgagccagaatgtctcatccccctgggcctgatgtctgacatcagcggccagatcgtgctggccggggaccccatgcagctgggccctgtgatcaagagccggctggccatggcctacggcctgaatgtgtccttcctggagcggctgatgagcaggcctgcctaccagagagatgaaaatgccttcggggcctgtggggcccacaaccccctgctggtgaccaagctggtgaagaactaccgcagccatgaggccctgctgatgctgcccagccgcctcttctaccaccgggagctggaggtgtgtgccgaccccaccgtggtgaccagcctgctgggctgggagaagctgcccaagaagggcttccccctcatcttccatggagtgcggggcagcgaggcccgggagggcaagagccccagctggttcaacccagctgaggccgtgcaggtgctgcgctactgctgcctgctggcccacagcatcagcagccaggtgtctgccagtgacattggagtcatcaccccctacaggaagcaggtggagaagatccgcatcctgctgagaaatgtggacctgatggacatcaaggtgggctctgtggaggagttccagggccaggagtacctggtgatcatcatcagcacagacccctgcttcggggccctgctggagtacagcatcaccaacggggtgtacatgggctgtgacctgcccccagccctgcagagcctgcagaactgtggggagggcgtggccgaccccagctaccctgtggtgcctgagagcacaggccctgagaagcaccaggagcccagctag

SEQ ID NO: 62270 - DNA, 3763 bp, Artificial Sequence
  derived and/or modified sequence
ggcagcctaggccgggcgagggccatgctgagcctcgcagccaagctggtggccttcttctggaggacggcggacacccctagggaggaagccgggcagctggagcccgagctcgcggaaggtgacactaagctgaaaactgtacggggtgtcgtgacaaggtactgcagcgattatggcatgattgatgatatgatctacttctccagtgatgctgtgactagcagagtgcttctgaatgttggacaggaagtgattgcagttgtggaagaaaataaagtgtccaatggactgaaagcaatcagggtagaagctgtctctgataagtgggaagacgacagcagaaaccatgggagtccctcagactgcggcccccgagtgttgattggctgtgtgacttccctggtggagggcgcaggctgtatcagtcagaccacctacttctctctggagagtgtgtgcgaaggcttcgagccctgcaagggagactgggtggaggctgagtaccggatccggcctggcacgtggagcagcgaagccacctcagtgaagccactgagatacaagcgcgtggacaaggtctgcatctctagcctctgtggaaggaacggggtgttagaggaaagcatcttctttaccttggactccttgaaactgccagatgggtacacaccccggagaggtgacgtggtcaatgcagtggtggtggagagcagccagtcatgctatgtctggagggcactttgtatgaccctagtgaagaggcgagacgccgcccctgttcatgaggccactcatttctatggaacgattttgctgaagaacaaaggtgatattgaagttacacaggtgacgcattttggaaccctaaaggaaggaagaagtaaaaccatggtgatctggatagagaataaaggagacattcctcaaaacttagtcagctgtaaactggctggctgggataaatctaaacaattcagattccaaatgctggataaagaccagatgtgccccgtggtatcttttgtttctgttcctgagaaggagaattcatcagatgaaaatattaattcattaaatagccacacaaaaaacaaaacctctcagatgtcggagagcagtttggtgaacaacagaggaatctctccaggtgattgtacctgtaaaggagaaaatggagaaaaagacaacattctatcaaggaagcagatgacagagcctgagcctggggggcttgtccctccagggggaaaaaccttcattgtggtcatctgtgacggaaaaaatcctggccgctgcaaggagctccttttgctctgtttttccgatttcctaattgggcgataccttgaagtaaatgttatcagtggggaggagtcactaattgctgcgcgcgaaccattttcttggaaaaagcttaaaagttcacaagcgttaacatccgcaaaaactacagttgttgtgaccgcacagaaaaggaactcaagacgacaacttccaagttttcttccccaatatccaatcccagatagacttagaaaatgtgtggaacaaaaaattgacatcctgactttccagccattacttgcagagcttctgaacatgtcaaattacaaggagaagttttcgactttgctgtggcttgaggagatttatgcagaaatggaactgaaagagtataacatgagcgggatcatcttaagaaggaatggggatctgctggttctggaggtcccagggttggccgaagggaggccttctctctacgcaggtgataaactgattttaaaaactcaagagtacaatggacatgccatcgaatacatcagctacgtgactgagattcatgaagaagatgtaactcttaaaattaatccagaatttgaacaagcctataactttgaacctatggatgtggaatttacatataataggaccacaagcagacggtgtcactttgcacttgaacacgtcatccacttaggtgtaaaagtgttgtttccagaagaaattattttacagtctccacaagtgacgggaaattggaaccatgcacaagacaccaaaagcagtggacagtccaccagcaaaaagaataggaaaacaatgacggaccaagctgagcatggaacagaggagaggcgtgttggtgacaaggacctgccggtgctggcaccctttactgcagagatgagcgattgggtagatgaaattcagacccctaaagcaagaaagatggagtttttcaacccagtgctaaatgaaaatcagaagttagcagttaaaaggattctgagtggtgactgccgtcccctcccgtatattctctttggacctcctggtactggaaagacagtgacaataatagaggctgttttacaggtacactttgccttgccggacagtcggattttagtctgtgcgccctccaacagtgctgctgacctcgtgtgtctgcggctgcacgagagcaaggtgctacagccggccaccatggtccgggtgaacgccacctgcaggttcgaggagatagttattgacgccgtcaaaccgtattgcagagacggagaagacatctggaaagcctcacgcttccggataatcatcaccacatgcagcagctcagggctgttttaccaaataggagtgagagttgggcacttcactcacgtgtttgtggacgaggctgggcaggcaagtgagccggaatgcctcattcctctggggctgatgtcggacatcagtggccagatcgtgctggcaggagaccccatgcagctcggcccagtcattaagtccagactcgccatggcctatgggctgaacgtgtcctttttggaacggctgatgtctcgacccgcgtaccagagggacgaaaatgctttcggtgcttgtggcgcacataatcccctgttggtcacaaagctggtgaagaactaccggtcccacgaggccctgctgatgctgccctcacggctgttctaccacagggaactcgaggtctgtgcggaccccacagtggtgacctccttgctgggctgggagaagttgcctaagaaaggcttccctctcatcttccatggtgtgcggggcagcgaggcacgggagggaaaaagcccatcgtggttcaacccggccgaggccgtccaggtcctgcgctactgctgcctcctggcccacagcatctccagtcaggtgtctgccagcgacattggcgtcatcacgccctaccggaagcaggtggagaaaatcagaattcttttgcgtaatgttgatctgatggatataaaggttggatcagtagaggagtttcaaggacaagagtatctggtcatcatcatttcgaccgacccctgttttggtgctttgctggaatacagtattacaaacggtgtttacatgggatgcgatttacctcctgcactgcagtctctgcaaaactgtggcgagggggtggcagacccctcctacccagtggtgccagaatccacaggaccagagaagcatcaggagcccagctgatctgcagtggctgacagcagggaggccatgtgctcagcctggccacgttgccgttacagtctgctccgtggctcctgtggcctgcccttgtctcgcagccaggcagggtcgtgtgtgggtgtggggctgccaggttggacgcagctgctgctgccctgactttggcatatgccagcctgttcctgccacagggcagtcactgccgcctaccctgaaataaaccctcgagtgacccccagaa

SEQ ID NO: 62271 - DNA, 3498 bp, Artificial Sequence
  derived and/or modified sequence
atgctgagcctggccgccaagctggtggccttcttctggcggaccgcggatacaccacgcgaggaggccggacagctcgagccggaattggcagagggtgacacaaaacttaaaaccgttagaggggttgtgacgcgctattgctccgattacggcatgattgatgacatgatttacttcagtagtgatgctgtcaccagcagagtcctgttaaatgtgggccaggaagtgattgctgtggtcgaagagaataaagtgtccaatggactgaaggccatccgggtggaagccgtgtctgacaagtgggaagatgactcccgcaaccacggctcaccaagcgactgtggaccacgcgtgcttataggctgtgtgacgtcacttgtcgagggcgctggatgcatcagccagacaacttacttttccttggaaagcgtgtgtgaaggctttgagccctgcaaaggagattgggttgaggccgagtaccgcatcaggccgggaacctggtccagcgaggccacgtccgtgaaacctttgaggtataagcgtgtcgacaaggtctgtatttcgtcactttgcggacggaatggagtgctcgaagagtccattttcttcactctcgatagcttgaaactccctgacggttacacaccgcgtcgaggcgacgtggtgaacgcagtggtggttgaatcttcccagtcgtgctatgtgtggcgagccctctgcatgaccctcgttaaacgcagagatgcagctcctgtgcatgaggccactcacttctacggcaccatcctgctgaagaacaaaggagatattgaggtcacccaggtaacgcacttcggtacattaaaggaaggacgaagcaaaactatggtaatctggatagaaaacaagggggacattccacagaatctggtctcatgtaagctggcaggttgggacaagagcaaacagttccggttccagatgctggacaaagaccagatgtgtcctgtcgtgagtttcgtcagtgtccccgagaaagagaatagtagcgatgagaatattaattccctgaatagtcacacaaaaaataagacctcccagatgagtgaaagctctctggtcaacaatagaggtataagcccaggagactgcacttgcaaaggggagaacggcgagaaggacaatatattgagtcgcaaacagatgacagaaccagagcctggggggctggtcccccccggtggcaaaaccttcatcgtggtcatttgcgacgggaagaatcccggtcgctgcaaagaactgctgctgctttgtttttccgattttttaattggcaggtacctcgaagtaaacgtgatcagcggggaggaatctctgatagctgcacgggagcccttttcttggaagaagctgaagtcgagtcaggctcttacttcagctaaaaccaccgttgtcgttaccgcacaaaagcgaaattctcggagacagctgcccagcttcctgccacaatatccgatcccggacagacttagaaaatgcgtcgaacagaaaatcgacattttgacgttccagcccctcctggcggaactgttgaatatgagcaattacaaggagaaatttagcactcttttgtggttggaggagatctacgctgagatggagctgaaagagtacaatatgtccgggattatcctgagaagaaacggggacttgctagtgttagaagtgcctggcctggctgagggtcggccctccctgtacgcaggagacaagctgatcttgaagacgcaggaatataacgggcatgcgatcgagtacatttcttacgtgactgaaatacacgaggaggatgtgactcttaagataaaccctgagttcgagcaggcttacaattttgaaccaatggacgtggagtttacatacaataggaccacttcaagacggtgccactttgctctggagcatgtaatccacttaggggtgaaagtcctattccccgaggagataattctgcagtcccctcaggtgaccggaaattggaaccatgcacaggatacaaagtcctccggtcaaagcacatccaaaaagaatcgcaaaactatgacagaccaggccgagcatggcaccgaggagcgtcgtgttggcgacaaagacttgcccgttcttgctccttttacagctgagatgagtgactgggtggacgaaatacaaacacccaaagctagaaaaatggagttctttaacccagtgttaaacgaaaatcagaagttagctgttaagcgaatcttgagtggcgattgccggcccctgccctacatcctcttcggtccccccggaactgggaaaacagtcaccattattgaagcagtgcttcaggtgcatttcgcactccccgacagccgtattctggtctgcgcaccatccaacagtgccgccgacttggtgtgtctccggctgcacgagtccaaggtgttgcagccggctaccatggtcagagtgaacgctacttgtcggttcgaggagattgtaatcgacgccgtcaagccctactgccgtgatggggaggatatctggaaggctagccgattccggatcattatcactacttgctcttcaagcgggcttttttatcagatcggcgtcagggtagggcattttacgcacgtgtttgtcgatgaagctggtcaagcatctgagcctgagtgcctgataccgttgggcttgatgagtgatatctccggtcagattgtactcgccggcgaccctatgcagttaggccctgtcatcaaatcacgtctggccatggcctatggccttaatgtgagctttttagagaggctcatgtcacggcccgcgtaccagagggacgagaacgcgttcggggcatgcggggcacataatccactactggtaactaagctggtcaaaaactataggtcacatgaagccttattgatgttacccagcaggctgttttaccacagggagctagaagtatgcgccgacccaacggtggtgacctcactcctcggctgggaaaagctccccaagaagggctttcctttgatctttcacggagttagggggtccgaagcccgtgaaggaaagagcccgagctggttcaaccctgccgaagctgttcaggtcctcaggtactgttgcttgttggcccattcgatttcgtcccaggtgagtgcctccgacattggcgtcattacaccatatcggaaacaggttgaaaaaattagaatcctgctccggaacgtcgatcttatggatatcaaagtaggttccgtggaagagttccagggtcaagagtatcttgtgattatcatttccaccgatccctgtttcggagcactcttagaatattccatcactaacggggtttacatgggctgcgacctaccccccgccctccagagtctgcaaaattgtggggaaggcgtggccgatccgtcctaccccgttgtccctgagagtaccggaccagagaaacaccaggagccaagttag

SEQ ID NO: 62272 - DNA, 3498 bp, Artificial Sequence
  derived and/or modified sequence
atgctaagcttggccgctaaactggtcgcctttttttggaggaccgccgacacccctcgggaggaggctggacaattggagccggaactggccgagggagacacgaaacttaaaaccgttcggggagtcgttacacggtattgctccgattatggcatgatcgacgacatgatttactttagctctgacgccgtgacctctcgcgtactgctgaacgtaggacaggaggtaatcgccgtggtggaggaaaataaagtcagcaacggtttaaaggctattagggtggaggctgtcagtgataaatgggaggatgacagcaggaatcacggctccccctccgattgcggccctagagttttgattgggtgtgttaccagcctcgttgaaggtgccggatgcatatcacagacgacttatttttcgctcgagtctgtgtgcgaaggcttcgagccctgcaaaggcgactgggtggaagctgaatatcgcattaggccaggtacatggagcagtgaagccacatccgtgaagcctctacgttacaaacgtgtggataaagtgtgcatttcgtctctctgtggcaggaacggcgtgctggaggaaagcatcttctttacactcgacagtctcaagcttccggatgggtacacgccacgacgcggtgacgtggtcaatgcagtagtggttgagtcatctcaatcctgttacgtgtggagggccctgtgcatgaccttggtcaaaagacgagatgccgcacccgtacatgaagccactcatttctatggcaccattttactgaagaacaaaggcgacatcgaagtcacccaggtgacccactttgggaccctcaaggaggggagatctaagacaatggttatctggatcgagaacaaaggagatattcctcagaatctcgtatcctgtaaactagccggatgggacaagagtaagcagtttcgttttcaaatgctagacaaggatcagatgtgccccgtcgtttccttcgttagcgtgcccgagaaagagaactcatcagatgaaaacatcaactctcttaactcccacactaaaaataagacttcccagatgtccgagagcagtcttgtgaataaccgcggaattagtcccggagattgcacttgcaaaggagaaaatggcgagaaggacaacatactcagcagaaagcaaatgaccgaaccagaacctgggggtctggtgccacctggaggcaagacgttcatcgtggtgatatgcgacggcaagaatccaggcaggtgcaaagaattgctgctgctttgtttttccgatttccttatcggcagataccttgaagtcaatgtaatctctggcgaggaatcactcatcgccgctagagaaccattttcttggaagaagctgaagagttcccaggcgctgaccagcgccaaaaccaccgtcgtggtcacagcccagaagaggaattcccgccgtcaactgccaagtttcctgccacagtaccctatccccgaccggctacgcaaatgcgtcgagcagaagattgatatccttacttttcagcccctgctggcagagctcctgaacatgagcaattacaaggagaagttctccacgctgctgtggctcgaggagatctacgcagagatggaactcaaggagtataacatgagtggcattattttaagacggaacggcgatcttcttgtgctcgaagttcctggacttgcagaaggtagaccatcgctgtacgccggagataagctgattctaaaaacacaagagtataatggacatgccatagaatacatcagttatgtcaccgaaattcacgaggaggacgtcactctgaagattaaccccgagtttgaacaggcatataactttgaacctatggacgttgagtttacctacaaccggacaacctcaagacggtgccactttgcccttgagcacgtaatccacctgggcgttaaagttcttttcccggaagaaattatcttgcagtcaccccaggtgacgggaaattggaatcatgcccaggatacaaaatcctccggccagtccacttctaaaaagaatagaaagacaatgaccgaccaagccgagcatggcacggaggagaggcgggtcggagacaaggaccttccagtcctggcacctttcactgcagagatgtcagattgggtggacgagatccagactccaaaagctcgaaagatggagttctttaaccctgtgctaaacgaaaaccagaaactcgctgttaaacgcatactcagtggcgactgtcggcctctcccctatatcctcttcggcccaccgggaacaggaaaaaccgtgaccatcattgaggccgtattgcaggtgcacttcgcactacctgactcccggattttagtgtgcgctccaagcaactccgctgccgacctggtttgcctgcgactccatgagtctaaagttctgcaaccagcaacaatggtccgcgttaacgctacgtgtcgctttgaagagatcgtgatcgacgccgtgaagccttactgccgagacggagaagacatatggaaggccagtcggtttagaataataataactacatgcagttcctctggactgttttaccagattggggtgcgagtggggcactttacacacgtgttcgtcgatgaggcaggtcaggcctcggagcctgagtgcttaataccccttggactgatgtctgacatctcgggccaaatcgtgctggcaggtgaccccatgcagctaggaccagtgatcaagagccgcctggcaatggcttacggcttgaatgtgtccttcctggaacggctgatgtcacgcccagcctatcagcgcgatgagaatgccttcggcgcttgcggtgcgcataaccccctactggttactaagcttgtgaagaactaccggagccatgaagccctgttgatgcttccatcgcggttgttttatcatcgcgagcttgaagtttgcgccgatccgaccgtcgtgacgtccctgctgggctgggagaaactccctaagaagggtttcccactgatctttcatggtgtccgcggttctgaggctcgcgaaggcaagtctccaagctggttcaatcccgctgaagctgtgcaggtgctgaggtattgctgcctcctagcacatagcatttcgagtcaagtatctgctagcgacattggcgtcattaccccttaccgtaaacaagtggagaagatcaggatcctcctgagaaatgtggacctcatggacataaaagttggtagtgttgaggaatttcagggccaggagtacctagtgattattatttcaaccgatccttgttttggagcactgctcgagtactccatcactaacggagtctacatgggctgtgaccttccacctgctctgcaatctcttcagaactgtggcgaaggcgtcgccgatcctagttaccctgtggtgccggaatcaacaggcccagagaaacaccaagagccaagttag

SEQ ID NO: 62273 - DNA, 3498 bp, Artificial Sequence
  derived and/or modified sequence
atgctgagcctggccgccaagctggtggccttcttctggagaaccgccgacacccccagagaggaggccggccagctggagcccgagctggccgagggcgacaccaagctgaagaccgtgagaggcgtggtgaccagatactgcagcgactacggcatgatcgacgacatgatctacttcagcagcgacgccgtgaccagcagagtgctgctgaacgtgggccaggaggtgatcgccgtggtggaggagaacaaggtgagcaacggcctgaaggccatcagagtggaggccgtgagcgacaagtgggaggacgacagcagaaaccacggcagccccagcgactgcggccccagagtgctgatcggctgcgtgaccagcctggtggagggcgccggctgcatcagccagaccacctacttcagcctggagagcgtgtgcgagggcttcgagccctgcaagggcgactgggtggaggccgagtacagaatcagacccggcacctggagcagcgaggccaccagcgtgaagcccctgagatacaagagagtggacaaggtgtgcatcagcagcctgtgcggcagaaacggcgtgctggaggagagcatcttcttcaccctggacagcctgaagctgcccgacggctacacccccagaagaggcgacgtggtgaacgccgtggtggtggagagcagccagagctgctacgtgtggagagccctgtgcatgaccctggtgaagagaagagacgccgcccccgtgcacgaggccacccacttctacggcaccatcctgctgaagaacaagggcgacatcgaggtgacccaggtgacccacttcggcaccctgaaggagggcagaagcaagaccatggtgatctggatcgagaacaagggcgacatcccccagaacctggtgagctgcaagctggccggctgggacaagagcaagcagttcagattccagatgctggacaaggaccagatgtgccccgtggtgagcttcgtgagcgtgcccgagaaggagaacagcagcgacgagaacatcaacagcctgaacagccacaccaagaacaagaccagccagatgagcgagagcagcctggtgaacaacagaggcatcagccccggcgactgcacctgcaagggcgagaacggcgagaaggacaacatcctgagcagaaagcagatgaccgagcccgagcccggcggcctggtgccccccggcggcaagaccttcatcgtggtgatctgcgacggcaagaaccccggcagatgcaaggagctgctgctgctgtgcttcagcgacttcctgatcggcagatacctggaggtgaacgtgatcagcggcgaggagagcctgatcgccgccagagagcccttcagctggaagaagctgaagagcagccaggccctgaccagcgccaagaccaccgtggtggtgaccgcccagaagagaaacagcagaagacagctgcccagcttcctgccccagtaccccatccccgacagactgagaaagtgcgtggagcagaagatcgacatcctgaccttccagcccctgctggccgagctgctgaacatgagcaactacaaggagaagttcagcaccctgctgtggctggaggagatctacgccgagatggagctgaaggagtacaacatgagcggcatcatcctgagaagaaacggcgacctgctggtgctggaggtgcccggcctggccgagggcagacccagcctgtacgccggcgacaagctgatcctgaagacccaggagtacaacggccacgccatcgagtacatcagctacgtgaccgagatccacgaggaggacgtgaccctgaagatcaaccccgagttcgagcaggcctacaacttcgagcccatggacgtggagttcacctacaacagaaccaccagcagaagatgccacttcgccctggagcacgtgatccacctgggcgtgaaggtgctgttccccgaggagatcatcctgcagagcccccaggtgaccggcaactggaaccacgcccaggacaccaagagcagcggccagagcaccagcaagaagaacagaaagaccatgaccgaccaggccgagcacggcaccgaggagagaagagtgggcgacaaggacctgcccgtgctggcccccttcaccgccgagatgagcgactgggtggacgagatccagacccccaaggccagaaagatggagttcttcaaccccgtgctgaacgagaaccagaagctggccgtgaagagaatcctgagcggcgactgcagacccctgccctacatcctgttcggcccccccggcaccggcaagaccgtgaccatcatcgaggccgtgctgcaggtgcacttcgccctgcccgacagcagaatcctggtgtgcgcccccagcaacagcgccgccgacctggtgtgcctgagactgcacgagagcaaggtgctgcagcccgccaccatggtgagagtgaacgccacctgcagattcgaggagatcgtgatcgacgccgtgaagccctactgcagagacggcgaggacatctggaaggccagcagattcagaatcatcatcaccacctgcagcagcagcggcctgttctaccagatcggcgtgagagtgggccacttcacccacgtgttcgtggacgaggccggccaggccagcgagcccgagtgcctgatccccctgggcctgatgagcgacatcagcggccagatcgtgctggccggcgaccccatgcagctgggccccgtgatcaagagcagactggccatggcctacggcctgaacgtgagcttcctggagagactgatgagcagacccgcctaccagagagacgagaacgccttcggcgcctgcggcgcccacaaccccctgctggtgaccaagctggtgaagaactacagaagccacgaggccctgctgatgctgcccagcagactgttctaccacagagagctggaggtgtgcgccgaccccaccgtggtgaccagcctgctgggctgggagaagctgcccaagaagggcttccccctgatcttccacggcgtgagaggcagcgaggccagagagggcaagagccccagctggttcaaccccgccgaggccgtgcaggtgctgagatactgctgcctgctggcccacagcatcagcagccaggtgagcgccagcgacatcggcgtgatcaccccctacagaaagcaggtggagaagatcagaatcctgctgagaaacgtggacctgatggacatcaaggtgggcagcgtggaggagttccagggccaggagtacctggtgatcatcatcagcaccgacccctgcttcggcgccctgctggagtacagcatcaccaacggcgtgtacatgggctgcgacctgccccccgccctgcagagcctgcagaactgcggcgagggcgtggccgaccccagctaccccgtggtgcccgagagcaccggccccgagaagcaccaggagcccagctag

SEQ ID NO: 62274 - protein, 125 aa, Artificial Sequence
  derived and/or modified sequence
MSDISGQVTKLVKNYRSHEALLMLPSRLFYHRELEVCADPTVVTSLLGWEKLPKKGFPLIFHGVRGSEAREGKSPSWFNPAEAVQVLRYCCLLAHSISSQVSASDIGVITPYRKQVRPAQARLVL

SEQ ID NO: 62275 - protein, 211 aa, Artificial Sequence
  derived and/or modified sequence
MSFLPVRSVIGGGDTKLKTVRGVVTRYCSDYGMIDDMIYFSSDAVTSRVLLNVGQEVIAVVEENKVSNGLKAIRVEAVSDKWEDDSRNHGSPSDCGPRVLIGCVTSLVEGAGCISQTTYFSLESVCEGFEPCKGDWVEAEYRIRPGTWSSEATSVKPLRYKRVDKVACRLVAPLCASGRPAIRGNLHGPGFSCMCWKPGKIKLCHGQREKK

SEQ ID NO: 62276 - protein, 1165 aa, Artificial Sequence
  derived and/or modified sequence
MSFLPVRSVIGGGDTKLKTVRGVVTRYCSDYGMIDDMIYFSSDAVTSRVLLNVGQEVIAVVEENKVSNGLKAIRVEAVSDKWEDDSRNHGSPSDCGPRVLIGCVTSLVEGAGCISQTTYFSLESVCEGFEPCKGDWVEAEYRIRPGTWSSEATSVKPLRYKRVDKVCISSLCGRNGVLEESIFFTLDSLKLPDGYTPRRGDVVNAVVVESSQSCYVWRALCMTLVKRRDAAPVHEATHFYGTILLKNKGDIEVTQVTHFGTLKEGRSKTMVIWIENKGDIPQNLVSCKLAGWDKSKQFRFQMLDKDQMCPVVSFVSVPEKENSSDENINSLNSHTKNKTSQMSESSLVNNRGISPGDCTCKGENGEKDNILSRKQMTEPEPGGLVPPGGKTFIVVICDGKNPGRCKELLLLCFSDFLIGRYLEVNVISGEESLIAAREPFSWKKLKSSQALTSAKTTVVVTAQKRNSRRQLPSFLPQYPIPDRLRKCVEQKIDILTFQPLLAELLNMSNYKEKFSTLLWLEEIYAEMELKEYNMSGIILRRNGDLLVLEVPGLAEGRPSLYAGDKLILKTQEYNGHAIEYISYVTEIHEEDVTLKINPEFEQAYNFEPMDVEFTYNRTTSRRCHFALEHVIHLGVKVLFPEEIILQSPQVTGNWNHAQDTKSSGQSTSKKNRKTMTDQAEHGTEERRVGDKDLPVLAPFTAEMSDWVDEIQTPKARKMEFFNPVLNENQKLAVKRILSGDCRPLPYILFGPPGTGKTVTIIEAVLQVHFALPDSRILVCAPSNSAADLVCLRLHESKVLQPATMVRVNATCRFEEIVIDAVKPYCRDGEDIWKASRFRIIITTCSSSGLFYQIGVRVGHFTHVFVDEAGQASEPECLIPLGLMSDISGQIVLAGDPMQLGPVIKSRLAMAYGLNVSFLERLMSRPAYQRDENAFGACGAHNPLLVTKLVKNYRSHEALLMLPSRLFYHRELEVCADPTVVTSLLGWEKLPKKGFPLIFHGVRGSEAREGKSPSWFNPAEAVQVLRYCCLLAHSISSQVSASDIGVITPYRKQVEKIRILLRNVDLMDIKVGSVEEFQGQEYLVIIISTVRSNEDRFEDDRYFLGFLSNSKRFNVAITRPKALLIVLGNPHVLVRLWRGGGRPLLPSGARIHRTREASGAQLICSG

SEQ ID NO: 62277 - DNA, 636 bp, Artificial Sequence
  derived and/or modified sequence
atgtcattcctgccggtgagaagcgtgataggagggggggacacaaaactgaagactgtgaggggggtggtgacacggtattgttctgattacggcatgatagatgatatgatctacttctccagcgatgcagtcacctcgagggtcctcttgaacgttggccaggaggtgatcgctgtcgtggaggagaacaaagtcagcaacgggctgaaggcgattcgtgtagaggctgtgtcggataagtgggaagacgacagtagaaatcacggatcacccagcgattgcggtccgagggtgctgatcggttgcgtgacctctctcgtggaaggcgcggggtgtatttcccaaactacctacttctcacttgagtccgtctgcgaagggttcgagccttgtaaaggagactgggtcgaagctgagtacagaatcagaccaggcacatggagcagtgaggccacgtccgtgaaacctttacgatataagcgggtcgataaggtggcatgtcgtctcgtggccccactctgcgccagcgggagacccgcgattagggggaacttgcacgggcccgggttcagttgtatgtgctggaaacccgggaagattaaattgtgtcatgggcaacgggaaaagaaatag

SEQ ID NO: 62278 - DNA, 3498 bp, Artificial Sequence
  derived and/or modified sequence
atgtccttcctccccgtgcgctctgtgatcggaggcggtgataccaagctgaagaccgtccgcggcgtggtcacaagatactgctccgattatgggatgattgacgatatgatctatttctcatcagatgccgtgacttctcgggtactgcttaatgtgggacaagaggtcatcgcggtggtggaggaaaacaaggtgtccaatggcctcaaagccataagagtggaagcagtgagcgacaaatgggaggatgactcgagaaaccatggatcccccagcgactgcggccctcgggtactgatcgggtgtgttacatctctggtggagggggctggatgcataagccagactacttacttttcactggaaagcgtttgcgaggggttcgaaccgtgcaagggcgattgggttgaggccgagtaccgaattagacccggcacgtggtcgtcagaggccaccagtgtcaaacctctaagatataagcgcgtcgataaggtgtgcatttcctctctgtgcggacgcaacggagtgttggaggaatcaatatttttcactcttgactccctcaagctccccgacggatacacaccaagaaggggcgatgtcgttaacgctgtagtggtggagtcctcccagagctgttatgtctggcgagctctctgtatgacacttgttaaaagacgggatgccgcacccgtgcatgaagccactcatttctatggtacgatcctcttaaagaacaaaggagatatagaggttacccaggtcacacattttgggacactcaaggaaggacggtccaagactatggtcatttggatagagaacaagggcgacataccacagaatttagtgtcctgcaagttagctggatgggataagtccaaacagtttcggtttcaaatgctcgataaagaccagatgtgccccgtagtctcatttgtaagcgttcccgaaaaggagaattcctcagacgagaacataaatagtctaaattcccacaccaaaaacaagacctcacagatgagcgagagctccttggtgaacaatcgcggcataagtccgggagactgtacttgtaagggcgagaatggcgaaaaggataatattctgagccgcaagcaaatgaccgaaccggagcctggcgggcttgtgcctcccggagggaagaccttcattgtagtgatctgcgacggcaaaaatccaggcaggtgtaaagagttgctgttgttgtgcttcagcgatttccttataggacgatacctggaggttaatgttatatctggtgaagagagcctcatcgcagcacgagagcccttcagctggaaaaaactcaagtcctcccaggcactgactagcgctaagacaactgttgtagttactgcccagaaaagaaacagtcgtcgacaactcccctccttcctaccccagtatcccattcccgatagacttagaaaatgtgtggagcagaagatcgatattttaacttttcaaccgttgctggcagaactactgaacatgtccaattacaaggagaaattctctacactgttgtggctggaggaaatttatgccgaaatggagttgaaggaatacaatatgtcggggatcatactaaggaggaacggggatctcctggtgctggaggtgcccggcttagctgaagggaggccctcattatatgctggggacaagctgattctaaagacgcaggagtacaatggccacgcaatagagtacattagttacgttaccgaaatccacgaagaagacgtgactctaaagataaaccccgaattcgagcaagcatataacttcgaaccgatggacgtcgaatttacatacaatcgaactacttcaagaagatgccacttcgccctggaacacgtgattcatctgggtgtcaaagtgctttttccagaggagattatcctgcagtcccctcaagttacaggcaactggaaccacgcacaggacaccaaaagtagcggccagagcacatcaaagaaaaatagaaagacaatgacagaccaggccgaacatggaactgaagagaggcgcgtaggggacaaggatctgcccgttttagccccctttactgctgaaatgtcagactgggttgacgaaatccaaacacccaaagcacgaaaaatggagttttttaatccagtcctgaatgagaaccagaagctggctgtgaagagaatcctgagtggagattgtaggcctctaccttatatcctttttggcccacctggcacagggaagaccgtcactattatcgaagccgtgcttcaggtgcacttcgcgctgccggattctcgcattctggtgtgcgctccgagcaactccgctgcagacttagtgtgtctgagactgcatgagtccaaagttcttcagccagcaacaatggttcgggtgaacgctacctgccgtttcgaagaaattgtgattgacgccgtgaaaccttactgtcgggacggagaggacatttggaaagcatctaggtttcggataatcatcaccacctgctcctcgagtggcctgttctaccagatcggagtgcgtgtgggccattttacccacgtcttcgtggatgaggcaggccaagcatctgaacctgagtgcctgatccctttagggctaatgtctgacatatcaggacagatcgtcctggcaggcgaccctatgcagctcggccccgttatcaagagtagattagcaatggcttatggcctgaatgtgtctttcctggagcgcctgatgagtaggcctgcttaccagagggatgagaatgcctttggtgcttgcggcgcccacaatccgctgctggtaacaaagctggtgaagaactaccggtcccatgaggccctcctgatgcttccatcccggttattttaccacagagagctcgaggtgtgtgccgaccctaccgttgttaccagtctcttgggatgggaaaagcttcccaagaaggggttcccactgatctttcatggcgttcgagggagtgaggcgcgcgagggcaagagcccttcctggttcaacccagctgaagctgttcaagtactgaggtactgttgtctgctggcacattcgatctcttcacaggtgtccgcgtccgacattggcgtgatcacaccctacagaaagcaagtggagaaaatcagaatccttctgcgcaacgtcgacctgatggacattaaggtgggctccgtggaggaattccaggggcaagaatatttggtgatcatcatttcgaccgtgagatcaaacgaggatcgttttgaggacgatagatattttctaggttttctgagcaactcaaaaaggtttaatgttgccatcacaagaccaaaagcattgctgattgtactgggaaatccacacgtgttagtccgcttgtggcgaggtggaggaaggcctctgcttcccagcggcgcccgaatacaccgcaccagggaggcctcaggagcgcagctgatctgttcggggtag

SEQ ID NO: 62279 - DNA, 636 bp, Artificial Sequence
  derived and/or modified sequence
atgtccttcctgcctgtgcgcagcgtcatcggcggcggggacaccaagctgaagacagtgcggggcgtggtgacccgctactgcagcgactatggcatgattgatgacatgatctacttcagcagtgatgctgtgaccagccgggtgctgctgaatgtgggccaggaggtgattgctgtggtggaggagaacaaggtgtccaatggcctgaaggccatccgggtggaggccgtgtctgacaagtgggaggatgacagcagaaatcatggcagccccagcgactgtggcccccgggtgctgattggctgtgtgaccagcctggtggagggcgccggctgcatcagccagaccacctacttcagcctggagagcgtgtgtgagggctttgagccctgcaagggggactgggtggaggccgagtaccgcatccggcccggcacctggagcagcgaggccacctctgtgaagcccctgcgctacaagagggtggacaaggtggcctgccgcctggtggcccccctgtgtgccagcggccggcctgccatccggggcaacctgcacggccctggcttcagctgcatgtgctggaagccaggcaagatcaagctgtgccacggccagcgggagaagaagtag

SEQ ID NO: 62280 - DNA, 3498 bp, Artificial Sequence
  derived and/or modified sequence
atgtccttcctgcctgtgcgcagcgtcatcggcggcggggacaccaagctgaagacagtgcggggcgtggtgacccgctactgcagcgactatggcatgattgatgacatgatctacttcagcagtgatgctgtgaccagccgggtgctgctgaatgtgggccaggaggtgattgctgtggtggaggagaacaaggtgtccaatggcctgaaggccatccgggtggaggccgtgtctgacaagtgggaggatgacagcagaaatcatggcagccccagcgactgtggcccccgggtgctgattggctgtgtgaccagcctggtggagggcgccggctgcatcagccagaccacctacttcagcctggagagcgtgtgtgagggctttgagccctgcaagggggactgggtggaggccgagtaccgcatccggcccggcacctggagcagcgaggccacctctgtgaagcccctgcgctacaagagggtggacaaggtgtgcatcagcagcctgtgtggcagaaatggagtgctggaggagagcatcttcttcaccctggacagcctgaagctgcctgatggctacacccccaggagaggagatgtggtgaatgctgtggtggtggagagcagccagagctgctacgtgtggagggccctgtgcatgaccctggtgaagagaagagatgctgcccctgtgcatgaggccacccacttctacggcaccatcctgctgaagaacaagggggacatcgaggtgacccaggtgacccacttcggcaccctgaaggagggccgcagcaagaccatggtgatctggattgaaaataaaggagacatcccccagaacctggtgtcctgcaagctggccggctgggacaagagcaagcagttccgcttccagatgctggacaaggaccagatgtgccctgtggtgtcctttgtgtctgtgcctgagaaggagaacagcagtgatgagaacatcaacagcctgaacagccacaccaagaacaagaccagccagatgtctgagagcagcctggtgaacaacagaggcatcagccctggggactgcacctgcaagggagaaaatggagagaaggacaacatcctgagcaggaagcagatgacagagcctgagcccggcggcctggtgcccccaggcggcaagaccttcatcgtggtgatctgtgatggcaagaaccctggccgctgcaaggagctgctgctgctgtgcttcagtgacttcctgattggccgctacctggaggtgaatgtcatcagcggggaggagagcctgattgctgcccgggagcccttctcctggaagaagctgaagagcagccaggccctgaccagcgccaagaccaccgtggtggtgacagcccagaagaggaacagccggcggcagctgcccagcttcctgccccagtaccccatcccagaccggctgaggaaatgtgtggagcagaagattgacatcctgaccttccagcccctgctggccgagctgctgaacatgagcaactacaaggagaagttcagcaccctgctgtggctggaggagatctatgcagagatggagctgaaggagtacaacatgagcggcatcatcctgcggagaaatggagacctgctggtgctggaggtgcccggcctggccgagggccggcccagcctgtatgctggggacaagctgatcctgaagacccaggagtacaacggccacgccatcgagtacatctcctatgtgacagagatccacgaggaggatgtgaccctgaagatcaaccctgagtttgagcaggcctacaactttgagcccatggatgtggagttcacctacaacagaaccaccagccgccgctgccactttgccctggagcacgtgatccacctgggcgtgaaggtgctcttccctgaggagatcatcctgcagagcccccaggtgactggaaactggaaccacgcccaggacaccaagagcagcggccagagcaccagcaagaagaacaggaagaccatgacagaccaggccgagcacggcacagaggagcggcgggtgggggacaaggacctgcctgtgctggcccccttcaccgctgagatgtctgactgggtggatgagatccagacccccaaggccaggaagatggagttcttcaaccctgtgctgaatgaaaaccagaagctggccgtgaagaggatcctgagcggggactgccggcccctgccctacatcctgtttggacctcctggcaccgggaagacagtgaccatcattgaagctgtgctgcaggtgcactttgccctgcctgacagccgcatcctggtgtgtgcccccagcaacagcgctgctgacctggtgtgcctgcggctgcacgagagcaaggtgctgcagcctgccaccatggtgcgggtgaatgccacctgccgctttgaggagatcgtgattgatgctgtgaagccctactgcagagatggagaggacatctggaaggccagccgcttccgcatcatcatcaccacctgcagcagcagcggcctcttctaccagattggagtgcgggtgggccacttcacccacgtgtttgtggatgaggccggccaggccagcgagccagaatgtctcatccccctgggcctgatgtctgacatcagcggccagatcgtgctggccggggaccccatgcagctgggccctgtgatcaagagccggctggccatggcctacggcctgaatgtgtccttcctggagcggctgatgagcaggcctgcctaccagagagatgaaaatgccttcggggcctgtggggcccacaaccccctgctggtgaccaagctggtgaagaactaccgcagccatgaggccctgctgatgctgcccagccgcctcttctaccaccgggagctggaggtgtgtgccgaccccaccgtggtgaccagcctgctgggctgggagaagctgcccaagaagggcttccccctcatcttccatggagtgcggggcagcgaggcccgggagggcaagagccccagctggttcaacccagctgaggccgtgcaggtgctgcgctactgctgcctgctggcccacagcatcagcagccaggtgtctgccagtgacattggagtcatcaccccctacaggaagcaggtggagaagatccgcatcctgctgagaaatgtggacctgatggacatcaaggtgggctctgtggaggagttccagggccaggagtacctggtgatcatcatcagcacagtgcgcagcaatgaagatagatttgaagatgaccgctacttcctgggcttcctgagcaacagcaagcgcttcaacgtggccatcacccggcccaaggccctgctgattgtgctgggcaacccccacgtgctggtgcggctgtggaggggcggcggccggcccctgctgcccagcggggcccgcatccacaggacccgggaggccagcggggcccagctgatctgcagcggctag

SEQ ID NO: 62281 - DNA, 853 bp, Artificial Sequence
  derived and/or modified sequence
ataggtctttgagtgcagtgcgggccggcaggcaacgctgggcccggcctttcctcatctccgctggcggggatccccgttcgcctcaggaggcttccgaccccacagcatcccgccgctctgggcgcccgtcctctgtgaggtctctccggtgacaccagcccctcttcccgccctcactttgtgtgtttacgccgagcagctgccaagtcgtctctccatgtcgttcctccctgtccgcagcgtcattggcggtggtgacactaagctgaaaactgtacggggtgtcgtgacaaggtactgcagcgattatggcatgattgatgatatgatctacttctccagtgatgctgtgactagcagagtgcttctgaatgttggacaggaagtgattgcagttgtggaagaaaataaagtgtccaatggactgaaagcaatcagggtagaagctgtctctgataagtgggaagacgacagcagaaaccatgggagtccctcagactgcggcccccgagtgttgattggctgtgtgacttccctggtggagggcgcaggctgtatcagtcagaccacctacttctctctggagagtgtgtgcgaaggcttcgagccctgcaagggagactgggtggaggctgagtaccggatccggcctggcacgtggagcagcgaagccacctcagtgaagccactgagatacaagcgcgtggacaaggtagcgtgccgactagtggctcctctctgtgcttctggcagacctgccatcaggggtaacttgcacggcccaggcttctcctgcatgtgttggaagcctggaaaaataaagctttgtcatggccaaagagaaaaaaaa

SEQ ID NO: 62282 - DNA, 3941 bp, Artificial Sequence
  derived and/or modified sequence
ataggtctttgagtgcagtgcgggccggcaggcaacgctgggcccggcctttcctcatctccgctggcggggatccccgttcgcctcaggaggcttccgaccccacagcatcccgccgctctgggcgcccgtcctctgtgaggtctctccggtgacaccagcccctcttcccgccctcactttgtgtgtttacgccgagcagctgccaagtcgtctctccatgtcgttcctccctgtccgcagcgtcattggcggtggtgacactaagctgaaaactgtacggggtgtcgtgacaaggtactgcagcgattatggcatgattgatgatatgatctacttctccagtgatgctgtgactagcagagtgcttctgaatgttggacaggaagtgattgcagttgtggaagaaaataaagtgtccaatggactgaaagcaatcagggtagaagctgtctctgataagtgggaagacgacagcagaaaccatgggagtccctcagactgcggcccccgagtgttgattggctgtgtgacttccctggtggagggcgcaggctgtatcagtcagaccacctacttctctctggagagtgtgtgcgaaggcttcgagccctgcaagggagactgggtggaggctgagtaccggatccggcctggcacgtggagcagcgaagccacctcagtgaagccactgagatacaagcgcgtggacaaggtctgcatctctagcctctgtggaaggaacggggtgttagaggaaagcatcttctttaccttggactccttgaaactgccagatgggtacacaccccggagaggtgacgtggtcaatgcagtggtggtggagagcagccagtcatgctatgtctggagggcactttgtatgaccctagtgaagaggcgagacgccgcccctgttcatgaggccactcatttctatggaacgattttgctgaagaacaaaggtgatattgaagttacacaggtgacgcattttggaaccctaaaggaaggaagaagtaaaaccatggtgatctggatagagaataaaggagacattcctcaaaacttagtcagctgtaaactggctggctgggataaatctaaacaattcagattccaaatgctggataaagaccagatgtgccccgtggtatcttttgtttctgttcctgagaaggagaattcatcagatgaaaatattaattcattaaatagccacacaaaaaacaaaacctctcagatgtcggagagcagtttggtgaacaacagaggaatctctccaggtgattgtacctgtaaaggagaaaatggagaaaaagacaacattctatcaaggaagcagatgacagagcctgagcctggggggcttgtccctccagggggaaaaaccttcattgtggtcatctgtgacggaaaaaatcctggccgctgcaaggagctccttttgctctgtttttccgatttcctaattgggcgataccttgaagtaaatgttatcagtggggaggagtcactaattgctgcgcgcgaaccattttcttggaaaaagcttaaaagttcacaagcgttaacatccgcaaaaactacagttgttgtgaccgcacagaaaaggaactcaagacgacaacttccaagttttcttccccaatatccaatcccagatagacttagaaaatgtgtggaacaaaaaattgacatcctgactttccagccattacttgcagagcttctgaacatgtcaaattacaaggagaagttttcgactttgctgtggcttgaggagatttatgcagaaatggaactgaaagagtataacatgagcgggatcatcttaagaaggaatggggatctgctggttctggaggtcccagggttggccgaagggaggccttctctctacgcaggtgataaactgattttaaaaactcaagagtacaatggacatgccatcgaatacatcagctacgtgactgagattcatgaagaagatgtaactcttaaaattaatccagaatttgaacaagcctataactttgaacctatggatgtggaatttacatataataggaccacaagcagacggtgtcactttgcacttgaacacgtcatccacttaggtgtaaaagtgttgtttccagaagaaattattttacagtctccacaagtgacgggaaattggaaccatgcacaagacaccaaaagcagtggacagtccaccagcaaaaagaataggaaaacaatgacggaccaagctgagcatggaacagaggagaggcgtgttggtgacaaggacctgccggtgctggcaccctttactgcagagatgagcgattgggtagatgaaattcagacccctaaagcaagaaagatggagtttttcaacccagtgctaaatgaaaatcagaagttagcagttaaaaggattctgagtggtgactgccgtcccctcccgtatattctctttggacctcctggtactggaaagacagtgacaataatagaggctgttttacaggtacactttgccttgccggacagtcggattttagtctgtgcgccctccaacagtgctgctgacctcgtgtgtctgcggctgcacgagagcaaggtgctacagccggccaccatggtccgggtgaacgccacctgcaggttcgaggagatagttattgacgccgtcaaaccgtattgcagagacggagaagacatctggaaagcctcacgcttccggataatcatcaccacatgcagcagctcagggctgttttaccaaataggagtgagagttgggcacttcactcacgtgtttgtggacgaggctgggcaggcaagtgagccggaatgcctcattcctctggggctgatgtcggacatcagtggccagatcgtgctggcaggagaccccatgcagctcggcccagtcattaagtccagactcgccatggcctatgggctgaacgtgtcctttttggaacggctgatgtctcgacccgcgtaccagagggacgaaaatgctttcggtgcttgtggcgcacataatcccctgttggtcacaaagctggtgaagaactaccggtcccacgaggccctgctgatgctgccctcacggctgttctaccacagggaactcgaggtctgtgcggaccccacagtggtgacctccttgctgggctgggagaagttgcctaagaaaggcttccctctcatcttccatggtgtgcggggcagcgaggcacgggagggaaaaagcccatcgtggttcaacccggccgaggccgtccaggtcctgcgctactgctgcctcctggcccacagcatctccagtcaggtgtctgccagcgacattggcgtcatcacgccctaccggaagcaggtggagaaaatcagaattcttttgcgtaatgttgatctgatggatataaaggttggatcagtagaggagtttcaaggacaagagtatctggtcatcatcatttcgaccgtacggtcaaatgaagatagatttgaagatgatcgatattttttgggtttcttgtccaactcaaaaagatttaatgttgcaatcaccagacccaaagctttgctgatagtgctgggaaacccccatgttctcgttcgactgtggcgagggggtggcagacccctcctacccagtggtgccagaatccacaggaccagagaagcatcaggagcccagctgatctgcagtggctgacagcagggaggccatgtgctcagcctggccacgttgccgttacagtctgctccgtggctcctgtggcctgcccttgtctcgcagccaggcagggtcgtgtgtgggtgtggggctgccaggttggacgcagctgctgctgccctgactttggcatatgccagcctgttcctgccacagggcagtcactgccgcctaccctgaaataaaccctcgagtgaccccc

SEQ ID NO: 62283 - DNA, 636 bp, Artificial Sequence
  derived and/or modified sequence
atgagcttcctgcccgtgcggagcgtgatcggcggcggcgacaccaagctcaaaacagtccgaggggtcgttacaaggtactgctctgactatggcatgatcgacgacatgatatacttctcaagtgacgccgttacctcccgagtgttgcttaatgtgggtcaggaggttatcgccgttgtagaagagaacaaggtctccaacggtctgaaggccattcgtgtggaggctgtgagcgacaagtgggaggatgatagtaggaatcacggaagcccgagcgattgtggccctcgggtgctgatcggatgtgtcacctcgttggttgaaggtgccggctgcatttctcagactacttacttctccttggagtcagtttgtgagggattcgaaccatgtaagggagattgggtagaagcagaataccgcatccgtcccggcacctggtcttcagaggctacgtctgtgaaaccgctgcgctataagagggtggacaaagttgcatgtcggttagtggcccccctgtgtgccagcggccggccagcgatccgtggcaacctccacggtccgggtttttcctgtatgtgttggaagcccgggaagatcaagctctgccacgggcagcgcgagaaaaaatag

SEQ ID NO: 62284 - DNA, 3498 bp, Artificial Sequence
  derived and/or modified sequence
atgagcttcctgcccgtgcggagcgtgatcggcggcggcgacaccaagttaaaaacagttcgtggagtcgtgacacggtactgttccgactacggcatgatcgatgatatgatctacttctcgtctgacgcggtgaccagcagagtcctgttgaatgtaggacaggaagtcattgctgtggttgaagagaataaagtgagcaacggcctgaaagcaatcagggtggaggctgtgtccgataaatgggaagatgactcaagaaatcatggaagcccatctgattgtggtccccgggtgctcattggttgtgtgacaagtctcgtggaaggtgccgggtgtatctctcaaactacatacttctccctggaaagcgtttgcgagggttttgaaccttgtaagggcgactgggtggaggctgaatatcggatacgcccgggaacctggtcatcagaggctacgtcagtaaagccactgagatataagcgggtagacaaggtctgtatttcaagcctgtgcgggcgcaatggcgtgttggaagaaagcatcttttttactttggacagtcttaaacttccagatggctacactccaagaagaggcgatgttgtgaatgctgtggtggtggagtcaagtcaaagctgctatgtctggagggccctgtgtatgacattggttaagagaagagatgccgcgccagtccacgaggctactcatttctacggaactatcctgctaaagaataagggagacatcgaagtgacacaggttactcattttggaacgcttaaagagggtaggtctaagactatggtgatttggatcgagaacaagggcgacattccccagaacctcgtgtcatgcaagttagccggatgggacaaaagtaaacagttcaggtttcagatgcttgacaaagatcagatgtgccctgtagtgagttttgtatccgtacccgagaaagagaactcttcggatgagaatatcaattctctgaactcgcacacaaaaaataagacgtcacagatgtcagaatcaagtcttgtgaataacaggggcatttctccgggcgattgcacgtgtaaaggcgaaaatggtgaaaaggacaacatactgtctcgtaagcaaatgacggagccagagcccgggggacttgtgccacccggaggcaagaccttcatcgtggtaatatgtgacgggaagaaccccggaagatgcaaagaactgcttctcctgtgcttttccgacttccttatcggacgttatctcgaggtcaatgtgatttctggcgaggagtctctcatcgctgcacgcgagcccttctcctggaaaaagctcaagagttcccaggcattaacttccgctaaaacaactgtagtggttacagcccagaagaggaacagccgtaggcagctcccttcatttctgccacagtacccaattccagacagactaagaaaatgcgtggagcagaaaattgacatactcacatttcagcccctgctggcagaactgctcaatatgtcaaactacaaggagaaattcagcactctcttgtggttagaagagatttatgcggagatggaactgaaggaatacaacatgagcggcataattctgcgcagaaatggagacctgttggtactagaagtcccaggcttggccgagggacgcccaagtttgtacgccggcgacaaactgatactcaagacccaggagtataacggtcacgcaatagagtacattagttacgtgacggagatccacgaagaagacgttactctcaaaatcaaccctgaattcgagcaggcctacaatttcgagccgatggatgtggaattcacatacaataggacgacctcacggaggtgtcattttgcgctggagcacgttatccatctcggcgtcaaggtcctcttccccgaagagataattcttcagagtccacaagtcacaggcaattggaatcatgcacaagacaccaagtcaagcggccaaagtacctccaaaaagaataggaaaacgatgaccgatcaggctgaacatggcacagaggagaggagggttggagacaaggatttgcctgtgctggcaccgtttacagcagagatgagcgactgggtcgacgaaatccagaccccaaaggcccggaagatggagttttttaatccagttctaaacgaaaatcagaagctagcagttaagagaatattgtctggggactgtcggccgctgccttacatactcttcggccccccaggaactggcaaaacagtgactattattgaggccgtactgcaggtgcactttgcccttcctgactcccgcatcctggtctgtgccccttccaattcggcagccgaccttgtgtgcctgcgcctgcatgaaagcaaggtcctgcagcccgccactatggtgcgagtgaacgcaacttgccgtttcgaagaaattgtgatagacgctgtgaaaccgtactgcagggatggcgaggacatttggaaggcatctcggttccgtatcatcatcactacatgtagctccagcggactgttctatcagatcggagtccgggtgggccactttacacacgtctttgtggatgaggctggccaagcaagcgaaccggaatgtttaattcctctgggtctgatgagtgatatttctggccaaattgttctggcgggcgaccccatgcaactcggtccagttataaagtctcgccttgccatggcatacggcctcaatgtgtctttcctcgagcgcctgatgagccgacctgcatatcagagagacgagaacgcgttcggggcttgcggggcccacaatcctttgttggtcaccaaactcgtcaaaaactatagatctcatgaagccctgcttatgctacctagtaggctgttttaccaccgggaactggaggtgtgtgctgacccaactgtggtgacatctctgctgggctgggagaaattacccaaaaaggggttcccattgatctttcacggcgtccgcggctccgaggcccgggaaggtaagagcccctcatggttcaatccagcagaggcagtccaagtccttaggtactgttgcctgctggcacacagcatcagctcacaagtcagcgccagcgacattggcgttatcaccccttacaggaaacaggtcgagaagatccgaatacttctcaggaacgtggacctgatggacattaaggttggaagtgtggaagaatttcagggccaggagtacctcgtgatcattattagcacagtaagatcaaatgaggatcggttcgaagacgatcgctatttcctagggttcctgtcgaactcaaagcgtttcaatgtggccatcaccagacccaaggctttattgattgtccttggaaatcctcatgtcttagttcggctctggcgcggaggtggaagacccctactaccttcaggcgctcgtatccaccggacccgcgaggcaagtggggcccagctgatctgctccggctag

SEQ ID NO: 62285 - DNA, 636 bp, Artificial Sequence
  derived and/or modified sequence
atgtcgttccttccagtgcgaagcgttatcggcggtggcgataccaaactgaagacggtgagaggggtcgtaacccgctattgttccgattacgggatgatcgacgacatgatctacttcagttctgacgcggtaacctctagggttctgttaaacgtgggccaggaagtgatcgccgtggtggaggagaacaaagttagtaacggcctgaaagcaattcgcgtcgaagctgtttctgataagtgggaggatgactccagaaaccacgggtccccctctgattgcggcccaagggtgctgatcggctgtgtgacctccctggtggagggcgctggatgtattagccagactacctactttagtctggagtcagtctgcgaggggtttgaaccctgtaaaggtgactgggtagaggcggagtataggattaggcccggtacgtggtcaagtgaggccacgtccgtcaaaccgctcagatacaagcgggtggataaggtcgcatgccgtctggtcgctccgctctgcgcctcaggtcgcccagccatccgcggtaatttgcacggacccggatttagctgcatgtgctggaaacccggtaagatcaaactgtgtcacggccagagagaaaagaagtag

SEQ ID NO: 62286 - DNA, 3498 bp, Artificial Sequence
  derived and/or modified sequence
atgtccttcctgccggtgaggagtgtgatcggcggaggtgacaccaagctgaagacagtaaggggtgttgtgacaaggtattgctcagactacgggatgatcgatgacatgatttattttagctctgacgctgttacctctcgggtcttgctcaacgtggggcaggaggtgatcgccgttgtggaggagaataaagtgagtaatggcttgaaggctatcagagtggaggccgtgtctgacaagtgggaagacgactccagaaatcacggttctccaagcgactgcggccctcgagttctgatcggctgtgtgactagcctggtggagggtgcagggtgcattagtcagaccacttatttttctctcgagtccgtttgtgagggtttcgagccttgcaagggcgactgggtagaggccgagtatagaattaggccgggtacctggtcctctgaggccacaagcgtcaagccactgcgatacaaacgggtggataaggtttgcatatcgtccctgtgcggtcggaacggagtgctagaagaatccattttctttaccctggactccctgaagcttcccgacggatacacgcctcggaggggagatgtggtgaatgctgtggtggtcgagtcatcgcaaagctgctacgtgtggcgggcactgtgtatgaccctggtgaaaaggcgagatgccgcaccagtccatgaggcgactcacttctatggaacaattcttctgaaaaacaaaggcgatatcgaggtgacacaagtcacccacttcggcaccctgaaagagggaagaagcaagacgatggtgatctggatcgaaaacaaaggcgatatccctcagaacctggtcagctgcaagctggctgggtgggataagtccaagcagtttaggtttcagatgctggacaaggatcagatgtgtccggtcgtgtcattcgtatccgttccagaaaaagagaatagcagcgatgaaaatatcaactccctgaattcacatacgaaaaataaaacgtcacagatgtctgagagtagtctagtgaacaatcgcggaatcagtccgggagactgcacatgcaagggcgagaacggcgaaaaggacaacattctgagtcgcaagcagatgacagaacctgaacctggaggcctggtccctccaggtgggaaaaccttcatcgtcgtcatatgtgacgggaaaaatcccggtcgatgcaaggaactccttctgctatgcttttctgattttctcattgggcgttacctggaggtcaatgtgatctcaggggaagaatcgcttattgccgctagggagcccttcagctggaaaaagctcaagtcgtcacaggcattaacatccgcaaaaacaacggtggtggtgacagcacagaagagaaattccaggcgtcagcttcctagcttcctccctcagtatccaattcctgatagactgcgaaaatgtgtggagcagaaaattgacattctgactttccaacccctactagctgagctgctcaatatgagcaactataaggagaaatttagcaccttactctggctcgaggagatctacgccgagatggaactcaaggaatacaacatgagcggaatcatcctccgccgaaacggcgacctgctcgtcctggaagtcccaggccttgcagaaggtagaccctcattgtacgctggcgataaactgatactgaagactcaggaatacaacggccacgccatcgagtacatcagttacgtgaccgagatccacgaggaggatgtgacacttaagatcaacccagagttcgaacaggcctataatttcgaacccatggacgtcgaatttacttacaacaggaccacttcccgacgatgccacttcgcacttgagcacgtgatccatcttggggttaaggtgttattccccgaagagattatccttcagtccccacaagtaacaggcaattggaatcacgcccaggacaccaaaagctctgggcaaagcactagcaaaaagaaccgtaagaccatgactgaccaggctgaacatggaaccgaagaacgtagggtaggcgacaaggatctaccagtgctggcaccatttaccgcggagatgtcagactgggtcgacgaaatccagacaccaaaggcccgtaagatggagttctttaaccccgtcctgaatgaaaatcaaaagcttgccgtcaagcgtatcctgagcggcgattgtcgacctctgccgtacattctgttcggacctccaggcacaggaaaaaccgttacgatcatcgaggcggtgcttcaggtgcacttcgcgttacccgactcacggatcctcgtgtgtgcaccgagcaactccgcggcagacctggtttgcttgagactgcacgaatccaaagttctgcaacccgcaaccatggttagagttaacgccacctgtcgcttcgaggaaatcgtgatcgatgctgtgaagccttactgtagagacggagaggatatctggaaggcaagcagatttcgcattatcattactacatgcagtagctctgggctgttttaccagatcggcgtccgagtgggccatttcacacatgtgttcgtagacgaggccggtcaggcgtctgagcccgagtgtttgatcccacttggtctcatgtcggacatctctgggcagattgtcttggcgggagatcccatgcaactgggacccgtgatcaagtcccgtctcgctatggcttacgggctgaatgtgagtttcctggagcgactgatgtcgcggcctgcctatcagagggatgagaacgcttttggcgcttgtggggcacacaaccctctgctggttaccaaactcgttaagaattacagaagccatgaggccctacttatgctgccatccagactgttttaccatagggaactggaggtatgtgctgatccgaccgtggtgactagcctgctggggtgggaaaagcttccaaaaaaggggtttcctctcattttccatggggtgcggggaagcgaagccagagaaggcaagtcaccaagttggttcaatccagctgaagctgtgcaggtgctcaggtactgttgtttgctggctcattctatctcgtctcaggtctcagcttcggacatcggggttatcaccccttacagaaaacaggtggagaaaatccgaatcctgctgagaaatgtggacctgatggatatcaaagtgggatctgttgaggagtttcagggtcaggaatacctcgtcatcattataagcacagtgaggtcaaatgaagatcgctttgaagacgaccgttactttctaggattcctgtccaacagcaagcggttcaacgtggccatcacccgccctaaagccctcctcattgtgcttggtaatccccatgttctggttcgactgtggcgtggcggaggcaggccactgttgcccagtggggctaggatccataggacgcgggaggcctccggggcacagttgatctgctccgggtag

SEQ ID NO: 62287 - DNA, 636 bp, Artificial Sequence
  derived and/or modified sequence
atgagcttcctgcccgtgagaagcgtgatcggcggcggcgacaccaagctgaagaccgtgagaggcgtggtgaccagatactgcagcgactacggcatgatcgacgacatgatctacttcagcagcgacgccgtgaccagcagagtgctgctgaacgtgggccaggaggtgatcgccgtggtggaggagaacaaggtgagcaacggcctgaaggccatcagagtggaggccgtgagcgacaagtgggaggacgacagcagaaaccacggcagccccagcgactgcggccccagagtgctgatcggctgcgtgaccagcctggtggagggcgccggctgcatcagccagaccacctacttcagcctggagagcgtgtgcgagggcttcgagccctgcaagggcgactgggtggaggccgagtacagaatcagacccggcacctggagcagcgaggccaccagcgtgaagcccctgagatacaagagagtggacaaggtggcctgcagactggtggcccccctgtgcgccagcggcagacccgccatcagaggcaacctgcacggccccggcttcagctgcatgtgctggaagcccggcaagatcaagctgtgccacggccagagagagaagaagtag

SEQ ID NO: 62288 - DNA, 3498 bp, Artificial Sequence
  derived and/or modified sequence
atgagcttcctgcccgtgagaagcgtgatcggcggcggcgacaccaagctgaagaccgtgagaggcgtggtgaccagatactgcagcgactacggcatgatcgacgacatgatctacttcagcagcgacgccgtgaccagcagagtgctgctgaacgtgggccaggaggtgatcgccgtggtggaggagaacaaggtgagcaacggcctgaaggccatcagagtggaggccgtgagcgacaagtgggaggacgacagcagaaaccacggcagccccagcgactgcggccccagagtgctgatcggctgcgtgaccagcctggtggagggcgccggctgcatcagccagaccacctacttcagcctggagagcgtgtgcgagggcttcgagccctgcaagggcgactgggtggaggccgagtacagaatcagacccggcacctggagcagcgaggccaccagcgtgaagcccctgagatacaagagagtggacaaggtgtgcatcagcagcctgtgcggcagaaacggcgtgctggaggagagcatcttcttcaccctggacagcctgaagctgcccgacggctacacccccagaagaggcgacgtggtgaacgccgtggtggtggagagcagccagagctgctacgtgtggagagccctgtgcatgaccctggtgaagagaagagacgccgcccccgtgcacgaggccacccacttctacggcaccatcctgctgaagaacaagggcgacatcgaggtgacccaggtgacccacttcggcaccctgaaggagggcagaagcaagaccatggtgatctggatcgagaacaagggcgacatcccccagaacctggtgagctgcaagctggccggctgggacaagagcaagcagttcagattccagatgctggacaaggaccagatgtgccccgtggtgagcttcgtgagcgtgcccgagaaggagaacagcagcgacgagaacatcaacagcctgaacagccacaccaagaacaagaccagccagatgagcgagagcagcctggtgaacaacagaggcatcagccccggcgactgcacctgcaagggcgagaacggcgagaaggacaacatcctgagcagaaagcagatgaccgagcccgagcccggcggcctggtgccccccggcggcaagaccttcatcgtggtgatctgcgacggcaagaaccccggcagatgcaaggagctgctgctgctgtgcttcagcgacttcctgatcggcagatacctggaggtgaacgtgatcagcggcgaggagagcctgatcgccgccagagagcccttcagctggaagaagctgaagagcagccaggccctgaccagcgccaagaccaccgtggtggtgaccgcccagaagagaaacagcagaagacagctgcccagcttcctgccccagtaccccatccccgacagactgagaaagtgcgtggagcagaagatcgacatcctgaccttccagcccctgctggccgagctgctgaacatgagcaactacaaggagaagttcagcaccctgctgtggctggaggagatctacgccgagatggagctgaaggagtacaacatgagcggcatcatcctgagaagaaacggcgacctgctggtgctggaggtgcccggcctggccgagggcagacccagcctgtacgccggcgacaagctgatcctgaagacccaggagtacaacggccacgccatcgagtacatcagctacgtgaccgagatccacgaggaggacgtgaccctgaagatcaaccccgagttcgagcaggcctacaacttcgagcccatggacgtggagttcacctacaacagaaccaccagcagaagatgccacttcgccctggagcacgtgatccacctgggcgtgaaggtgctgttccccgaggagatcatcctgcagagcccccaggtgaccggcaactggaaccacgcccaggacaccaagagcagcggccagagcaccagcaagaagaacagaaagaccatgaccgaccaggccgagcacggcaccgaggagagaagagtgggcgacaaggacctgcccgtgctggcccccttcaccgccgagatgagcgactgggtggacgagatccagacccccaaggccagaaagatggagttcttcaaccccgtgctgaacgagaaccagaagctggccgtgaagagaatcctgagcggcgactgcagacccctgccctacatcctgttcggcccccccggcaccggcaagaccgtgaccatcatcgaggccgtgctgcaggtgcacttcgccctgcccgacagcagaatcctggtgtgcgcccccagcaacagcgccgccgacctggtgtgcctgagactgcacgagagcaaggtgctgcagcccgccaccatggtgagagtgaacgccacctgcagattcgaggagatcgtgatcgacgccgtgaagccctactgcagagacggcgaggacatctggaaggccagcagattcagaatcatcatcaccacctgcagcagcagcggcctgttctaccagatcggcgtgagagtgggccacttcacccacgtgttcgtggacgaggccggccaggccagcgagcccgagtgcctgatccccctgggcctgatgagcgacatcagcggccagatcgtgctggccggcgaccccatgcagctgggccccgtgatcaagagcagactggccatggcctacggcctgaacgtgagcttcctggagagactgatgagcagacccgcctaccagagagacgagaacgccttcggcgcctgcggcgcccacaaccccctgctggtgaccaagctggtgaagaactacagaagccacgaggccctgctgatgctgcccagcagactgttctaccacagagagctggaggtgtgcgccgaccccaccgtggtgaccagcctgctgggctgggagaagctgcccaagaagggcttccccctgatcttccacggcgtgagaggcagcgaggccagagagggcaagagccccagctggttcaaccccgccgaggccgtgcaggtgctgagatactgctgcctgctggcccacagcatcagcagccaggtgagcgccagcgacatcggcgtgatcaccccctacagaaagcaggtggagaagatcagaatcctgctgagaaacgtggacctgatggacatcaaggtgggcagcgtggaggagttccagggccaggagtacctggtgatcatcatcagcaccgtgagaagcaacgaggacagattcgaggacgacagatacttcctgggcttcctgagcaacagcaagagattcaacgtggccatcaccagacccaaggccctgctgatcgtgctgggcaacccccacgtgctggtgagactgtggagaggcggcggcagacccctgctgcccagcggcgccagaatccacagaaccagagaggccagcggcgcccagctgatctgcagcggctag

SEQ ID NO: 62289 - DNA, 378 bp, Artificial Sequence
  derived and/or modified sequence
atgagtgatatctccgggcaggttacaaaactagttaagaattatcgaagccatgaggccctgcttatgttaccgtcccgactcttctatcacagggaactcgaggtttgtgccgatcctaccgttgtgacgtctctccttgggtgggagaagctcccgaaaaagggcttccctttgatattccacggtgttaggggatctgaggcacgggagggtaagtctccctcctggttcaaccccgccgaagcagtccaggtcttacgatactgctgcctgttagcccacagtattagctctcaggtttctgccagcgacattggcgttattacaccttaccggaaacaagttcggcctgcacaggcacggctagtcctgtag

SEQ ID NO: 62290 - DNA, 378 bp, Artificial Sequence
  derived and/or modified sequence
atgtctgatattagcgggcaggttaccaaactggtgaaaaattacagaagtcacgaggcccttctgatgctccccagtcggcttttctaccacagggaactagaggtttgcgcagaccctacagttgtcacgtcactgctggggtgggagaagctccccaaaaaaggctttccccttatcttccacggcgtgcgtggcagcgaagcccgggaaggaaagtcaccaagctggttcaatccagccgaagcggtccaggtgctccgttattgctgcttgctggctcacagtatctcttcccaggtttctgccagcgacatcggggtcatcacgccttaccgcaaacaggtccggcctgctcaagccaggctcgtgctgtag

SEQ ID NO: 62291 - DNA, 1017 bp, Artificial Sequence
  derived and/or modified sequence
atgtttcgcgtgggccattttacgcacgtattcgtggacgaggcgggacaggcctctgagccagagtgtctgatccctctgggcctcatgagcgatatttccggacagattgtgctggccggggacccaatgcaactggggcctgtcattaagagtcgcctggccatggcatacgggctcaatgtcagcttcctcgagcgcctgatgtcccgccccgcttaccagcgggatgaaaatgcttttggcgcctgcggagctcataacccactccttgtgaccaaattagtaaaaaattaccgatctcacgaggccctgttgatgctgccatcacgattgttctaccatcgcgagcttgaggtgtgcgcagaccccacagtcgttacctccctccttggatgggagaaactcccgaagaaaggctttccgttgattttccacggcgtgcggggttcagaggctagagaaggcaagagccccagttggtttaacccggccgaggcagttcaggtgctgaggtactgctgcctgttggctcactctatctccagccaggttagtgcctcagacataggggttattacgccatatagaaaacaggtcgagaagatccgcatcctcctcagaaacgttgatctgatggacataaaggtaggcagtgtcgaagagtttcaagggcaggagtacttagtcataatcatctccactgtacggtccaacgaagataggttcgaggacgatcggtactttctcggtttcctaagcaactctaagcgattcaatgtggccattacccgtccaaaagcactgctgatcgtgctagggaatccacacgttctagtaagagacccctgttttggcgcccttctagagtatagtataactaacggggtgtacatgggatgtgatcttccacccgccctgcaatccctgcagaactgcggtgaaggagtcgccgatcctagctatcctgtggtgcccgagagtacgggcccagagaagcatcaggagcccagttag

SEQ ID NO: 62292 - DNA, 378 bp, Artificial Sequence
  derived and/or modified sequence
atgtctgacatcagcggccaggtgaccaagctggtgaagaactaccgcagccatgaggccctgctgatgctgcccagccgcctcttctaccaccgggagctggaggtgtgtgccgaccccaccgtggtgaccagcctgctgggctgggagaagctgcccaagaagggcttccccctcatcttccacggcgtgcggggcagcgaggcccgggagggcaagagccccagctggttcaacccagctgaggccgtgcaggtgctgcgctactgctgcctgctggcccacagcatcagcagccaggtgtctgccagtgacatcggggtcatcaccccctacaggaagcaggtgcggcctgcccaggcccggctggtgctgtag

SEQ ID NO: 62293 - DNA, 1017 bp, Artificial Sequence
  derived and/or modified sequence
atgttccgggtgggccacttcacccacgtgtttgtggatgaagctggccaggccagcgagcctgagtgcctgatccccctgggcctgatgtctgacatcagcggccagatcgtgctggccggggaccccatgcagctgggccctgtgatcaagagccggctggccatggcctacggcctgaatgtgtccttcctggagcggctgatgagcaggcctgcctaccagagagatgaaaatgcctttggagcctgtggggcccacaaccccctgctggtgaccaagctggtgaagaactaccgcagccatgaggccctgctgatgctgcccagccgcctcttctaccaccgggagctggaggtgtgtgccgaccccaccgtggtgaccagcctgctgggctgggagaagctgcccaagaagggcttccccctcatcttccacggcgtgcggggcagcgaggcccgggagggcaagagccccagctggttcaacccagctgaggccgtgcaggtgctgcgctactgctgcctgctggcccacagcatcagcagccaggtgtctgccagtgacatcggggtcatcaccccctacaggaagcaggtggagaagatccgcatcctgctgagaaatgtggacctgatggacatcaaggtgggctctgtggaggagttccagggccaggagtacctggtgatcatcatcagcacagtgcgcagcaatgaagatagatttgaagatgaccgctacttcctgggcttcctgagcaacagcaagcgcttcaacgtggccatcacccggcccaaggccctgctgattgtgctgggcaacccccacgtgctggtgcgggacccctgctttggagccctgctggagtacagcatcaccaatggagtgtacatgggctgtgacctgcccccagccctgcagagcctgcagaactgtggggagggcgtggccgaccccagctaccctgtggtgcctgagagcactggacctgagaagcaccaggagcccagctag

SEQ ID NO: 62294 - DNA, 1701 bp, Artificial Sequence
  derived and/or modified sequence
agacgctgcgtgcaaagcactgggtgctgatgtggcttagcatctcctgacacctgtggcctgtcctccctccagccgggtgacacccagacccccagctcctgcacacccctgggcaaccctgctgtgcccccggggtgctgagcgtggctttgccagtgtgtcagaggcatcaattgctaaaacaattcggcagaaattaccatttagaacatctttgctctagagttgggcacttcactcacgtgtttgtggacgaggctgggcaggcaagtgagccggaatgcctcattcctctggggctgatgtcggacatcagtggccaggtcacaaagctggtgaagaactaccggtcccacgaggccctgctgatgctgccctcacggctgttctaccacagggaactcgaggtctgtgcggaccccacagtggtgacctccttgctgggctgggagaagttgcctaagaaaggcttccctctcatcttccatggtgtgcggggcagcgaggcacgggagggaaaaagcccatcgtggttcaacccggccgaggccgtccaggtcctgcgctactgctgcctcctggcccacagcatctccagtcaggtgtctgccagcgacattggcgtcatcacgccctaccggaagcaggtacgccctgcccaggcacgcctggttctgtgaggtccctgcagccctgctccttggctcctgcagctccacagaggcaggaacaagctccttgtgagcagcagcaggtttttaaaggggcaggaccgcacttgaatgtcgttcaacatgagaggtcacccaactgccatccatgggccagttccgggcagctgccagcttttctacggccagagcctcgaacagtttttacatttctaaatggttacatttatatgtcccttgatatttggccctttgggaaaacatttgccaacccccagctctaacccagtgtttctcaaagggggcactttgggtatatttgaatgggacgcttctcatttcgtatgactctgtgatgtgattataggagagttagcgtccccaggccccaggggctggtcccaggaagcatctccacacgttcacagtggctctggagctctggtggggacacaggtgcctcccatgccgaacaccaggtttcattcatgaagcatgtgtccctgtggtgttcacaccaccaagcagaacttggaaagaacccccaaaatacagaagaaaaggtgagtcccctaggccatcacagtaacagatcacctgtaccgcgcgtgtgctgaccgcagagcccgtcaaagatgttatgtttccttttttctgacctcggggactcgagaggtgagtgcttagttctcccagaggtacagagattacgaaggcttatggagacaagtaagttgccagacatcacacagccagtgtcctggtgtcttaacctcagcttgtaggtgccatcctgctgagacatccagcttagagctgccatcctcagctctaagcatcagacatgcatctcgtttctcctgaaggatttcctccatccttgatatgtgcttgtggggagggaggattttccacatgaaacttggctttcctagtaagcattgtcccccgtccccagtttaactaaaactgcaatttgtgttctaatcaattcagattagaagaaagcaataaagaattaaaaaac

SEQ ID NO: 62295 - DNA, 1422 bp, Artificial Sequence
  derived and/or modified sequence
gagagccgtgtgtggctaccggattggacagcacggatctgaacaagacagggattttttttgttaatgtgtgttgatgagtcaaaggtcaagagccgaagagccagtcctcactggggtgcagagggctctttgggggcagagcgggcactgcatggaccctgcaccctggagctgatgttcagagttgggcacttcactcacgtgtttgtggacgaggctgggcaggcaagtgagccggaatgcctcattcctctggggctgatgtcggacatcagtggccagatcgtgctggcaggagaccccatgcagctcggcccagtcattaagtccagactcgccatggcctatgggctgaacgtgtcctttttggaacggctgatgtctcgacccgcgtaccagagggacgaaaatgctttcggtgcttgtggcgcacataatcccctgttggtcacaaagctggtgaagaactaccggtcccacgaggccctgctgatgctgccctcacggctgttctaccacagggaactcgaggtctgtgcggaccccacagtggtgacctccttgctgggctgggagaagttgcctaagaaaggcttccctctcatcttccatggtgtgcggggcagcgaggcacgggagggaaaaagcccatcgtggttcaacccggccgaggccgtccaggtcctgcgctactgctgcctcctggcccacagcatctccagtcaggtgtctgccagcgacattggcgtcatcacgccctaccggaagcaggtggagaaaatcagaattcttttgcgtaatgttgatctgatggatataaaggttggatcagtagaggagtttcaaggacaagagtatctggtcatcatcatttcgaccgtacggtcaaatgaagatagatttgaagatgatcgatattttttgggtttcttgtccaactcaaaaagatttaatgttgcaatcaccagacccaaagctttgctgatagtgctgggaaacccccatgttctcgttcgagacccctgttttggtgctttgctggaatacagtattacaaacggtgtttacatgggatgcgatttacctcctgcactgcagtctctgcaaaactgtggcgagggggtggcagacccctcctacccagtggtgccagaatccacaggaccagagaagcatcaggagcccagctgatctgcagtggctgacagcagggaggccatgtgctcagcctggccacgttgccgttacagtctgctccgtggctcctgtggcctgcccttgtctcgcagccaggcagggtcgtgtgtgggtgtggggctgccaggttggacgcagctgctgctgccctgactttggcatatgccagcctgttcctgccacagggcagtcactgccgcctaccctgaaataaaccctcga

SEQ ID NO: 62296 - DNA, 378 bp, Artificial Sequence
  derived and/or modified sequence
atgagcgacatcagcggccaggtgaccaagctggtgaagaactaccgctctcatgaggcattactcatgctgccatcacggttgttttaccacagagaactggaggtgtgcgcagaccctacagtggtgacatcactcctgggctgggagaagctccctaaaaaggggtttccattgatcttccacggtgtacggggtagtgaggccagagagggcaagagcccatcttggtttaatcctgctgaggctgtccaggtactcaggtactgttgtctccttgctcactccatctcaagccaggtgtctgcctccgatatcggggtcatcacaccatatcggaagcaggttcgtcccgcccaagcaagattagttttatag

SEQ ID NO: 62297 - DNA, 378 bp, Artificial Sequence
  derived and/or modified sequence
atgagcgacatcagcggccaggtgaccaagctggtgaagaactacaggtctcatgaggccctcttgatgctgcccagccgtttgttctatcaccgggaattagaagtgtgcgccgatcccacggtcgtcaccagcctgctcgggtgggaaaagttacctaaaaaaggctttcccctcatcttccatggagtgcggggcagcgaagcgcgcgagggcaagtctccaagttggttcaatcctgccgaggcggtccaagtgctaaggtactgctgtcttttagctcacagtatatcctcccaagttagcgcttccgatatcggtgttattacgccttaccgtaaacaagtgaggcccgctcaggcccgccttgtgctgtag

SEQ ID NO: 62298 - DNA, 1017 bp, Artificial Sequence
  derived and/or modified sequence
atgttccgggtgggccacttcacccacgtgttcgtggacgaggccggtcaagccagcgagcccgaatgtctaatccccctgggactcatgtccgatataagcgggcagatcgtgcttgctggtgatccaatgcagctgggccccgttattaagtccagattggcaatggcatatggcctcaacgtcagctttctcgaaagactgatgtctaggccagcttaccagcgggacgagaacgcattcggcgcatgcggcgcgcacaacccccttttggttactaaactcgttaagaattaccgatcccatgaagctctgctgatgcttccctctcgcttgttctaccatcgcgagttggaggtttgcgccgatcccacggtggtgacttcattactcggatgggaaaaactgccaaagaaagggttccctttaatctttcacggtgtccgtgggagtgaagcccgtgaagggaaatctccctcatggtttaaccccgccgaggccgtccaggttctccgttattgctgcctcctcgcacactcaatatccagtcaggtttcggcatctgacatcggagtgattaccccttatagaaagcaggttgaaaagattaggatactgctccgcaatgtagacctcatggatatcaaggtcgggtccgtggaagagtttcagggccaagagtacttggtcatcataattagcaccgtgcggtctaatgaagatcgtttcgaagacgaccgatacttcctgggatttctcagtaatagtaaacggttcaacgtcgccatcacccgtcccaaggccctgttaattgtgctgggaaaccctcatgtgcttgtccgcgatccctgttttggtgccctcctggaatactcaatcacaaacggggtatatatgggctgtgacctcccacctgccttgcagtcactgcagaattgcggcgagggggtcgcagatcctagctacccggttgtcccagagtctacaggacctgagaagcatcaggaaccaagttag

SEQ ID NO: 62299 - DNA, 378 bp, Artificial Sequence
  derived and/or modified sequence
atgagcgatatctccggtcaggtgactaaactggtgaagaactataggtctcatgaggccctacttatgcttccctcgaggctgttttaccacagagagctcgaagtctgcgccgatccaacggttgtgacgagtctgcttgggtgggaaaaactgcccaagaaaggctttcccctaatctttcacggggttcgcggaagcgaggccagagaagggaaatctccttcctggtttaatcctgcagaggccgttcaggtgctgaggtattgttgcctgctggctcacagcatttcatcacaagttagtgcctcagacataggtgtgatcactccctacagaaagcaggtccggcctgcacaggctaggctggtactgtag

SEQ ID NO: 62300 - DNA, 378 bp, Artificial Sequence
  derived and/or modified sequence
atgagtgacatctcaggacaggtaaccaagcttgtgaagaactatagatcacacgaggcgctgctcatgctgccctcccggttgttctaccacagggagctcgaggtgtgcgctgatccaacagttgtgaccagcctcctaggatgggagaaactgccaaaaaagggtttcccgctgatatttcatggagtccgaggcagtgaagcgcgagaggggaagtctcccagttggttcaacccagctgaggccgtgcaggtactgcggtactgttgtctcttagcgcattcaatcagctcacaggtgagcgctagtgatatcggggttatcaccccgtataggaaacaagtcagacctgcacaggctcggctcgtgttgtag

SEQ ID NO: 62301 - DNA, 1017 bp, Artificial Sequence
  derived and/or modified sequence
atgttccgcgtcggccatttcacccacgtgtttgtggacgaagccggacaggcctcagaaccggaatgcctgatccctctgggactaatgtcagatatcagcgggcagattgtgctggcgggagatccaatgcaactgggccctgtaatcaagtctagactggctatggcatatgggctgaatgtgtcctttttggagcgcctgatgagcaggcccgcttatcagcgcgacgaaaacgcctttggcgcttgtggcgcacataatcccttgctggttaccaaattagtcaagaactatcgatcacacgaagcgctgcttatgttaccctccagactattctatcaccgtgaactcgaggtttgtgctgatcctacggtcgtgacttccttgctaggctgggaaaaactgcccaagaaaggctttcccctaatattccatggagtcagagggagtgaggctcgagagggcaaaagcccctcttggtttaacccagcagaggcagttcaggtgctgcggtattgttgtttactggcccactctatttctagccaggtctctgcgtctgatattggggtaatcactccataccgcaagcaagttgagaaaattaggatcctcctgcggaacgtggacctgatggatataaaagtgggatcagtggaagagtttcaaggacaagaatatttggtaatcattatttcgacagtccgcagcaacgaggataggtttgaagatgacagatactttctgggttttctatccaactcgaagagattcaatgttgcaattacacgccctaaggccttacttatagtgctggggaatcctcatgtccttgtgcgcgacccatgctttggggctttactggaatacagcatcaccaatggcgtctacatggggtgcgatctgcctccggcactgcagtctctgcagaattgtggggagggcgtcgcagacccctcctacccagtggttcctgagagcactggcccagaaaagcaccaggagccgagctag

SEQ ID NO: 62302 - DNA, 378 bp, Artificial Sequence
  derived and/or modified sequence
atgagcgacatcagcggccaggtgaccaagctggtgaagaactacagaagccacgaggccctgctgatgctgcccagcagactgttctaccacagagagctggaggtgtgcgccgaccccaccgtggtgaccagcctgctgggctgggagaagctgcccaagaagggcttccccctgatcttccacggcgtgagaggcagcgaggccagagagggcaagagccccagctggttcaaccccgccgaggccgtgcaggtgctgagatactgctgcctgctggcccacagcatcagcagccaggtgagcgccagcgacatcggcgtgatcaccccctacagaaagcaggtgagacccgcccaggccagactggtgctgtag

SEQ ID NO: 62303 - DNA, 1017 bp, Artificial Sequence
  derived and/or modified sequence
atgttcagagtgggccacttcacccacgtgttcgtggacgaggccggccaggccagcgagcccgagtgcctgatccccctgggcctgatgagcgacatcagcggccagatcgtgctggccggcgaccccatgcagctgggccccgtgatcaagagcagactggccatggcctacggcctgaacgtgagcttcctggagagactgatgagcagacccgcctaccagagagacgagaacgccttcggcgcctgcggcgcccacaaccccctgctggtgaccaagctggtgaagaactacagaagccacgaggccctgctgatgctgcccagcagactgttctaccacagagagctggaggtgtgcgccgaccccaccgtggtgaccagcctgctgggctgggagaagctgcccaagaagggcttccccctgatcttccacggcgtgagaggcagcgaggccagagagggcaagagccccagctggttcaaccccgccgaggccgtgcaggtgctgagatactgctgcctgctggcccacagcatcagcagccaggtgagcgccagcgacatcggcgtgatcaccccctacagaaagcaggtggagaagatcagaatcctgctgagaaacgtggacctgatggacatcaaggtgggcagcgtggaggagttccagggccaggagtacctggtgatcatcatcagcaccgtgagaagcaacgaggacagattcgaggacgacagatacttcctgggcttcctgagcaacagcaagagattcaacgtggccatcaccagacccaaggccctgctgatcgtgctgggcaacccccacgtgctggtgagagacccctgcttcggcgccctgctggagtacagcatcaccaacggcgtgtacatgggctgcgacctgccccccgccctgcagagcctgcagaactgcggcgagggcgtggccgaccccagctaccccgtggtgcccgagagcaccggccccgagaagcaccaggagcccagctag

SEQ ID NO: 62304 - protein, 349 aa, Artificial Sequence
  derived and/or modified sequence
MKGTGIMDCAPKALLARALYDNCPDCSDELAFSRGDILTILEQHVPESEGWWKCLLHGRQGLAPANRLQILTEVAADRPCPPFLRGLEEAPASSEETYQVPTLPRPPTPGPVYEQMRSWAEGPQPPTAQVYEFPDPPTSARIICEKTLSFPKQAILTLPRPVRASLPTLPSQVYDVPTQHRGPVVLKEPEKQQLYDIPASPKKAGLHPPDSQASNPGPLIPQPSSQQTPERKPRLSEHCRLYFGALFKAISAFHGSLSSSQPAEIITQSKLVIMVGQKLVDTLCMETQERDVRNEILRGSSHLCSLLKDVALATKNAVLTYPSPAALGHLQAEAEKLEQHTRQFRGTLG

SEQ ID NO: 62305 - DNA, 1050 bp, Artificial Sequence
  derived and/or modified sequence
atgaagggcaccggcatcatggactgcgcccccaaggccctgctggccagagccctgtacgacaactgccccgactgcagcgacgagctggccttcagcagaggcgacatcctgaccatcctggagcagcacgtgcccgagagcgagggctggtggaagtgcctgctgcacggcagacagggcctggcccccgccaacagactgcagatcctgaccgaggtggccgccgacagaccctgcccccccttcctgagaggcctggaggaggcccccgccagcagcgaggagacctaccaggtgcccaccctgcccagaccccccacccccggccccgtgtacgagcagatgagaagctgggccgagggcccccagccccccaccgcccaggtgtacgagttccccgacccccccaccagcgccagaatcatctgcgagaagaccctgagcttccccaagcaggccatcctgaccctgcccagacccgtgagagccagcctgcccaccctgcccagccaggtgtacgacgtgcccacccagcacagaggccccgtggtgctgaaggagcccgagaagcagcagctgtacgacatccccgccagccccaagaaggccggcctgcacccccccgacagccaggccagcaaccccggccccctgatcccccagcccagcagccagcagacccccgagagaaagcccagactgagcgagcactgcagactgtacttcggcgccctgttcaaggccatcagcgccttccacggcagcctgagcagcagccagcccgccgagatcatcacccagagcaagctggtgatcatggtgggccagaagctggtggacaccctgtgcatggagacccaggagagagacgtgagaaacgagatcctgagaggcagcagccacctgtgcagcctgctgaaggacgtggccctggccaccaagaacgccgtgctgacctaccccagccccgccgccctgggccacctgcaggccgaggccgagaagctggagcagcacaccagacagttcagaggcaccctgggctag

SEQ ID NO: 62306 - DNA, 1050 bp, Artificial Sequence
  derived and/or modified sequence
atgaagggcacggggatcatggattgtgcccctaaagccctgttggcacgggctctgtatgataattgccctgattgcagcgatgaactcgctttttctaggggtgatatcttaactatcctggagcagcacgtgccagaaagtgagggttggtggaaatgcttgcttcacggccgacaaggactggctcctgcaaacagactccagattttgaccgaagtagctgccgatcgaccctgcccaccatttctgcgcgggctggaggaagcacccgcgtcttcagaagagacctaccaagttcctacattacctcgccctcccacgcccggccctgtgtacgagcagatgaggtcctgggccgaaggaccccagcccccgacagcgcaagtgtatgagtttcctgatccgccaacgtcagctcgtattatttgtgagaaaactctgtctttccccaagcaggctatcctgaccctccctagacctgtgcgcgcatcactcccgactctgccctctcaagtctacgacgttccaacccagcaccgtggaccagtggtccttaaagagccagaaaagcaacagctgtacgacatcccagcgagcccgaaaaaggccggactacacccaccggacagtcaagcctcaaatcctgggcctcttattccacagccctccagccagcagacccccgagcgcaaaccaaggcttagtgagcactgccggctgtattttggcgccttattcaaggctatttccgcgttccacggcagcctttcctcatcacagccagccgagatcattacccaaagtaaattagtgattatggtcggccagaagttggtagacacgttgtgtatggagacgcaggagcgtgatgtaaggaatgagatacttcgtggaagcagccatctgtgcagtttactgaaggacgttgctctcgccaccaaaaacgcagtgctgacatacccctcccctgcagcgctcggccatttgcaggcagaggccgaaaagctcgagcaacacacgcgccagtttcgaggcacgcttggttag

SEQ ID NO: 62307 - DNA, 1050 bp, Artificial Sequence
  derived and/or modified sequence
atgaagggcaccggcatcatggactgtgcccccaaggccctgctggcccgggccctgtatgacaactgcccagactgcagtgatgagctggccttcagcagaggagacatcctgaccatcctggagcagcacgtgcctgagagcgagggctggtggaagtgcctgctgcacggccggcagggcctggccccagccaaccggctgcagatcctgacagaggtggccgctgaccggccctgcccccccttcctgcggggcctggaggaggccccagccagcagcgaggagacctaccaggtgcccaccctgccccggccccccaccccaggccctgtgtatgagcagatgaggtcctgggccgagggcccccagcccccaacagcccaggtgtatgagttcccagacccccccaccagcgcccgcatcatctgtgagaagaccctgtccttccccaagcaggccatcctgaccctgcccaggcctgtgcgggccagcctgcccaccctgcccagccaggtgtatgatgtgcccacccagcaccggggccctgtggtgctgaaggagcctgagaagcagcagctgtatgacatcccagccagccccaagaaggccggcctgcaccccccagacagccaggccagcaaccctggccccctcatcccccagcccagcagccagcagaccccagagaggaagccccggctgtctgagcactgccgcctgtactttggagccctcttcaaggccatcagcgccttccacggcagcctgagcagcagccagcctgctgagatcatcacccagagcaagctggtgatcatggtgggccagaagctggtggacaccctgtgcatggagacccaggagagagatgtgagaaatgagatcctgcggggcagcagccacctgtgcagcctgctgaaggatgtggccctggccaccaagaatgctgtgctgacctaccccagccctgctgccctgggccacctgcaggccgaggccgagaagctggagcagcacacccggcagttccggggcaccctgggctag

SEQ ID NO: 62308 - DNA, 1050 bp, Artificial Sequence
  derived and/or modified sequence
atgaagggcaccggcatcatggactgcgcccccaaggccctgctggcccgcgctctgtacgacaactgcccagattgtagtgacgaactcgcgttttcccgaggagacattctcaccatccttgagcaacacgtgcccgaaagtgagggctggtggaagtgcctgctgcacggtcgccagggcctggcacccgctaatcggctgcagatccttaccgaagtcgcagctgatcgcccatgtccacccttcctccggggcttagaagaggcgccagcctcctccgaagagacgtatcaggttccaactctgccccgcccccctacgccaggcccggtttacgagcagatgcggagctgggcggagggtcctcagcccccgacggctcaggtgtacgagttccccgaccctccaacaagtgctcgaataatatgtgagaagactcttagctttcccaagcaagctatactaacattgcccagaccggtcagagcctcactacccaccctcccttcacaggtgtacgatgttcctacacaacacagaggtccagttgttctgaaagagcccgaaaagcagcagctgtacgatatccccgcttcacctaaaaaagcgggactccacccccccgatagccaggcaagtaaccctggtcccctcatcccacagccttcctcacaacaaactcctgagcgtaagccacgcctgagtgaacattgcagactgtattttggagccctctttaaggctatttccgcttttcatggctccctgtcttcatcccagccagccgaaataataacgcagagtaagttggtgattatggtgggtcagaagctggtcgacactctatgcatggaaactcaagaaagggatgtgaggaacgagattttgaggggatcctcacacctctgcagtctcctcaaagatgtggccctcgccaccaagaatgccgtactgacgtacccttcgcctgcggcattaggacatctgcaagccgaggccgagaaactggaacagcacacacggcagttccgcggaacactggggtag

SEQ ID NO: 62309 - DNA, 1050 bp, Artificial Sequence
  derived and/or modified sequence
atgaaagggacagggattatggattgtgccccaaaagcattactcgcgagggccttgtatgacaactgcccagattgcagtgacgaacttgcattttctagaggagatatcctcactattctcgaacagcatgtccccgaatccgagggctggtggaagtgtcttctccacgggcgacagggactggcacccgcaaaccgcctgcaaatcctgaccgaagtggctgcagataggccgtgccctccctttctcaggggccttgaggaagctcccgcaagcagcgaagagacataccaggttcctaccctgccacgcccacccacgcctgggccagtttatgaacaaatgcgctcatgggcggaaggtccccagcctcccaccgctcaggtgtacgagttccccgacccacctacatcggctcgaattatctgtgagaagacgctatccttccctaagcaggctatattaacacttccgcgacccgttcgagctagtctcccaaccttgccttcacaagtctacgatgtgcccacacagcatagaggcccagttgtgttgaaggaacccgagaagcagcagctctacgatatccctgctagccccaaaaaggccggactgcacccacccgattcacaagccagtaatcctggcccattaatacctcaacccagctcacagcaaacacccgagcggaagcccagactgagcgaacactgccgcttgtatttcggtgcactattcaaggcaatatcggccttccatggaagcttgtcgtccagtcagccagcagagataatcacacaatccaaactcgtaataatggtggggcagaaattggttgatactttgtgtatggaaacccaggaaagagacgtacggaacgaaatccttcgcggatccagtcatctgtgttctctgcttaaggacgtagctctcgcaaccaagaatgcggtccttacatatcctagtcctgctgcactgggtcatcttcaggcagaagctgaaaaattggaacaacatactaggcagttccgcggtactcttggctag

SEQ ID NO: 62310 - DNA, 1840 bp, Artificial Sequence
  derived and/or modified sequence
attttactcttatcgtgctttccagaaagtttgcctgctgggagagtctttttgatcgtttcccatgtgttgtcagatagctccatagaattcagtttctgagaaccagccagaagcatgcagtgacattgcacaatctgcctctgaagctggagatactagctgcagagctcaggggagctgctccacatcaccgacatgaagggaacaggcatcatggactgtgcgcccaaggcactcctggccagggcactttatgacaactgccctgactgctctgacgagctggctttcagcagaggggacatcctgaccattctggagcaacacgtgccagaaagcgagggttggtggaagtgtttgctccatgggaggcaaggcctggcccctgccaaccgcctccaaatcctcacggaggtcgctgcagacaggccgtgccccccattcctgagaggcctggaagaagctcctgccagctcagaggagacctatcaggtgcccactctaccccgccctcccactccaggccccgtttatgagcagatgaggagttgggcggaggggccccagccccctactgcccaagtctatgaattccccgaccctcccaccagtgccagaatcatctgtgaaaagactctcagctttccaaaacaggccatcctcacgcttcccagacctgtccgggcctcactgccgactctgccttcccaggtgtatgacgtgcctacccagcaccggggccccgtggtcctgaaggagccagagaagcagcagttatatgacataccagccagccccaagaaggcaggactccatcccccagacagccaagcaagtaatcctggccctcttatacctcagccttcgagtcaacagactcctgagaggaaaccccgcttatctgaacactgccggctctactttggggcgctcttcaaagccatcagcgcatttcacggcagcctcagcagcagccagcccgcggagatcatcactcagagcaagctggtcatcatggtgggacagaagctggtggacacgctgtgcatggagacccaggagagggacgtgcgcaacgagatcctccgtggcagcagtcacctctgcagcctgctcaaggacgtagcgctggccactaagaatgccgtgctcacgtaccccagccctgccgcgctggggcacctccaggcggaggctgagaagctggagcaacacacgcggcagttcagagggacactgggatgaggactgtctacctcccttcctcctctgctcacctctcagcttcacacccacaacttgtgcaactctgccctatgggaaaagccagccggggcatacaccaatgagctgaaacagacctggtgcccaaagctggtagtaccaagtggctaagcaaccccagggcattgacttaccccgcagggggtcaggaaagagagtcaggtatgaggtaaagaccttgtgaagtttagcatatatggagtatgcagtatcagcttgaagtgacttcgcagaaataatattttatattgattaaatgtgtgcatgttttgtttgttttttgagacaaagtctcactctgtcacacaggctggagtgcagtggcgcgatctcagctcactgcaacctccgccttctgggttgaagcaattctcccgcctcagcctccagagtagctggtactacaggtgtgcgccaccatgcccagctaatttttgtatttttttttaatgaaaggtctcacatatttattactgaacccagccaaccaatgcattcataacagattcagaaagaaaaaatatattcccaataaaacatgtacaattctcca

SEQ ID NO: 62311 - protein, 786 aa, Artificial Sequence
  derived and/or modified sequence
MKGTGIMDCAPKALLARALYDNCPDCSDELAFSRGDILTILEQHVPESEGWWKCLLHGRQGLAPANRLQILTEVAADRPCPPFLRGLEEAPASSEETYQVPTLPRPPTPGPVYEQMRSWAEGPQPPTAQVYEFPDPPTSARIICEKTLSFPKQAILTLPRPVRASLPTLPSQVYDVPTQHRGPVVLKEPEKQQLYDIPASPKKAGLHPPDSQASGQGVPLISVTTLRRGGYSTLPNPQKSEWIYDTPVSPGKASVRNTPLTSFAEESRPHALPSSSSTFYNPPSGRSRSLTPQLNNNVPMQKKLSLPEIPSYGFLVPRGTFPLDEDVSYKVPSSFLIPRVEQQNTKPNIYDIPKATSSVSQAGKELEKAKEVSENSAGHNSSWFSRRTTSPSPEPDRLSGSSSDSRASIVSSCSTTSTDDSSSSSSEESAKELSLDLDVAKETVMALQHKVVSSVAGLMLFVSRKWRFRDYLEANIDAIHRSTDHIEESVREFLDFARGVHGTACNLTDSNLQNRIRDQMQTISNSYRILLETKESLDNRNWPLEVLVTDSVQNSPDDLERFVMVARMLPEDIKRFASIVIANGRLLFKRNCEKEETVQLTPNAEFKCEKYIQPPQRETESHQKSTPSTKQREDEHSSELLKKNRANICGQNPGPLIPQPSSQQTPERKPRLSEHCRLYFGALFKAISAFHGSLSSSQPAEIITQSKLVIMVGQKLVDTLCMETQERDVRNEILRGSSHLCSLLKDVALATKNAVLTYPSPAALGHLQAEAEKLEQHTRQFRGTLG

SEQ ID NO: 62312 - DNA, 2361 bp, Artificial Sequence
  derived and/or modified sequence
atgaagggcaccggcatcatggactgcgcccccaaggccctgctggccagagccctgtacgacaactgccccgactgcagcgacgagctggccttcagcagaggcgacatcctgaccatcctggagcagcacgtgcccgagagcgagggctggtggaagtgcctgctgcacggcagacagggcctggcccccgccaacagactgcagatcctgaccgaggtggccgccgacagaccctgcccccccttcctgagaggcctggaggaggcccccgccagcagcgaggagacctaccaggtgcccaccctgcccagaccccccacccccggccccgtgtacgagcagatgagaagctgggccgagggcccccagccccccaccgcccaggtgtacgagttccccgacccccccaccagcgccagaatcatctgcgagaagaccctgagcttccccaagcaggccatcctgaccctgcccagacccgtgagagccagcctgcccaccctgcccagccaggtgtacgacgtgcccacccagcacagaggccccgtggtgctgaaggagcccgagaagcagcagctgtacgacatccccgccagccccaagaaggccggcctgcacccccccgacagccaggccagcggccagggcgtgcccctgatcagcgtgaccaccctgagaagaggcggctacagcaccctgcccaacccccagaagagcgagtggatctacgacacccccgtgagccccggcaaggccagcgtgagaaacacccccctgaccagcttcgccgaggagagcagaccccacgccctgcccagcagcagcagcaccttctacaacccccccagcggcagaagcagaagcctgaccccccagctgaacaacaacgtgcccatgcagaagaagctgagcctgcccgagatccccagctacggcttcctggtgcccagaggcaccttccccctggacgaggacgtgagctacaaggtgcccagcagcttcctgatccccagagtggagcagcagaacaccaagcccaacatctacgacatccccaaggccaccagcagcgtgagccaggccggcaaggagctggagaaggccaaggaggtgagcgagaacagcgccggccacaacagcagctggttcagcagaagaaccaccagccccagccccgagcccgacagactgagcggcagcagcagcgacagcagagccagcatcgtgagcagctgcagcaccaccagcaccgacgacagcagcagcagcagcagcgaggagagcgccaaggagctgagcctggacctggacgtggccaaggagaccgtgatggccctgcagcacaaggtggtgagcagcgtggccggcctgatgctgttcgtgagcagaaagtggagattcagagactacctggaggccaacatcgacgccatccacagaagcaccgaccacatcgaggagagcgtgagagagttcctggacttcgccagaggcgtgcacggcaccgcctgcaacctgaccgacagcaacctgcagaacagaatcagagaccagatgcagaccatcagcaacagctacagaatcctgctggagaccaaggagagcctggacaacagaaactggcccctggaggtgctggtgaccgacagcgtgcagaacagccccgacgacctggagagattcgtgatggtggccagaatgctgcccgaggacatcaagagattcgccagcatcgtgatcgccaacggcagactgctgttcaagagaaactgcgagaaggaggagaccgtgcagctgacccccaacgccgagttcaagtgcgagaagtacatccagcccccccagagagagaccgagagccaccagaagagcacccccagcaccaagcagagagaggacgagcacagcagcgagctgctgaagaagaacagagccaacatctgcggccagaaccccggccccctgatcccccagcccagcagccagcagacccccgagagaaagcccagactgagcgagcactgcagactgtacttcggcgccctgttcaaggccatcagcgccttccacggcagcctgagcagcagccagcccgccgagatcatcacccagagcaagctggtgatcatggtgggccagaagctggtggacaccctgtgcatggagacccaggagagagacgtgagaaacgagatcctgagaggcagcagccacctgtgcagcctgctgaaggacgtggccctggccaccaagaacgccgtgctgacctaccccagccccgccgccctgggccacctgcaggccgaggccgagaagctggagcagcacaccagacagttcagaggcaccctgggctag

SEQ ID NO: 62313 - DNA, 2361 bp, Artificial Sequence
  derived and/or modified sequence
atgaaaggaacaggtatcatggattgtgccccaaaagcactcctggcacgcgctttatacgacaattgcccagactgctccgatgagttagcattctctcggggcgacatattgacaattctggagcagcatgttcccgaatccgaagggtggtggaagtgtctcctgcacggtcgacaagggctagcacccgcaaatcgccttcagatcctgactgaagtcgctgccgaccgcccctgccctccgttcctgagaggtctggaggaggctcctgcatcttccgaggagacttatcaggtcccaaccttgccgcggccacccactcccggaccggtctatgaacagatgcggtcttgggcagaaggccctcagccacctactgctcaggtatatgagttcccggaccccccaacaagcgcgagaattatttgcgaaaaaactctctcattccccaagcaggcaattctgactttgccaaggccagttcgcgcatcgctccccacattacccagccaggtctacgacgtcccaacacagcatagggggccagtggtgctcaaagaacccgaaaagcagcagttatatgatattcctgcaagtcctaaaaaagccggccttcaccccccggatagccaggccagcgggcagggagtgcccttaatttccgtgactactcttagacggggaggctattcaacactccctaaccctcagaagagtgaatggatttacgacacccccgttagccctgggaaggcatctgttagaaacaccccattaaccagtttcgccgaagaatcgaggccgcacgctttaccttcaagctctagtaccttttataacccaccctccggccgaagccggtccctcacaccacagctcaataacaacgtaccgatgcagaaaaagctgagcctccccgagatcccctcttatggctttctcgtgcccagaggcacgtttcctttagacgaggatgtgtcgtacaaggtgccgagctcgttcctgatcccaagagtcgagcagcaaaacaccaagcccaacatctacgacatacccaaagcgacctcctctgtatcccaggctggcaaggagctagaaaaggctaaggaggtgtcggaaaattcagcaggacacaactcgtcttggttcagcagaaggaccacatcgccaagccctgaaccggaccggctgagcggaagctcgagtgactcaagagcctccatcgtctcctcatgctctacaacgagcacagacgatagcagcagctcaagctccgaagaatctgccaaggagctaagtttggatctcgatgtggccaaggaaacagttatggcactccagcataaggtggtcagctctgtggcaggtcttatgctgtttgtgtctcggaagtggaggtttcgtgactaccttgaggcaaatatcgacgcaatccacagatccaccgaccacatcgaggagagtgttagggagttcctggactttgccaggggagtgcatggaacagcttgtaaccttacggactcaaatcttcaaaaccgcattagggatcagatgcagaccatctcaaactcttacaggatcttgctggaaacaaaggagtcgctcgacaatcgcaattggcccctggaagtgctggttacagactccgttcagaactcccccgacgaccttgaacggtttgtgatggtggcgagaatgctccctgaagatatcaagcggtttgcatctatcgtcatcgctaacgggcgactgctgttcaagcggaactgtgaaaaagaagaaacagtacagttaacaccgaatgctgagtttaagtgcgaaaaatatatccaacctccccagcgcgagacggagtcccaccagaaatccactccgagcactaagcagcgggaggacgaacatagcagtgagctcctaaaaaagaaccgcgcgaatatttgtgggcagaacccaggccctctcatcccacagcctagttcacagcagacccccgagcgcaagcctagactgagtgagcactgccggctttactttggggcactctttaaggccatttctgccttccacgggagcctttcaagctcacagccagccgagatcattacgcagtccaagctagttattatggtgggccagaagctggtggataccctttgtatggaaacccaggaacgagatgtcaggaacgaaatcctgaggggatctagccacctttgcagtcttttaaaagacgtcgctcttgccaccaaaaacgcagttctgacatacccctcaccagccgctctggggcacctccaagccgaagctgagaagctggagcaacatactaggcagtttcgtgggaccctgggctag

SEQ ID NO: 62314 - DNA, 2361 bp, Artificial Sequence
  derived and/or modified sequence
atgaagggaactggcatcatggactgtgctccaaaagccctccttgctagagcactttatgacaattgtccggactgttcggatgagctggccttctcaaggggtgatatccttaccatactggaacaacacgtgccagagagcgagggctggtggaaatgtctattgcatggacggcaagggctggccccagcgaacaggttgcagattctcactgaggtcgctgccgatcgcccgtgcccgccatttctacgggggctggaagaagcacctgcgagctctgaagagacctaccaagtgcccacgctccccaggccgccaacccccgggcccgtgtatgaacaaatgcgcagctgggccgaggggccgcagcctccaaccgcccaggtctacgaattccctgatccacccacatcagctagaattatttgtgagaagacacttagcttcccaaagcaagcaattctgacattgcctcgacccgtgagggcttctttgcctactctccctagtcaggtgtacgatgttccaactcagcatcgaggtcccgtcgtgctgaaggagccagaaaagcagcagctgtatgatattcccgcaagtccgaagaaggccgggcttcaccccccagactcccaagcatctgggcagggagtacctctcatctcagtgaccaccttgaggaggggcggctactcaactctgcctaacccacagaaaagcgaatggatttatgacacacccgtctcccctggcaaagcaagcgtgcgtaacacaccacttacttctttcgctgaggagtccagaccacacgcactgccttccagtagtagcacattttacaatcccccttccgggcgttccaggtctttgaccccacagctaaacaacaatgtgcctatgcagaagaagctgtccctacccgagataccctcttatggtttcctggtgcctcggggcacctttcccctggacgaagacgttagctataaggtgccgtcatccttcttgatccccagggtggagcagcagaacaccaagcctaatatttacgatatccctaaggctacctcctctgtttctcaggccggaaaggagctggaaaaggccaaggaggtgagtgagaacagcgccggacataactcctcttggttcagtcggaggactacctcaccctctcccgagccggatcgattatctggatcgtcttcagactcaagggcaagcatcgtgtcaagctgttccactaccagtacagacgatagctcatcgtcaagctccgaggagtcagcaaaggaactttctttggatctcgatgttgcaaaagagacagtgatggcactgcagcataaagtggtgtcgtcagtggctggcctcatgctgtttgtcagcagaaaatggcgttttagagactacctggaggccaacattgatgccattcaccgctctactgatcacatcgaggagtccgtgcgggagttcctggactttgcccgcggcgtgcacggcactgcatgcaatctgaccgattcaaatttgcaaaatagaattcgggaccagatgcagactattagtaattcttataggattctgctcgagacgaaggaaagtctggacaatcgaaactggcccctggaagtcttagtcactgactcggtgcaaaatagccccgacgacctcgaacgcttcgtgatggtggccaggatgctccccgaagatattaaacgatttgccagtattgtcatagccaacgggcgcctcttgttcaagcggaattgcgagaaggaagagactgtgcagcttacgcctaatgcagagttcaagtgcgagaagtacattcaaccgccacagagagaaacggagagccaccagaagtcaaccccatccaccaagcagcgcgaggatgaacacagtagtgaacttctgaagaagaacagggccaatatctgcggacagaacccagggcctcttatcccccagccatccagccagcagactcctgagcgtaagccgcgactctccgagcactgtcggctctactttggagccctgtttaaggcaatctcagcattccacggatccttgtcaagctcccagccggctgaaatcatcacccagtctaaactggtcataatggttgggcagaaactggtcgatacgctctgcatggaaacgcaggagcgcgacgttcgaaacgagattcttcgaggctcaagccatctatgtagccttcttaaggacgtggccctcgccaccaagaatgccgtcctgacctatccttcgccagcagccttaggccatctgcaggcagaagcagagaagctcgaacaacacacacgtcaattcaggggtactctggggtag

SEQ ID NO: 62315 - DNA, 2361 bp, Artificial Sequence
  derived and/or modified sequence
atgaagggcaccggcatcatggactgtgcccccaaggccctgctggcccgggccctgtatgacaactgcccagactgcagtgatgagctggccttcagcagaggagacatcctgaccatcctggagcagcacgtgcctgagagcgagggctggtggaagtgcctgctgcacggccggcagggcctggccccagccaaccggctgcagatcctgacagaggtggccgctgaccggccctgcccccccttcctgcggggcctggaggaggccccagccagcagcgaggagacctaccaggtgcccaccctgccccggccccccaccccaggccctgtgtatgagcagatgaggtcctgggccgagggcccccagcccccaacagcccaggtgtatgagttcccagacccccccaccagcgcccgcatcatctgtgagaagaccctgtccttccccaagcaggccatcctgaccctgcccaggcctgtgcgggccagcctgcccaccctgcccagccaggtgtatgatgtgcccacccagcaccggggccctgtggtgctgaaggagcctgagaagcagcagctgtatgacatcccagccagccccaagaaggccggcctgcaccccccagacagccaggccagcggccagggcgtgcccctcatctctgtgaccaccctgcggcggggcggctacagcaccctgcccaacccccagaagtctgagtggatctatgacacccctgtgtcccctgggaaggcctctgtgaggaacacccccctgaccagctttgctgaggagagccggccccacgccctgcccagcagcagcagcaccttctacaacccccccagcggccgcagccgcagcctgaccccccagctgaacaacaacgtgcccatgcagaagaagctgagcctgcctgagatccccagctatggcttcctggtgccccggggcaccttccccctggatgaagatgtgtcctacaaggtgcccagcagcttcctgatcccccgggtggagcagcagaacaccaagcccaacatctatgacatccccaaggccaccagctctgtgtcccaggccggcaaggagctggagaaggccaaggaggtgtctgagaacagcgctggccacaacagctcctggttcagcaggaggaccaccagccccagccctgagccagaccggctgagcggcagcagcagtgacagccgggccagcatcgtgagcagctgcagcaccaccagcacagatgacagcagcagcagcagcagcgaggagagcgccaaggagctgagcctggacctggatgtggccaaggagaccgtgatggccctgcagcacaaggtggtgtcctctgtggccggcctgatgctgtttgtgtccaggaagtggaggttccgggactacctggaggccaacattgatgccatccacaggagcacagaccacatcgaggagagcgtgcgggagttcctggactttgcccggggcgtgcatggaacagcctgcaacctgacagacagcaacctgcagaaccgcatccgggaccagatgcagaccatcagcaacagctaccgcatcctgctggagaccaaggagagcctggacaacagaaactggcccctggaggtgctggtgacagattctgtgcagaacagcccagatgacctggagagatttgtgatggtggccaggatgctgcctgaggacatcaagagatttgccagcatcgtgattgccaacggccgcctgctcttcaagaggaactgtgagaaggaggagaccgtgcagctgaccccaaatgctgagttcaagtgtgagaagtacatccagcccccccagcgggagacagagagccaccagaagagcacccccagcaccaagcagagagaagatgagcacagcagcgagctgctgaagaagaacagagccaacatctgtggccagaaccctggccccctcatcccccagcccagcagccagcagaccccagagaggaagccccggctgtctgagcactgccgcctgtactttggagccctcttcaaggccatcagcgccttccacggcagcctgagcagcagccagcctgctgagatcatcacccagagcaagctggtgatcatggtgggccagaagctggtggacaccctgtgcatggagacccaggagagagatgtgagaaatgagatcctgcggggcagcagccacctgtgcagcctgctgaaggatgtggccctggccaccaagaatgctgtgctgacctaccccagccctgctgccctgggccacctgcaggccgaggccgagaagctggagcagcacacccggcagttccggggcaccctgggctag

SEQ ID NO: 62316 - DNA, 2361 bp, Artificial Sequence
  derived and/or modified sequence
atgaagggcaccggcatcatggactgcgcccccaaggccctgctggctagggccttgtatgacaattgccccgattgctccgacgagttggcattctcgcgcggcgatatcctgaccatcttagagcagcatgtgccagaatcggagggctggtggaaatgcctcctgcatggcagacagggactcgcacccgctaacagactccaaattttaacagaagtcgcagccgaccgaccatgcccccccttcctgcgcgggctggaagaggcacccgctagttctgaagagacctatcaggtacccacactcccaaggcctcccactccagggccagtctacgagcagatgcgctcctgggccgagggaccacagccccccactgcgcaagtgtatgagtttcctgatccgcccacttcagcccgtatcatttgtgagaaaactctgtccttcccaaagcaagccattttgaccttgcctcgacccgtccgcgccagccttccaacactaccctctcaggtctacgatgtacctacgcagcataggggtcccgtggtgctgaaggaacctgagaaacaacagctttatgacatccctgccagtccaaagaaggcgggtctgcaccctccagattcccaggccagtggacaaggtgttccgctgatctccgttacgacactgcggagaggcggatactctaccctcccgaatccacagaagagtgagtggatttatgatactcctgttagcccagggaaggcttcagtgagaaacactcccctcacatcgttcgctgaggagagcaggccgcacgccctgcctagctcctcctccacgttttacaatcctccgtccggccgctctaggagcctgactccccaactcaacaataatgtgcccatgcagaaaaagctgagtctaccagaaatcccaagttatggattcctcgttccacgggggaccttccccctggacgaggacgtctcatacaaagtacctagttcatttttaatccctcgggttgagcaacagaatacaaagcctaatatttatgacatacccaaggccacttcatcagtaagtcaagctggcaaagagctggagaaagctaaggaggtgagtgagaattccgcaggtcacaatagttcatggttttctcgccggactacttccccctctccagagccagatagactttctggaagtagttccgatagccgagctagcatagtgtcttcctgcagcaccacctctacagacgactccagcagttcgtcctctgaggaaagcgccaaagaactctcactggatttggacgtagcaaaggaaactgtaatggccctacagcataaagtggtatcctccgtcgcgggactgatgctcttcgtttcacgaaagtggagattccgggactatttggaggcgaacatcgatgcaatccatcggagcacggaccatattgaagagagcgtccgagagtttctggactttgcccgaggcgtccatggcaccgcctgcaatttgaccgactccaacttgcagaacagaattagagaccagatgcagacgatcagcaactcatatcgaattctgctcgaaactaaggaaagcttggataatcgtaattggccgcttgaggtgctggtgactgattctgtccagaatagtccagatgatttggaacgtttcgtgatggttgccagaatgttacccgaagacattaaaaggttcgcaagcatagtcattgcaaatggccgtttactatttaagagaaattgtgagaaggaggagaccgttcagctgaccccaaatgcagagtttaaatgcgaaaaatatatccaacctccccagcgagaaaccgagtcacatcagaaaagcacgccaagcactaaacagagagaggatgaacactcttcagaactgctaaagaagaatcgggccaatatctgtggacagaaccctgggccattgatccctcaaccctcctcgcagcaaacaccggagagaaaaccacgcttatctgaacattgccgactgtacttcggtgcgttgttcaaggccattagcgcatttcacggaagcttatcttccagtcaaccagctgagatcatcactcagagcaaactggtgataatggttgggcagaagcttgtagacaccctgtgcatggagacccaggagcgagacgtgcggaacgagatcctccgcggcagcagtcacctctgtagcctgttgaaagacgtcgcactcgctacaaagaatgcagtgcttacctacccatcacccgcggcattgggtcatcttcaagcggaagcagaaaagctggaacagcacacaaggcagttccgcggaacactggggtag

SEQ ID NO: 62317 - DNA, 2361 bp, Artificial Sequence
  derived and/or modified sequence
atgaagggcaccggcatcatggactgcgcccccaaggccctgctggcccgagccctatatgacaactgcccagattgttcagacgagctcgccttcagtcgcggtgatattctgacaatcctggagcaacacgtgcctgagagtgaaggctggtggaagtgtcttctccacggacggcaaggcctggcccctgcaaatcgcctccaaattctgactgaagtggctgctgatcggccctgtccacctttcttgaggggcctggaggaagctcccgcctcgtctgaggaaacctaccaggtcccaaccttgcctcgtcctcctaccccaggcccggtgtatgagcagatgaggtcctgggccgaaggcccacaacccccaacggcccaggtctacgagtttcctgatcctccgacttcggcgcgtattatatgtgagaagactctgagcttccccaagcaggctattcttactttgcctagacccgtcagggctagcctgccaacactgccgtcacaggtttacgatgttcctacccagcacagagggcctgtggtactgaaagagcccgagaaacaacagctgtatgacatccctgcatcccccaaaaaggctgggctgcatcctcctgattcccaggcttccgggcagggcgtcccattgatttccgtgacgacgctgagaaggggaggctactctactctgccaaatccccagaagtcagaatggatttatgatacgccagtatcacccgggaaggcgtctgtccgtaatacccctctgacttccttcgccgaggagtcccgaccccacgccctaccctcatccagtagtaccttctataatcctccctcgggcagatcccggagtctgacaccacaactcaataacaatgtgcctatgcaaaaaaagctgagtctcccagaaatcccctcttacggctttctggtgccccgcggaaccttccctctggacgaagatgtttcctataaggtgccctccagtttcctcatccctagggtggagcagcaaaatacaaaaccgaacatctacgatatccctaaagctacgtcttcagtttcacaggcggggaaagagcttgaaaaggccaaagaagtttccgaaaactcggctggtcacaatagcagctggttttcacggagaacaacctcgccatcacctgagccagatagactaagcgggagtagtagcgattcccgcgcctctatagtcagcagttgttcaactacttccaccgatgacagcagttcatctagttcggaagaaagcgcaaaagagttatcactggacctcgacgtcgctaaggaaaccgtgatggccctacagcataaagttgtcagttcggtggccggactcatgctatttgttagtcgaaaatggcggttcagggattatctcgaggcgaacattgatgcgatccatagatcaacagaccatatcgaggaatccgtgcgagaattcctggactttgccagaggcgttcatggcactgcttgcaacctgactgattccaatctccaaaaccgcattagggatcaaatgcagaccatctccaactcctacagaattctgctggagactaaggagagcctcgataatcgaaactggcccctggaagtgctggtgacagactcagtacagaattcgcctgacgacctggagagatttgttatggtcgccagaatgttgcccgaagacatcaagagattcgcatccatcgtgattgcgaacggacgactcctgttcaaaagaaattgtgaaaaagaggagacagtgcagttgaccccaaatgcagagtttaaatgcgaaaagtatatccaaccaccgcagagggagactgaatcacatcaaaaatccactccatctaccaagcagcgggaggacgagcacagtagtgagctgttgaaaaaaaatagagctaacatttgtgggcagaatcccgggccattgataccacagccctctagccagcagacacccgagagaaaaccacgtctcagcgagcactgtagactgtacttcggcgcactgttcaaggcgatttcagctttccacggctcattaagcagcagtcaacccgccgaaataatcactcagagcaagcttgtgataatggtgggccaaaaattagtagatacactgtgtatggagactcaagagcgtgacgttagaaatgagatactccgagggtctagccacctctgttcattgctgaaggatgtcgctttggccactaaaaatgccgtgctgacttacccttcacccgccgccctcgggcatctgcaggccgaggccgagaagctcgaacaacacacccgtcagttccggggcaccctggggtag

SEQ ID NO: 62318 - DNA, 2361 bp, Artificial Sequence
  derived and/or modified sequence
atgaaaggaactggcattatggactgcgcccctaaggccctgttagcaagagcactgtacgacaactgccccgactgctccgatgaactggctttctctcgcggtgacatcttaaccatcttggagcagcacgtgcctgagtctgagggttggtggaagtgtcttctgcatgggcgtcagggcctggcgcctgcaaatagactgcaaatactgacagaggtggccgctgaccggccttgcccaccatttctgcggggactcgaggaagcaccagcttcatctgaggaaacatatcaggtccctacactaccaaggccccctacacctggacctgtctacgagcagatgaggtcctgggccgaaggccctcagcctccgactgcccaggtgtacgaattccctgatcctccaacgtccgcgagaattatctgtgagaagacgctctccttccctaaacaggcgatcctgactctgcccagaccagtgagagcctcattgcccaccctgcctagccaggtttacgatgttccgacccaacatagagggccagtcgtgctgaaggagccagaaaagcagcagttgtacgatatccccgcatccccaaaaaaagccggtcttcatcccccagatagccaggcatcaggacagggagtgccactgatcagtgttaccacactcagacggggtggctacagcacactgcccaacccccagaagtccgaatggatttatgacacccctgtttcccccggaaaggcctctgtccgaaacacgcccttaaccagtttcgcagaggaatcaaggccacacgccctaccctcctccagttctacgttctataatccgccatctgggcgaagtcgcagtctgacacctcaactgaacaacaacgtgcccatgcagaaaaagctcagcctgccagagattccaagttatggtttcctagtccctcggggaacattccccctggatgaggacgtcagctataaggtaccatcctcattcttaattccaagagtggagcagcaaaatacgaagcccaatatttacgatatccctaaggcaacctcctcagtctcacaggcgggaaaggaactggagaaggcaaaggaggtgagcgaaaacagcgctggtcacaattcctcttggttctcgaggagaacgacctccccctcccctgagcccgacagactttccggatcatccagtgatagtcgggcttctatagtttcaagctgctcgacgaccagcactgatgactcttcatcctcaagctcagaagaaagtgctaaagaactctccttggatttggatgtggcaaaagaaacggtcatggccctgcagcacaaggtggtatcatccgtggccggtcttatgctttttgtgtctaggaagtggcgctttcgtgactatctcgaagctaatattgatgccatccaccgcagtacggatcacattgaggagagtgtgagggagtttcttgatttcgcgcgaggcgtccacgggacagcttgtaatttgaccgactcaaatctccagaatagaatccgggatcagatgcagaccatcagcaatagctataggatcctcctggaaaccaaagagagcctggataatagaaattggcctctggaagtcctggtaacagactcagtgcagaattcacctgacgacctggaaaggttcgttatggtcgctcgcatgcttcccgaggatatcaagagatttgcctccattgtcatagcaaatgggcgacttctttttaagcgaaactgtgaaaaagaggagacagtgcaactgactcctaacgccgagttcaaatgtgagaagtatatccaaccgccacagagagaaacagagagtcatcagaaatccaccccctcaacgaagcagcgggaggatgaacactcaagcgagctgctcaaaaagaacagagccaacatatgcggacagaacccaggcccattgatcccccaaccgtcaagtcagcagacgccagagcgaaagcctagactgtcagagcattgtagactgtacttcggcgctctgttcaaagccatctccgcatttcatgggagcctctccagctctcagcctgcagaaatcatcactcagtcaaaactggtcatcatggtcgggcagaagctagtagacactctttgtatggaaactcaggagagggacgtgcggaacgagattctgaggggctcatctcatctgtgttcgctgctcaaggatgtggcattggcaacaaagaacgcagtccttacgtatccctctcccgcagcactgggccacctgcaagcagaagccgaaaagttggagcagcacaccagacaattccggggtaccttgggttag

SEQ ID NO: 62319 - DNA, 2361 bp, Artificial Sequence
  derived and/or modified sequence
atgaaaggaaccggcattatggactgtgcccctaaggcactactcgccagggccctgtacgacaactgtcctgactgctcagacgaattggccttttcccggggagacatcctgactatcctcgagcagcatgtgccagaatcagaggggtggtggaaatgcctgctgcacggcaggcaaggcctggctccggctaaccggctacagatcctgacggaggtcgccgctgaccgcccatgtccgccatttctaagaggattggaagaagctccagcttccagtgaggagacctatcaggtgcccaccctgcctcgaccacccacccccggtcctgtctacgaacagatgaggtcctgggctgaaggccctcagccccctactgcccaagtgtatgagttcccagaccccccaacctccgccagaatcatttgcgaaaagacactgtctttccccaagcaggccattttgaccttgcctcgtccagtgcgggctagtctgccgactctgccaagccaggtttatgacgtgcccacgcagcatcgaggccctgtggtgcttaaagagccagaaaagcaacagctctacgatattcccgcaagccccaaaaaggcgggactccacccaccagacagccaggccagtgggcagggcgtcccactcatatcagtcacaacactcaggagagggggttactcaacactgccaaacccgcagaagtccgagtggatctatgatacccctgtgtcccctggaaaggcaagtgtgcgcaacacgccactgacctccttcgcggaggagtcccgaccgcatgccttgccttctagtagttcgacattctacaaccctcctagcggacgctcacggagcctcaccccccagctgaacaataacgttcccatgcagaagaaactgagtcttcccgagattccttcctacggcttccttgtgccccgaggaacattccctctcgatgaagatgtatcttacaaggtgcccagtagctttctaattcctcgcgttgaacagcagaacaccaaaccaaatatctacgacatacccaaagcgacaagctccgtctcacaggctggcaaagaattggaaaaagctaaggaagtcagtgaaaacagcgccggacataattcatcctggttctcccggaggacaacctcaccgagcccagaacctgacagactgtctggaagctctagcgatagtcgggcatcaatcgtttcatcctgtagtactacatccaccgacgactccagttccagcagttctgaggagtcagccaaggagctgtcattagatctggacgtggccaaggagacagtgatggcgttgcagcacaaagtcgtgtcttccgtggcgggactgatgctgttcgtttcaagaaagtggcgcttcagggattaccttgaggccaatatcgacgctattcaccgatctacagaccatattgaggagtcggtgcgtgagtttctggatttcgccagaggcgtgcacgggactgcatgcaacctcacggactctaacttacagaatcgcatccgcgaccaaatgcaaacaattagtaactcctatcggatactacttgagactaaggaaagcctcgacaatagaaactggccgttggaggtgctcgtgacagactcagtgcagaattctccagacgacctcgaacggtttgtgatggttgcacgaatgctgcctgaagatataaagaggtttgctagtatagtaatcgcgaacggcaggctcctcttcaagaggaattgcgaaaaggaggaaacagtacagctgacacccaatgcagaattcaagtgtgaaaagtatatccaaccccctcaacgggagactgaatcacaccagaaaagtactccctccacgaagcagagggaggacgagcatagttctgagttactcaagaagaatcgggcaaatatctgtggccaaaatcccggtcccttgattccccaaccatctagccagcaaacgcccgaacgaaagccccgactgtcggagcactgtcggttatactttggtgctctgtttaaagcaatctccgcattccatggatccctttcaagctctcaacctgcagaaattatcactcaatccaagctagttattatggtcggtcagaagctagtggacaccctttgcatggaaacacaggaaagagatgtgagaaatgagatcctgagaggaagtagccatctgtgctctctgctgaaagacgtcgctctggctacaaagaatgctgtcctgacttacccaagccctgcagccctgggacaccttcaggctgaagccgaaaaactggagcagcacaccagacagtttcggggtaccctgggttag

SEQ ID NO: 62320 - DNA, 2619 bp, Artificial Sequence
  derived and/or modified sequence
gaagagtggtgtttttttcttcttcttcttcttttgtggtttcacatagcaaatgagtgacagtctctacttacagacaaagtgagacgtcaggcattgagacatagctccatagaattcagtttctgagaaccagccagaagcatgcagtgacattgcacaatctgcctctgaagctggagatactagctgcagagctcaggggagctgctccacatcaccgacatgaagggaacaggcatcatggactgtgcgcccaaggcactcctggccagggcactttatgacaactgccctgactgctctgacgagctggctttcagcagaggggacatcctgaccattctggagcaacacgtgccagaaagcgagggttggtggaagtgtttgctccatgggaggcaaggcctggcccctgccaaccgcctccaaatcctcacggaggtcgctgcagacaggccgtgccccccattcctgagaggcctggaagaagctcctgccagctcagaggagacctatcaggtgcccactctaccccgccctcccactccaggccccgtttatgagcagatgaggagttgggcggaggggccccagccccctactgcccaagtctatgaattccccgaccctcccaccagtgccagaatcatctgtgaaaagactctcagctttccaaaacaggccatcctcacgcttcccagacctgtccgggcctcactgccgactctgccttcccaggtgtatgacgtgcctacccagcaccggggccccgtggtcctgaaggagccagagaagcagcagttatatgacataccagccagccccaagaaggcaggactccatcccccagacagccaagcaagtgggcagggtgttcccctgatatcagtgactaccttaagaagaggcggttacagcacattaccaaatcctcagaaatcggaatggatttatgacactccagtgtctccaggaaaggccagcgtcagaaacacgcctctcaccagctttgcggaagaatcaaggccccacgctctccccagttccagctccactttctacaatcctccaagtggcagatccaggtccctcactccacaactgaataacaatgtgcccatgcagaaaaaactcagccttccagaaattccttcttatggctttcttgtacccagaggcacatttcctttggatgaagatgtcagctacaaggttccttcaagctttctgattccccgagtggaacagcagaacaccaagcccaatatttatgacatccctaaagcaacgtcgagtgtttctcaggctgggaaggagctggagaaagccaaggaggtgtcagagaattccgcgggccataattcctcatggttctccagacggacaacttccccatctcctgaaccggacagattatcaggttccagttctgacagcagagctagcatcgtttcctcgtgctccaccacatccaccgacgactcctccagctcttcctcggaggagtcagcaaaggagctctccttggacctggatgtggccaaggagacagtgatggctctgcagcacaaggtggtcagctctgtcgctggcctgatgctctttgtcagcaggaagtggagattccgagactatctggaggccaacattgatgcaatccacaggtccactgatcacatagaagaatctgtaagagaatttctggattttgcccgaggagtccatgggactgcctgtaacctcactgacagtaaccttcagaacagaattcgggaccagatgcagaccatctccaactcctaccgcatcctgcttgaaacaaaggaaagcttggataatcgcaattggcctctggaagttcttgtgactgacagtgtccagaacagcccagatgaccttgagaggtttgtcatggtggcacggatgcttccagaagacatcaagaggtttgcctccattgtcattgccaatggaaggctcctttttaagcggaactgtgaaaaggaagagactgtgcagttgaccccaaatgcagaatttaagtgtgaaaaatacatccagcctccccaaagagaaactgaatcacaccaaaagagtaccccttccactaagcaaagggaagatgaacactcttctgaactattaaagaaaaatagggcaaatatctgtggacagaatcctggccctcttatacctcagccttcgagtcaacagactcctgagaggaaaccccgcttatctgaacactgccggctctactttggggcgctcttcaaagccatcagcgcatttcacggcagcctcagcagcagccagcccgcggagatcatcactcagagcaagctggtcatcatggtgggacagaagctggtggacacgctgtgcatggagacccaggagagggacgtgcgcaacgagatcctccgtggcagcagtcacctctgcagcctgctcaaggacgtagcgctggccactaagaatgccgtgctcacgtaccccagccctgccgcgctggggcacctccaggcggaggctgagaagctggagcaacacacgcggcagttcagagggacactgggatgaggactgtctacctcccttcctcctctgctcacc

SEQ ID NO: 62321 - DNA, 3155 bp, Artificial Sequence
  derived and/or modified sequence
ttcattttactcttatcgtgctttccagaaagtttgcctgctgggagagtctttttgatcgtttcccatgtgttgtcagatagctccatagaattcagtttctgagaaccagccagaagcatgcagtgacattgcacaatctgcctctgaagctggagatactagctgcagagctcaggggagctgctccacatcaccgacatgaagggaacaggcatcatggactgtgcgcccaaggcactcctggccagggcactttatgacaactgccctgactgctctgacgagctggctttcagcagaggggacatcctgaccattctggagcaacacgtgccagaaagcgagggttggtggaagtgtttgctccatgggaggcaaggcctggcccctgccaaccgcctccaaatcctcacggaggtcgctgcagacaggccgtgccccccattcctgagaggcctggaagaagctcctgccagctcagaggagacctatcaggtgcccactctaccccgccctcccactccaggccccgtttatgagcagatgaggagttgggcggaggggccccagccccctactgcccaagtctatgaattccccgaccctcccaccagtgccagaatcatctgtgaaaagactctcagctttccaaaacaggccatcctcacgcttcccagacctgtccgggcctcactgccgactctgccttcccaggtgtatgacgtgcctacccagcaccggggccccgtggtcctgaaggagccagagaagcagcagttatatgacataccagccagccccaagaaggcaggactccatcccccagacagccaagcaagtgggcagggtgttcccctgatatcagtgactaccttaagaagaggcggttacagcacattaccaaatcctcagaaatcggaatggatttatgacactccagtgtctccaggaaaggccagcgtcagaaacacgcctctcaccagctttgcggaagaatcaaggccccacgctctccccagttccagctccactttctacaatcctccaagtggcagatccaggtccctcactccacaactgaataacaatgtgcccatgcagaaaaaactcagccttccagaaattccttcttatggctttcttgtacccagaggcacatttcctttggatgaagatgtcagctacaaggttccttcaagctttctgattccccgagtggaacagcagaacaccaagcccaatatttatgacatccctaaagcaacgtcgagtgtttctcaggctgggaaggagctggagaaagccaaggaggtgtcagagaattccgcgggccataattcctcatggttctccagacggacaacttccccatctcctgaaccggacagattatcaggttccagttctgacagcagagctagcatcgtttcctcgtgctccaccacatccaccgacgactcctccagctcttcctcggaggagtcagcaaaggagctctccttggacctggatgtggccaaggagacagtgatggctctgcagcacaaggtggtcagctctgtcgctggcctgatgctctttgtcagcaggaagtggagattccgagactatctggaggccaacattgatgcaatccacaggtccactgatcacatagaagaatctgtaagagaatttctggattttgcccgaggagtccatgggactgcctgtaacctcactgacagtaaccttcagaacagaattcgggaccagatgcagaccatctccaactcctaccgcatcctgcttgaaacaaaggaaagcttggataatcgcaattggcctctggaagttcttgtgactgacagtgtccagaacagcccagatgaccttgagaggtttgtcatggtggcacggatgcttccagaagacatcaagaggtttgcctccattgtcattgccaatggaaggctcctttttaagcggaactgtgaaaaggaagagactgtgcagttgaccccaaatgcagaatttaagtgtgaaaaatacatccagcctccccaaagagaaactgaatcacaccaaaagagtaccccttccactaagcaaagggaagatgaacactcttctgaactattaaagaaaaatagggcaaatatctgtggacagaatcctggccctcttatacctcagccttcgagtcaacagactcctgagaggaaaccccgcttatctgaacactgccggctctactttggggcgctcttcaaagccatcagcgcatttcacggcagcctcagcagcagccagcccgcggagatcatcactcagagcaagctggtcatcatggtgggacagaagctggtggacacgctgtgcatggagacccaggagagggacgtgcgcaacgagatcctccgtggcagcagtcacctctgcagcctgctcaaggacgtagcgctggccactaagaatgccgtgctcacgtaccccagccctgccgcgctggggcacctccaggcggaggctgagaagctggagcaacacacgcggcagttcagagggacactgggatgaggactgtctacctcccttcctcctctgctcacctctcagcttcacacccacaacttgtgcaactctgccctatgggaaaagccagccggggcatacaccaatgagctgaaacagacctggtgcccaaagctggtagtaccaagtggctaagcaaccccagggcattgacttaccccgcagggggtcaggaaagagagtcaggtatgaggtaaagaccttgtgaagtttagcatatatggagtatgcagtatcagcttgaagtgacttcgcagaaataatattttatattgattaaatgtgtgcatgttttgtttgttttttgagacaaagtctcactctgtcacacaggctggagtgcagtggcgcgatctcagctcactgcaacctccgccttctgggttgaagcaattctcccgcctcagcctccagagtagctggtactacaggtgtgcgccaccatgcccagctaatttttgtatttttttttaatgaaaggtctcacatatttattactgaacccagccaaccaatgcattcataacagattcagaaagaaaaaatatattcccaataaaacatgtacaattctccag

SEQ ID NO: 62322 - protein, 812 aa, Artificial Sequence
  derived and/or modified sequence
MEAFQELRKPSARLECDHCSFRGTDYENVQIHMGTIHPEFCDEMDAGGLGKMIFYQKSAKLFHCHKCFFTSKMYSNVYYHITSKHASPDKWNDKPKNQLNKETDPVKSPPLPEHQKIPCNSAEPKSIPALSMETQKLGSVLSPESPKPTPLTPLEPQKPGSVVSPELQTPLPSPEPSKPASVSSPEPPKSVPVCESQKLAPVPSPEPQKPAPVSPESVKATLSNPKPQKQSHFPETLGPPSASSPESPVLAASPEPWGPSPAASPESRKSARTTSPEPRKPSPSESPEPWKPFPAVSPEPRRPAPAVSPGSWKPGPPGSPRPWKSNPSASSGPWKPAKPAPSVSPGPWKPIPSVSPGPWKPTPSVSSASWKSSSVSPSSWKSPPASPESWKSGPPELRKTAPTLSPEHWKAVPPVSPELRKPGPPLSPEIRSPAGSPELRKPSGSPDLWKLSPDQRKTSPASLDFPESQKSSRGGSPDLWKSSFFIEPQKPVFPETRKPGPSGPSESPKAASDIWKPVLSIDTEPRKPALFPEPAKTAPPASPEARKRALFPEPRKHALFPELPKSALFSESQKAVELGDELQIDAIDDQKCDILVQEELLASPKKLLEDTLFPSSKKLKKDNQESSDAELSSSEYIKTDLDAMDIKGQESSSDQEQVDVESIDFSKENKMDMTSPEQSRNVLQFTEEKEAFISEEEIAKYMKRGKGKYYCKICCCRAMKKGAVLHHLVNKHNVHSPYKCTICGKAFLLESLLKNHVAAHGQSLLKCPRCNFESNFPRGFKKHLTHCQSRHNEEANKKLMEALEPPLEEQQI

SEQ ID NO: 62323 - DNA, 2439 bp, Artificial Sequence
  derived and/or modified sequence
atggaggccttccaggagctgagaaagcccagcgccagactggagtgcgaccactgcagcttcagaggcaccgactacgagaacgtgcagatccacatgggcaccatccaccccgagttctgcgacgagatggacgccggcggcctgggcaagatgatcttctaccagaagagcgccaagctgttccactgccacaagtgcttcttcaccagcaagatgtacagcaacgtgtactaccacatcaccagcaagcacgccagccccgacaagtggaacgacaagcccaagaaccagctgaacaaggagaccgaccccgtgaagagcccccccctgcccgagcaccagaagatcccctgcaacagcgccgagcccaagagcatccccgccctgagcatggagacccagaagctgggcagcgtgctgagccccgagagccccaagcccacccccctgacccccctggagccccagaagcccggcagcgtggtgagccccgagctgcagacccccctgcccagccccgagcccagcaagcccgccagcgtgagcagccccgagccccccaagagcgtgcccgtgtgcgagagccagaagctggcccccgtgcccagccccgagccccagaagcccgcccccgtgagccccgagagcgtgaaggccaccctgagcaaccccaagccccagaagcagagccacttccccgagaccctgggcccccccagcgccagcagccccgagagccccgtgctggccgccagccccgagccctggggccccagccccgccgccagccccgagagcagaaagagcgccagaaccaccagccccgagcccagaaagcccagccccagcgagagccccgagccctggaagcccttccccgccgtgagccccgagcccagaagacccgcccccgccgtgagccccggcagctggaagcccggcccccccggcagccccagaccctggaagagcaaccccagcgccagcagcggcccctggaagcccgccaagcccgcccccagcgtgagccccggcccctggaagcccatccccagcgtgagccccggcccctggaagcccacccccagcgtgagcagcgccagctggaagagcagcagcgtgagccccagcagctggaagagcccccccgccagccccgagagctggaagagcggcccccccgagctgagaaagaccgcccccaccctgagccccgagcactggaaggccgtgccccccgtgagccccgagctgagaaagcccggcccccccctgagccccgagatcagaagccccgccggcagccccgagctgagaaagcccagcggcagccccgacctgtggaagctgagccccgaccagagaaagaccagccccgccagcctggacttccccgagagccagaagagcagcagaggcggcagccccgacctgtggaagagcagcttcttcatcgagccccagaagcccgtgttccccgagaccagaaagcccggccccagcggccccagcgagagccccaaggccgccagcgacatctggaagcccgtgctgagcatcgacaccgagcccagaaagcccgccctgttccccgagcccgccaagaccgccccccccgccagccccgaggccagaaagagagccctgttccccgagcccagaaagcacgccctgttccccgagctgcccaagagcgccctgttcagcgagagccagaaggccgtggagctgggcgacgagctgcagatcgacgccatcgacgaccagaagtgcgacatcctggtgcaggaggagctgctggccagccccaagaagctgctggaggacaccctgttccccagcagcaagaagctgaagaaggacaaccaggagagcagcgacgccgagctgagcagcagcgagtacatcaagaccgacctggacgccatggacatcaagggccaggagagcagcagcgaccaggagcaggtggacgtggagagcatcgacttcagcaaggagaacaagatggacatgaccagccccgagcagagcagaaacgtgctgcagttcaccgaggagaaggaggccttcatcagcgaggaggagatcgccaagtacatgaagagaggcaagggcaagtactactgcaagatctgctgctgcagagccatgaagaagggcgccgtgctgcaccacctggtgaacaagcacaacgtgcacagcccctacaagtgcaccatctgcggcaaggccttcctgctggagagcctgctgaagaaccacgtggccgcccacggccagagcctgctgaagtgccccagatgcaacttcgagagcaacttccccagaggcttcaagaagcacctgacccactgccagagcagacacaacgaggaggccaacaagaagctgatggaggccctggagccccccctggaggagcagcagatctag

SEQ ID NO: 62324 - DNA, 2439 bp, Artificial Sequence
  derived and/or modified sequence
atggaggcatttcaggagctccggaaaccatcagcccgactggagtgcgaccattgttcttttcggggcaccgattatgagaacgtccagatccatatgggaactatccatcctgaattctgtgacgaaatggatgcaggtggactggggaaaatgattttttaccagaagtccgcaaagctctttcactgccataagtgtttctttacaagcaaaatgtattctaacgtatactaccacattacctcaaagcacgcctctccagacaaatggaatgataagcctaagaatcaactcaataaagagaccgacccagtaaagtctcctcccttgccagaacatcaaaaaatcccctgtaacagcgccgagcctaagtcaatcccggctctatccatggaaacgcaaaaactcggttcagtgctcagtcctgagagtccaaaacccacaccactaacacccctggaaccacagaagcccggcagcgtcgtttctcctgagcttcagaccccactcccttcacccgagccatccaagcctgcctccgtctccagccctgaacctcctaaaagcgtgcctgtgtgtgaatctcagaagctggctcccgtgccaagcccggaaccccagaaaccagcccctgtgtctccagaatcggtgaaagccacactctcaaatccgaaaccgcagaaacagagtcatttccccgaaaccttaggacccccctccgcttcctcccctgagagcccagttcttgccgcatccccagaaccgtggggacctagtcccgctgcgtctcccgaatccagaaagagcgctcggactaccagtcctgagccaagaaagcctagtccctcagaatctcctgagccctggaaaccctttcctgcagtgagccctgagccacggagaccagctcccgctgttagccccgggtcctggaagcccggcccgccaggcagtccgagaccgtggaagtcaaacccttccgcttcaagtggaccatggaaacctgctaagccagcccccagcgtgtctcctgggccatggaagcccatccctagcgtgagtcctggtccctggaagcctacaccttccgtcagcagtgcatcctggaaatcttcatcagtctccccttcttcttggaaatccccccctgcgagcccagaaagttggaagagcggcccccccgaactccgaaaaacagcaccgactctgagccctgaacactggaaggccgttccccctgtgagcccggagcttcggaagccaggcccacctctgtctccggaaatccgatcacccgctggttctcccgagctcaggaagccgtctggctcccctgatttatggaagctcagtcccgaccagcggaaaacaagtccagctagcttggactttcccgaatcccagaaaagctcccgcggagggtctcccgacctttggaaatcctcattttttatcgagccacagaaacctgtcttccctgagacgagaaagcccggcccatcgggcccatctgagagccccaaagctgcctcagacatttggaagcccgtgctctctattgatacagaaccacggaaaccagctctctttccagagcctgccaagactgcgccccccgccagtcccgaagcgcgtaagagagcactctttcctgaacctcggaagcacgcacttttcccagagttgcctaagtcagccctttttagcgagtctcaaaaggccgtcgaactgggggatgaactgcaaattgacgccattgacgatcagaagtgcgacatcctggtgcaagaggagctcctcgctagcccgaagaagctcctagaggataccctctttccctcatctaaaaaacttaaaaaggataaccaggagtcatccgatgctgagctgtccagcagtgaatatatcaaaacggatttggacgctatggacatcaaggggcaggagtcgtcatctgatcaggagcaagtagacgttgagagtatcgatttcagtaaggagaacaaaatggatatgacttcacccgaacagtcgcggaacgtgctccagtttactgaagagaaggaggcatttatttccgaggaagagatcgcaaagtatatgaagaggggtaaagggaagtactactgtaaaatatgctgttgcagggccatgaagaaaggagcggtcctgcatcacttggtcaataagcacaatgtccacagcccttacaagtgtaccatttgtggcaaagcttttctgctagaatctcttctgaagaatcatgtcgccgctcatggccagtctctgcttaagtgcccaagatgtaacttcgagtccaacttcccacggggctttaaaaagcacctgactcattgccaatctagacataatgaggaggccaataaaaaactcatggaagccctggagccacccctcgaagagcagcaaatctag

SEQ ID NO: 62325 - DNA, 3788 bp, Artificial Sequence
  derived and/or modified sequence
atcccggctcctgcatccagtcgccattcgggaggccgctgcgctgcagggcctcgcggagccgcccgcgaccgcgagccgggccctccgcgcggtccatcgcccactggacgccgcccgcggccggaccggttcaacttctcatctttgttcttcttcatatactataggctgtttgctgtggtttagtcaaaaagccatgtagaatgcctgccttttgaagaccacttttaaggtgtctagtaagacagcagcagtattgaaagtttttaaagaatataaccgtgtgtgttggtaacagacagaagaatggaagcattccaggaacttcgtaaaccatcagcacgtttggagtgtgaccattgcagtttcagaggcacagactatgaaaatgtacaaatccatatgggtaccatccatccagaattttgtgatgaaatggatgctggtgggctaggcaaaatgatattttaccagaaaagtgcaaagttatttcactgccataaatgcttcttcaccagcaagatgtactctaatgtatactatcacatcacatccaaacatgcatccccagacaaatggaatgataaaccaaaaaatcagttgaacaaagaaacagatcctgtgaaaagccctcctcttcctgaacaccagaaaataccctgcaattcagcagaaccaaaatccatacctgccctttcaatggaaacacagaaacttggttcagttttgtctccagaatcgccaaaacctactcctcttactcccctggagcctcagaaacctggctctgttgtttctcctgagctacagacacctcttccttctcctgagccttcaaaacctgcctctgtttcttctcctgaacctccaaaatcagtccctgtttgtgagtctcagaaacttgcccctgttccttctccagaaccacagaaacctgcccctgtatctcctgagtcagtaaaggctactcttagtaatcccaaaccccagaagcagtctcatttcccggaaacattggggccaccttcagcctcatctccagagtcaccagttctagctgcttccccagaaccttggggaccatccccagctgcatctccagaatctcggaagtcagcccggactacctcccctgagccaaggaagccatccccttcagagtctcctgaaccttggaagccgttccctgctgtctccccagagcctaggagaccagcccccgctgtgtcaccaggctcttggaaaccagggccacctgggtcccctaggccttggaaatccaatccttcagcatcatcaggaccttggaagccagctaaacctgctccatctgtgtctcctggaccttggaaaccaattccttctgtatctcctggaccttggaaaccaactccatctgtgtcttctgcatcctggaaatcttcatcagtctcacccagctcctggaagtctccccctgcatctcctgagtcatggaagtctggcccaccagaactccgaaagacagctcccacgttgtctcctgaacattggaaggcagttcccccagtgtctccagagcttcgcaaacccggcccaccactatccccagagatccgtagtccagcaggatctccagagctcagaaaaccctcagggtcaccagatctttggaagctttctcctgatcagcggaaaacttctcctgcttcacttgatttccctgagtcccagaaaagttcccgtggtggttctcctgatctctggaagtcttccttttttattgagcctcagaaacctgtcttccctgagacccgaaaaccaggtccttctgggccatctgagtcccccaaagcagcctcagatatctggaagcctgttctctctatcgatactgagcctagaaaacctgccctgtttcccgagcctgccaaaacagcccctcctgcttctccagaagcacgcaaacgtgccctttttccagagccccggaagcatgcccttttccctgaactccccaaatctgctctattctcagaatcacagaaggctgttgagcttggtgatgaactacaaatagatgccatagatgatcaaaaatgtgatattttggttcaggaagaacttctagcttcacctaagaaactcttagaagatactttatttccttcctcaaagaagctcaagaaagacaaccaagagagctcagacgctgagcttagtagtagtgagtacataaaaacagatttggatgcgatggatattaagggccaggaatcaagcagtgatcaagagcaggttgatgtggaatccattgattttagcaaagagaacaaaatggacatgactagtccagagcagtctagaaatgtgctacagtttactgaagaaaaagaagcttttatctctgaagaggagattgcaaaatacatgaagcgtggaaaaggaaagtattattgcaaaatttgttgctgtcgtgctatgaaaaaaggtgctgttttgcatcatttggttaataagcataatgttcatagcccttacaaatgcacaatctgtggaaaggcttttcttttggaatctctccttaaaaatcatgtagcagcccatgggcaaagtttacttaaatgtccacgttgtaattttgaatcaaatttcccaagaggttttaagaaacatttaactcattgtcaaagccggcataatgaagaggcaaataaaaagctaatggaagctcttgaaccgccactggaggagcagcaaatttgataacacagtgtgaatatttgttctacaaaggtgtttgttggaaccattctttgtaagtatagcttatcagatagcatagttggatcagtagatgacatgtatggtgtaccgtgtttcactgtctcagttgtgttactaagaatgagcatttgatcatttttttctggtctctgtctatgtgactatcttgtaagtcaataaatttctgtatagtccagatggattaaacttctcatttcttttaaatatgtatgaataataatacaaggaagtaggcattccatttaataatcaagagcaagttgtactcaaagcattcagttaaagtgtatctgtgtgtggaactaatttcagacaatagaaaatattagttgaaatgtttaagaattaggcatgaaaaataaatttgagaaattttgtttccttacatgtatttttaaatcataagagttattttctatctgatgtaaaattagtttataaatcttaatcagcttctagatgtttattagcttttatgtcatgaaatgttggagtctcagggttgctgattttctgctaatgggaaaaattgactaagtctttaaaatagtttgcagccttctcccacaggagacaagtgaaagataagtgtgattttagatctttcttgtccatagttgttttcagtggagtcttccattctgtatcttaccctaagatctggttcttccctccccatccccaccccccacccaccgcctgccagctcacactaatagatgattcttaattgccaaatgtgttagagtttgtatatcctactcctgggccttacatgtcgcctgttggggcttaagaccaggttgataagtaggaactgaaagtcttccagattcacagtagaaaattttatagacatttctgttaaagaaatatatcgattttatgtttttcaattatgttactgtaaataccttgtacctgttcatggattattttattctaaaatattttgtcaaatgtgtatcaaccaaattaaaaagaaaggttttcatgtc

SEQ ID NO: 62326 - DNA, 2439 bp, Artificial Sequence
  derived and/or modified sequence
atggaggccttccaggagctgaggaagcccagcgcccggctggagtgtgaccactgcagcttccggggcacagattatgaaaatgtgcagatccacatgggcaccatccaccctgagttctgtgatgagatggatgctgggggcctgggcaagatgatcttctaccagaagagcgccaagctgttccactgccacaagtgcttcttcaccagcaagatgtacagcaatgtgtactaccacatcaccagcaagcacgccagcccagacaagtggaatgacaagcccaagaaccagctgaacaaggagacagatcctgtgaagagcccccccctgcctgagcaccagaagatcccctgcaacagcgctgagcccaagagcatcccagccctgtccatggagacccagaagctgggctctgtgctgagccctgagagccccaagcccacccccctgacccccctggagccccagaagccaggctctgtggtgtccccagagctgcagacccccctgcccagccctgagcccagcaagccagcctctgtgagcagccctgagccccccaagtctgtgcctgtgtgtgagagccagaagctggcccctgtgcccagccctgagccccagaagccagcccctgtgtccccagagagcgtgaaggccaccctgagcaaccccaagccccagaagcagagccacttccctgagaccctgggccccccatctgccagcagccctgagagccctgtgctggccgccagccctgagccctggggccccagccctgctgccagccctgagagcaggaagagcgcccggaccaccagccctgagcccaggaagcccagccccagcgagagccctgagccctggaagcccttccctgctgtgtccccagagcccaggaggcctgccccagctgtgtccccaggctcctggaagccaggccccccaggcagcccccggccctggaagagcaaccccagcgccagcagcggcccctggaagccagccaagccagcccccagcgtgtccccaggcccctggaagcccatccccagcgtgtccccaggcccctggaagcccacccccagcgtgtcctctgcctcctggaagagcagctctgtgagccccagctcctggaagagccccccagccagccctgagagctggaagagcggccccccagagctgaggaagacagcccccaccctgagccctgagcactggaaggctgtgccccctgtgtccccagagctgaggaagccaggcccccccctgagccctgagatccgcagccctgctggcagccctgagctgaggaagcccagcggcagcccagacctgtggaagctgagcccagaccagaggaagaccagccctgccagcctggacttccctgagagccagaagagcagccggggcggcagcccagacctgtggaagagcagcttcttcatcgagccccagaagcctgtgtttcctgagaccaggaagccaggccccagcggccccagcgagagccccaaggccgccagtgacatctggaagcctgtgctgagcattgacacagagcccaggaagccagccctcttccctgagcccgccaagacagcccccccagccagccctgaggccaggaagagggccctcttccctgagcccaggaagcacgccctcttccctgagctgcccaagagcgccctcttcagcgagagccagaaggctgtggagctgggagatgagctgcagattgatgccattgatgaccagaagtgtgacatcctggtgcaggaggagctgctggccagccccaagaagctgctggaggacaccctcttccccagcagcaagaagctgaagaaggacaaccaggagagcagtgatgctgagctgagcagcagcgagtacatcaagacagacctggatgccatggacatcaagggccaggagagcagcagtgaccaggagcaggtggatgtggagagcattgacttcagcaaggagaacaagatggacatgaccagccctgagcagagcagaaatgtgctgcagttcacagaggagaaggaggccttcatcagcgaggaggagatcgccaagtacatgaagaggggcaagggcaagtactactgcaagatctgctgctgccgggccatgaagaagggagctgtgctgcaccacctggtgaacaagcacaacgtgcacagcccctacaagtgcaccatctgtgggaaggccttcctgctggagagcctgctgaagaaccacgtggccgcccacggccagagcctgctgaagtgcccccgctgcaactttgagagcaacttcccccggggcttcaagaagcacctgacccactgccagagccgccacaatgaggaggccaacaagaagctgatggaggccctggagccccccctggaggagcagcagatctag

SEQ ID NO: 62327 - DNA, 2439 bp, Artificial Sequence
  derived and/or modified sequence
atggaggccttccaggagctgcggaagcccagcgcccggctggagtgtgaccattgttcctttcgaggcaccgactacgagaacgttcagatccacatggggactatacatcccgaattctgtgatgaaatggacgccggaggccttgggaaaatgattttctaccagaagtccgctaaactttttcattgtcataagtgcttttttacatccaagatgtactctaatgtgtactaccacatcacttctaaacatgcatctcctgacaaatggaacgataagcccaagaaccagctgaacaaggagacagacccagtcaaatcccctccattgcctgaacaccagaagataccctgcaactctgctgagcctaagtctatccctgctctgtctatggagactcagaagctcggatccgtcctcagtccggagagtccaaagcccacccctctgaccccattagaacctcaaaagcccggatccgtagtcagcccagagctccagactccactgcccagtccggagccctctaaacccgcgagcgttagcagcccggagccccccaaatccgtgccagtgtgcgaaagtcagaaactagctcctgtgcccagcccagaaccccagaaacctgcaccagtatccccagaatccgtaaaggccacactctctaaccctaagccacagaagcagtcccatttcccagaaacactcgggcctccaagtgcttcctcacctgagagccccgtgctggctgcctcccctgagccctgggggccaagtcccgctgcaagcccggaaagtcggaaaagtgcccgcactacaagtcccgagccacgaaagcctagccccagcgagtcccctgaaccgtggaaacctttcccggctgtgtcacctgagccccgacgccccgcacccgccgttagccccggaagctggaagccaggacctccagggtctcctcgcccgtggaagagtaacccatccgcatcctccggtccatggaagccggctaagcccgcacccagcgtttcacccggtccatggaaacccatccctagtgtgagccctggaccctggaaacccacacctagcgtatcctcagctagttggaaatcgagcagtgttagtccatcgagttggaaaagcccccctgccagccccgagagctggaagtcgggccctcctgagctgaggaagacagcccctactttaagccccgaacactggaaggccgtgccacccgtatctcccgaactcagaaagccaggtccgccactttcacctgagattcggtcccccgcgggatcacctgaactccggaaacccagcggaagcccagacctgtggaaactctcccctgatcagagaaaaacttcccccgccagtctggacttccctgaatcccaaaaaagttcgcgagggggcagtcctgacctgtggaagtcgtcctttttcattgaaccccagaagcccgtcttcccagagaccaggaagcccgggcccagcggaccctcggagtcacccaaagctgcatcagatatatggaagcctgtgttatccatagatactgaacctaggaaaccggccttgtttccagagcccgcaaagacagcacctcctgcttcgccggaggcaaggaagcgcgctctctttccagaacctcggaagcatgctctcttccctgaattgcccaagtccgccctattctccgagtcacagaaagcagtggagcttggggatgagctgcagattgacgctatcgacgaccagaaatgtgacatcctggtgcaggaggagctgctggcatcgccaaaaaaacttttggaggataccctttttccttcttctaagaagctgaagaaagataatcaggaaagctcagacgccgagcttagttcttctgagtacattaagaccgatctcgacgctatggatattaaggggcaggagagcagcagtgaccaggaacaagtcgatgtggaaagcattgattttagtaaagagaacaaaatggacatgacaagtcctgaacagagtcggaatgtcctgcagtttactgaagaaaaggaggcctttatctcagaggaggagattgctaaatacatgaaaaggggcaagggcaaatactactgcaaaatctgttgttgcagagcgatgaagaagggcgcagtgctccaccacttagtgaataagcacaatgtgcacagcccatataagtgcaccatttgcggaaaggcgtttctgctcgagagtctactcaagaaccacgttgcagctcacgggcagtcgttgctcaaatgtcccagatgcaatttcgaatccaattttccgagaggttttaagaaacatctgacacactgtcaatctcgccacaatgaagaggctaacaagaagcttatggaggctttggagccaccccttgaggagcagcagatctag

SEQ ID NO: 62328 - DNA, 2439 bp, Artificial Sequence
  derived and/or modified sequence
atggaagccttccaggaacttagaaagccaagtgccagactggagtgtgatcattgctcattcagaggcactgattatgagaacgtccaaattcacatgggaaccatccatccagaattctgcgatgaaatggatgcaggaggcctggggaaaatgattttctaccagaaaagcgcgaaactcttccattgccataagtgtttttttacatcgaaaatgtattccaacgtctattaccacatcaccagtaaacacgccagcccggataagtggaacgataagcccaagaaccagcttaacaaggagacagatccagtcaagagcccccctctgcctgaacatcagaagatcccttgcaactctgccgagcctaaatcaattcctgcactgtccatggaaacgcaaaaactgggctccgtcctgagcccggaaagccccaagcccactccactgaccccccttgagccccaaaaacctgggtccgtcgtgtcacccgagctacagaccccgcttcccagccccgagcctagcaaacccgcttcagtgtctagccctgagcctcctaagtctgtgcctgtctgcgagtcacagaagcttgcacccgtaccatctccggaaccccagaagcccgcaccagttagtcctgaaagcgtcaaggctacactaagtaaccctaagccacagaagcaatcccactttcccgagaccctgggccctccgagcgcctcctctccagagtctccggtgctcgctgcatccccagagccttggggacctagccccgctgcaagcccagagtccaggaaaagtgcccgtacaaccagcccggagccaaggaaaccttcacccagtgaatctcctgagccttggaagcccttccccgcagtgagcccagaaccacgcaggccagcacctgccgtgtcccctggtagctggaagcctggccctcctggctcacccaggccttggaagtccaacccttcagcaagctcgggaccttggaagccagccaaacctgccccatccgtctctccgggaccttggaagcccattcctagcgtctcacccggtccctggaagccaaccccctctgtctcctcagcgtcctggaaatcttctagcgtcagtccttcctcgtggaaatcacccccagcctcacccgagtcctggaagtctggacctcccgaattacgcaagactgcacctactctgtcacctgaacactggaaagccgtgccccctgttagccctgaactgcgtaagcctggacctcccctttcacctgagatcagatcacccgctgggtcacctgagctgagaaagccaagtggatctcctgatctgtggaagctgagtcctgaccagcgcaagacgagcccggcatccctagactttcctgagagccaaaagagctcaagaggtggctcaccggatctgtggaagagttccttttttatcgagccgcagaagccagtatttcccgaaactcgtaagcctggtccaagcggcccatcggaatccccgaaggctgccagcgacatatggaagcccgtgctcagtatagatactgagccaaggaagcccgctttgtttcccgagccagcgaaaactgcacccccagcaagccctgaagctcggaagagagcactcttcccagaacctcgaaagcacgccctgtttcccgagctgcctaaatccgctctttttagtgagagtcagaaggccgtggagttaggggatgaactgcagatagacgctattgacgaccagaaatgcgacatcttggtccaagaggagctgcttgccagtccgaaaaaactgctcgaagacaccctctttccatcaagcaagaagctgaaaaaggacaaccaagaatcatccgacgcagagctgtcctcttcagagtacatcaagactgacctcgatgcaatggacatcaagggccaggagtcctccagtgatcaggagcaagtggatgtcgaatccatagatttctcaaaggaaaataagatggacatgacgagtcccgagcagtcgcgaaatgtattgcagttcactgaagagaaggaggcatttatcagcgaagaggagatcgccaaatatatgaagaggggaaaaggcaaatactactgtaagatatgctgctgccgcgctatgaaaaaaggagccgtgctgcatcacctcgtgaacaagcacaacgtacactctccttacaagtgcaccatttgcgggaaagcctttcttctagaaagcctcctgaagaatcacgtagccgctcacggacagagcttgctgaagtgccctaggtgcaatttcgaaagcaatttccccagaggattcaaaaaacaccttacgcattgccagagccggcataacgaagaggcgaataagaaactcatggaagcacttgaacccccattagaagaacagcaaatttag

SEQ ID NO: 62329 - DNA, 366 bp, Artificial Sequence
  derived and/or modified sequence
atgatgaggagcatcttcctgccccacaggaagctgatctgcagccggcggggccacctggacccccggggctgggaggaggatgagaagatcctggtgcctgatgccatccccaccctgcccccctacgtgttcatcagaacagaccaggcctgtgtgaaggtgtacccaggctttgtgctgatcagaaatggcaagacccaccgccacagaggagactgccacgaggaggaggtgtgtgcccacaggaccctggagactggaggcatggcctgccacgtgggcccccatggagagggccccagcctgtggggcttctggggctcctggaagcaggtgctcttcttcctgcctgtggaccactag

SEQ ID NO: 62330 - DNA, 651 bp, Artificial Sequence
  derived and/or modified sequence
gcctggaccgtgagcggcctgctgagcgccgccttcgagcccgaggtcccagcttcactctcacagaagtccgaccaccgctcctccttgccgtctagcccaagcctgcctctcagcaagaccctagcagtcgcatacgatccagaggatagctccgcagctaactggtgctttggcctgtgcgcagtgccaggtcctgcttctttggacctgggccgaccctggccggtggaagaagcccaagtaaaggcgggcggctgttgctggctctcatcacttctactggaagtgtcggcttccctgcgcatgggaaggactgatcctctcacagggctgcagtctctagagggctctataggccagggaaacggggggcatgtaacatcttgtagagccccctgccatagacccaaggagcagctgtgtcccttgtccgtagggggccccgggggcgaagttgaccgccacctgcctccaacaggtatctggcaacaggagccaggccttttgtgtaaaaaggggagacctaagggagaacaatggcccataaagacactcgagaataagcacccttttccaaggtggctccagatcatcacaagctgcaagtctacgccaggcgaacagctgacattcatttccctgtcatag

SEQ ID NO: 62331 - protein, 879 aa, Artificial Sequence
  derived and/or modified sequence
MFWKFDLHSSSHIDTLLEREDVTLKELMDEEDVLQECKAQNRKLIEFLLKAECLEDLVSFIIEEPPQDMDEKIRYKYPNISCELLTSDVSQMNDRLGEDESLLMKLYSFLLNDSPLNPLLASFFSKVLSILISRKPEQIVDFLKKKHDFVDLIIKHIGTSAIMDLLLRLLTCIEPPQPRQDVLNWLNEEKIIQRLVEIVHPSQEEDRHSNASQSLCEIVRLSRDQMLQIQNSTEPDPLLATLEKQEIIEQLLSNIFHKEKNESAIVSAIQILLTLLETRRPTFEGHIEICPPGMSHSACSVNKSVLEAIRGRLGSFHELLLEPPKKSVMKTTWGVLDPPVGNTRLNVIRLISSLLQTNTSSINGDLMELNSIGVILNMFFKYTWNNFLHTQVEICIALILASPFENTENATITDQDSTGDNLLLKHLFQKCQLIERILEAWEMNEKKQAEGGRRHGYMGHLTRIANCIVHSTDKGPNSALVQQLIKDLPDEVRERWETFCTSSLGETNKRNTVDLVTTCHIHSSSDDEIDFKETGFSQDSSLQQAFSDYQMQQMTSNFIDQFGFNDEKFADQDDIGNVSFDRVSDINFTLNTNESGNIALFEACCKERIQQFDDGGSDEEDIWEEKHIAFTPESQRRSSSGSTDSEESTDSEEEDGAKQDLFEPSSANTEDKMEVDLSEPPNWSANFDVPMETTHGAPLDSVGSDVWSTEEPMPTKETGWASFSEFTSSLSTKDSLRSNSPVEMETSTEPMDPLTPSAAALAVQPEAAGSVAMEASSDGEEDAESTDKVTETVMNGGMKETLSLTVDAKTETAVFKRLLGGCSEEGKLSTSQDAACKDAEECPETAEAKCAAPRPPSSSPEQRTGQPSAPGDTSVNGPV

SEQ ID NO: 62332 - protein, 879 aa, Artificial Sequence
  derived and/or modified sequence
MFWKFDLHSSSHIDTLLEREDVTLKELMDEEDVLQECKAQNRKLIEFLLKAECLEDLVSFIIEEPPQDMDEKIRYKYPNISCELLTSDVSQMNDRLGEDESLLMKLYSFLLNDSPLNPLLASFFSKVLSILISRKPEQIVDFLKKKHDFVDLIIKHIGTSAIMDLLLRLLTCIEPPQPRQDVLNWLNEEKIIQRLVEIVHPSQEEDRHSNASQSLCEIVRLSRDQMLQIQNSTEPDPLLATLEKQEIIEQLLSNIFHKEKNESAIVSAIQILLTLLETRRPTFEGHIEICPPGMSHSACSVNKSVLEAIRGRLGSFHELLLEPPKKSVMKTTWGVLDPPVGNTRLNVIRLISSLLQTNTSSINGDLMELNSIGVILNMFFKYTWNNFLHTQVEICIALILASPFENTENATITDQDSTGDNLLLKHLFQKCQLIERILEAWEMNEKKQAEGGRRHGYMGHLTRIANCIVHSTDKGPNSALVQQLIKDLPDEVRERWETFCTSSLGETNKRNTVDLVTTCHIHSSSDDEIDFKETGFSQDSSLQQAFSDYQMQQMTSNFIDQFGFNDEKFADQDDIGNVSFDRVSDINFTLNTNESGNIALFEACCKERIQQFDDGGSDEEDIWEEKHIAFTPESQRRSSSGSTDSEESTDSEEEDGAKQDLFEPSSANTEDKMEVDLSEPPNWSANFDVPMETTHGAPLDSVGSDVWSTEEPMPTKETGWASFSEFTSSLSTKDSLRSNSPVEMETSTEPMDPLTPSAAALAVQPEAAGSVAMEASSDGEEDAESTDKVTETVMNGGMKETLSLTVDAKTETAVFKRVLKSYREEGKLSTSQDAACKDAEECPETAEAKCAAPRPPSSSPEQRTGQPSAPGDTSVNGPV

SEQ ID NO: 62333 - DNA, 2640 bp, Artificial Sequence
  derived and/or modified sequence
atgttctggaagttcgacctgcacagcagcagccacatcgacaccctgctggagagagaggacgtgaccctgaaggagctgatggacgaggaggacgtgctgcaggagtgcaaggcccagaacagaaagctgatcgagttcctgctgaaggccgagtgcctggaggacctggtgagcttcatcatcgaggagcccccccaggacatggacgagaagatcagatacaagtaccccaacatcagctgcgagctgctgaccagcgacgtgagccagatgaacgacagactgggcgaggacgagagcctgctgatgaagctgtacagcttcctgctgaacgacagccccctgaaccccctgctggccagcttcttcagcaaggtgctgagcatcctgatcagcagaaagcccgagcagatcgtggacttcctgaagaagaagcacgacttcgtggacctgatcatcaagcacatcggcaccagcgccatcatggacctgctgctgagactgctgacctgcatcgagcccccccagcccagacaggacgtgctgaactggctgaacgaggagaagatcatccagagactggtggagatcgtgcaccccagccaggaggaggacagacacagcaacgccagccagagcctgtgcgagatcgtgagactgagcagagaccagatgctgcagatccagaacagcaccgagcccgaccccctgctggccaccctggagaagcaggagatcatcgagcagctgctgagcaacatcttccacaaggagaagaacgagagcgccatcgtgagcgccatccagatcctgctgaccctgctggagaccagaagacccaccttcgagggccacatcgagatctgcccccccggcatgagccacagcgcctgcagcgtgaacaagagcgtgctggaggccatcagaggcagactgggcagcttccacgagctgctgctggagccccccaagaagagcgtgatgaagaccacctggggcgtgctggacccccccgtgggcaacaccagactgaacgtgatcagactgatcagcagcctgctgcagaccaacaccagcagcatcaacggcgacctgatggagctgaacagcatcggcgtgatcctgaacatgttcttcaagtacacctggaacaacttcctgcacacccaggtggagatctgcatcgccctgatcctggccagccccttcgagaacaccgagaacgccaccatcaccgaccaggacagcaccggcgacaacctgctgctgaagcacctgttccagaagtgccagctgatcgagagaatcctggaggcctgggagatgaacgagaagaagcaggccgagggcggcagaagacacggctacatgggccacctgaccagaatcgccaactgcatcgtgcacagcaccgacaagggccccaacagcgccctggtgcagcagctgatcaaggacctgcccgacgaggtgagagagagatgggagaccttctgcaccagcagcctgggcgagaccaacaagagaaacaccgtggacctggtgaccacctgccacatccacagcagcagcgacgacgagatcgacttcaaggagaccggcttcagccaggacagcagcctgcagcaggccttcagcgactaccagatgcagcagatgaccagcaacttcatcgaccagttcggcttcaacgacgagaagttcgccgaccaggacgacatcggcaacgtgagcttcgacagagtgagcgacatcaacttcaccctgaacaccaacgagagcggcaacatcgccctgttcgaggcctgctgcaaggagagaatccagcagttcgacgacggcggcagcgacgaggaggacatctgggaggagaagcacatcgccttcacccccgagagccagagaagaagcagcagcggcagcaccgacagcgaggagagcaccgacagcgaggaggaggacggcgccaagcaggacctgttcgagcccagcagcgccaacaccgaggacaagatggaggtggacctgagcgagccccccaactggagcgccaacttcgacgtgcccatggagaccacccacggcgcccccctggacagcgtgggcagcgacgtgtggagcaccgaggagcccatgcccaccaaggagaccggctgggccagcttcagcgagttcaccagcagcctgagcaccaaggacagcctgagaagcaacagccccgtggagatggagaccagcaccgagcccatggaccccctgacccccagcgccgccgccctggccgtgcagcccgaggccgccggcagcgtggccatggaggccagcagcgacggcgaggaggacgccgagagcaccgacaaggtgaccgagaccgtgatgaacggcggcatgaaggagaccctgagcctgaccgtggacgccaagaccgagaccgccgtgttcaagagactgctgggcggctgcagcgaggagggcaagctgagcaccagccaggacgccgcctgcaaggacgccgaggagtgccccgagaccgccgaggccaagtgcgccgcccccagaccccccagcagcagccccgagcagagaaccggccagcccagcgcccccggcgacaccagcgtgaacggccccgtgtag

SEQ ID NO: 62334 - DNA, 2640 bp, Artificial Sequence
  derived and/or modified sequence
atgttctggaagttcgacctgcacagcagcagccacatcgacaccctgctggagagagaggacgtgaccctgaaggagctgatggacgaggaggacgtgctgcaggagtgcaaggcccagaacagaaagctgatcgagttcctgctgaaggccgagtgcctggaggacctggtgagcttcatcatcgaggagcccccccaggacatggacgagaagatcagatacaagtaccccaacatcagctgcgagctgctgaccagcgacgtgagccagatgaacgacagactgggcgaggacgagagcctgctgatgaagctgtacagcttcctgctgaacgacagccccctgaaccccctgctggccagcttcttcagcaaggtgctgagcatcctgatcagcagaaagcccgagcagatcgtggacttcctgaagaagaagcacgacttcgtggacctgatcatcaagcacatcggcaccagcgccatcatggacctgctgctgagactgctgacctgcatcgagcccccccagcccagacaggacgtgctgaactggctgaacgaggagaagatcatccagagactggtggagatcgtgcaccccagccaggaggaggacagacacagcaacgccagccagagcctgtgcgagatcgtgagactgagcagagaccagatgctgcagatccagaacagcaccgagcccgaccccctgctggccaccctggagaagcaggagatcatcgagcagctgctgagcaacatcttccacaaggagaagaacgagagcgccatcgtgagcgccatccagatcctgctgaccctgctggagaccagaagacccaccttcgagggccacatcgagatctgcccccccggcatgagccacagcgcctgcagcgtgaacaagagcgtgctggaggccatcagaggcagactgggcagcttccacgagctgctgctggagccccccaagaagagcgtgatgaagaccacctggggcgtgctggacccccccgtgggcaacaccagactgaacgtgatcagactgatcagcagcctgctgcagaccaacaccagcagcatcaacggcgacctgatggagctgaacagcatcggcgtgatcctgaacatgttcttcaagtacacctggaacaacttcctgcacacccaggtggagatctgcatcgccctgatcctggccagccccttcgagaacaccgagaacgccaccatcaccgaccaggacagcaccggcgacaacctgctgctgaagcacctgttccagaagtgccagctgatcgagagaatcctggaggcctgggagatgaacgagaagaagcaggccgagggcggcagaagacacggctacatgggccacctgaccagaatcgccaactgcatcgtgcacagcaccgacaagggccccaacagcgccctggtgcagcagctgatcaaggacctgcccgacgaggtgagagagagatgggagaccttctgcaccagcagcctgggcgagaccaacaagagaaacaccgtggacctggtgaccacctgccacatccacagcagcagcgacgacgagatcgacttcaaggagaccggcttcagccaggacagcagcctgcagcaggccttcagcgactaccagatgcagcagatgaccagcaacttcatcgaccagttcggcttcaacgacgagaagttcgccgaccaggacgacatcggcaacgtgagcttcgacagagtgagcgacatcaacttcaccctgaacaccaacgagagcggcaacatcgccctgttcgaggcctgctgcaaggagagaatccagcagttcgacgacggcggcagcgacgaggaggacatctgggaggagaagcacatcgccttcacccccgagagccagagaagaagcagcagcggcagcaccgacagcgaggagagcaccgacagcgaggaggaggacggcgccaagcaggacctgttcgagcccagcagcgccaacaccgaggacaagatggaggtggacctgagcgagccccccaactggagcgccaacttcgacgtgcccatggagaccacccacggcgcccccctggacagcgtgggcagcgacgtgtggagcaccgaggagcccatgcccaccaaggagaccggctgggccagcttcagcgagttcaccagcagcctgagcaccaaggacagcctgagaagcaacagccccgtggagatggagaccagcaccgagcccatggaccccctgacccccagcgccgccgccctggccgtgcagcccgaggccgccggcagcgtggccatggaggccagcagcgacggcgaggaggacgccgagagcaccgacaaggtgaccgagaccgtgatgaacggcggcatgaaggagaccctgagcctgaccgtggacgccaagaccgagaccgccgtgttcaagagagtgctgaagagctacagagaggagggcaagctgagcaccagccaggacgccgcctgcaaggacgccgaggagtgccccgagaccgccgaggccaagtgcgccgcccccagaccccccagcagcagccccgagcagagaaccggccagcccagcgcccccggcgacaccagcgtgaacggccccgtgtag

SEQ ID NO: 62335 - DNA, 2640 bp, Artificial Sequence
  derived and/or modified sequence
atgttctggaagttcgacctgcactccagctcacacatcgatactctgcttgaacgcgaagatgttacccttaaggaattaatggacgaagaagatgtgctgcaggaatgcaaggctcagaataggaagcttatagaattcctcttgaaggctgaatgtctcgaagacctggtttcctttattatagaggaaccgccgcaggacatggacgaaaaaatcaggtacaagtacccgaatatatcttgcgagctcctaacaagcgatgtgtcacagatgaatgatcgcctcggggaagacgagtcgctgctgatgaagctgtactcttttttattaaacgatagcccgttgaatccattgttggcgtctttcttttccaaagtattaagcattctcatctcgcgcaaaccagaacagatcgttgattttctgaaaaaaaagcacgacttcgtcgatctgataatcaaacacattggtacctctgctatcatggacctgcttctccggctgttgacgtgcattgagcctcctcagccgcggcaggacgtgctgaattggctgaacgaagaaaaaatcattcagcggttggttgagattgtacaccctagtcaggaagaggatagacattcgaacgcgagccaaagcctgtgcgagattgtaagattgtccagggatcagatgctacagatccagaattccaccgagcccgatcctctcctggccactttagaaaagcaagaaatcattgaacagttacttagcaacatctttcacaaagaaaagaatgagtcagcgatagtgagtgccatccagatactccttaccctgctggaaacacgacggcccacatttgaggggcacatagagatctgcccgccagggatgagccattccgcttgtagcgtcaacaaatcagttctggaggccattcgggggcgcctgggctcgttccatgagctcctcctcgagccgcctaagaagtccgtaatgaagactacatggggcgtgctggaccctcctgttggaaacaccagactcaacgtgatccgtctcatctcttctttattgcagacgaataccagctctatcaatggggatctcatggaacttaactctattggcgtgatcctgaatatgtttttcaagtacacttggaacaactttctgcatacccaggtggagatatgcatagcattgatcctggcttccccgttcgaaaacaccgagaacgctaccattaccgaccaggactctaccggtgataatctgttgttaaagcacctgttccagaagtgtcagctaatcgaaagaatcctagaggcttgggagatgaacgagaaaaaacaagctgagggtggccggaggcacggatatatgggccaccttactagaatagctaactgcattgttcacagcaccgacaagggccccaacagcgccctggtgcagcagctgataaaagatctcccggatgaagtccgcgagcgctgggaaacattttgtacgtctagtttgggcgaaacaaataaaagaaacactgttgaccttgttaccacgtgtcacatccatagctctagcgatgacgagattgattttaaagagactggatttagccaggactcctcactacagcaggcattctccgactatcagatgcagcagatgacatctaatttcatcgatcagttcgggttcaacgacgaaaaattcgcagaccaggatgacatcgggaacgtttcttttgatcgcgtttcagacattaatttcaccctaaacacaaacgaatcaggcaatatagccttgtttgaggcctgctgtaaagaacgcattcagcagttcgacgacggcggatctgatgaggaagacatttgggaagaaaagcacattgcattcacaccggagtcccagaggcgcagtagctcaggaagcactgactctgaggaaagtactgactcggaggaagaggatggggcgaagcaagacctgtttgagccttctagtgctaacacagaggataaaatggaggtcgacctctccgagcccccaaactggtctgcgaatttcgacgtgccaatggaaacgacccatggcgcacctttggactcggtgggcagtgatgtgtggtccactgaggagccaatgccgactaaggaaaccggctgggctagctttagcgagtttacgagttccttgagcactaaggattccctgcgcagcaacagccccgtggaaatggagacgtcaaccgaaccgatggatccactgaccccctccgccgcagctctcgctgtccagcccgaagcagccggatctgtcgccatggaagcatccagcgatggggaagaggatgcagagtcaactgacaaggtcaccgagactgtgatgaacggagggatgaaagagacactatcccttacagtagatgctaaaaccgagaccgctgtgtttaaacgcctcctggggggttgcagtgaagaaggcaagttgagcacttcacaagatgccgcctgcaaggatgccgaagagtgcccagaaactgccgaggcaaaatgtgccgccccgcggcctccctctagttctccagagcagaggaccggccagccaagcgctcccggcgatacatctgttaacggcccagtctag

SEQ ID NO: 62336 - DNA, 2640 bp, Artificial Sequence
  derived and/or modified sequence
atgttctggaaattcgatttgcattcaagctcccacatcgatacccttctggagcgggaggacgtaaccctcaaagagcttatggatgaggaagacgtccttcaggaatgcaaggctcagaacagaaaactgatagagttccttctgaaggctgagtgccttgaagacctggtgtcctttatcatcgaagagcccccccaggatatggacgagaaaatacgttataagtaccccaacatttcttgcgaactactgacgagcgatgtgtcacaaatgaatgaccgcttgggggaggacgagagcctcctcatgaagctttattctttcctgctgaatgattcccccctgaatcccttgctggcctcattctttagtaaagtgctgtcaatactcatcagtcggaaaccagagcaaatagtggacttcctaaagaaaaaacacgattttgtggacctcatcattaaacatatcgggacctccgcaatcatggacttgctcctgagactgttaacttgtattgagcccccccaaccacgccaggacgtgctcaactggctcaacgaagaaaaaattatacagcggctggttgagatcgtacatccatcgcaggaggaagacaggcactccaacgcctctcaatccttgtgtgaaattgtgcgcctgagccgcgatcaaatgttgcaaattcaaaactcaactgaacccgacccattacttgccacattggagaagcaagaaattatcgaacagctgctgtctaacatttttcataaagaaaaaaatgagagcgcaattgtttccgctattcagattctgctgaccctgctcgaaacccgcaggcccacctttgaaggccacatcgagatctgtccccccggaatgagtcactccgcctgttcagtgaacaaaagcgttttagaggccatccgcggtcgcctaggatcttttcatgagttgctgctggaaccccccaaaaagagtgtcatgaagacgacatggggggtcctcgatccaccggtgggtaatacccggctgaacgtgattcggctaatcagcagcctgttgcagactaacacatcaagcatcaacggggatctcatggaactgaactctattggagttatcctgaatatgtttttcaagtacacatggaacaattttctgcacacccaggtcgaaatttgcatcgctctcattctggcatccccatttgagaacaccgagaatgctactataacggaccaggactctacgggagacaatcttctacttaagcacctgtttcagaagtgtcagctcattgagagaatccttgaagcctgggaaatgaacgaaaagaaacaagcagaggggggcagaagacacgggtacatgggccatctcaccagaatagctaactgtattgtccactctacggataaaggaccaaacagcgcactcgtccagcagctcataaaagacctgcccgacgaggttagggagcggtgggagacattctgcacaagctcgctgggtgaaacaaataagagaaacaccgtggatctggtcaccacttgtcatatacacagctcctctgacgatgaaattgatttcaaagagactggattctcacaagactcatctcttcagcaggccttctccgactaccagatgcagcagatgacaagcaacttcatcgatcagttcggatttaacgacgaaaagtttgcagaccaggacgacatcgggaacgtgtctttcgatcgggttagcgacatcaattttaccctcaacactaatgagtccggcaatatagcattgtttgaagcatgttgtaaagagaggatccagcagttcgacgacggcggctccgacgaggaggatatttgggaagaaaagcacatcgccttcactcccgagtctcagcggcgaagctcgtcaggttctacagatagcgaagagtccacagactccgaggaggaggacggcgcgaagcaggacttgtttgaacctagcagcgccaataccgaggacaagatggaggttgatttatcagagccccctaactggtctgcaaactttgatgtgccaatggagacaacacacggagctccactagacagcgtggggagcgatgtgtggtcaaccgaggagcctatgcctacaaaggagaccggctgggccagctttagcgagtttacttccagtctgtccacgaaggactctctgagaagcaatagtccagtggaaatggagacgtccactgaaccaatggacccccttacccccagcgcagccgcactcgccgtgcaacctgaggctgcagggtctgtggccatggaagcaagcagtgatggggaagaggatgcagagtctacagacaaggtgactgagactgtgatgaacggcggaatgaaagagaccttgagtcttaccgtcgacgcaaagacggaaaccgccgtgtttaaacgcgtgctgaaaagctatagagaagaaggaaaactctccacatcacaagacgcagcttgcaaggacgccgaggaatgcccggagactgctgaagccaagtgcgccgctccccgtcctcccagctccagtcccgagcagagaacaggacaaccatctgcaccaggcgatacaagcgtgaacggcccggtgtag

SEQ ID NO: 62337 - DNA, 2640 bp, Artificial Sequence
  derived and/or modified sequence
atgttctggaagtttgacctgcacagcagcagccacatcgacaccctgctggagcgggaggatgtgaccctgaaggagctgatggatgaagaagatgtgctgcaggagtgcaaggcccagaacaggaagctgattgagttcctgctgaaggccgagtgcctggaggacctggtgtccttcatcatcgaggagcccccccaggacatggatgagaagatccgctacaagtaccccaacatcagctgtgagctgctgaccagtgatgtgtcccagatgaatgaccggctgggggaggatgagagcctgctgatgaagctgtacagcttcctgctgaatgacagccccctgaaccccctgctggccagcttcttcagcaaggtgctgagcatcctgatcagcaggaagccagagcagatcgtggacttcctgaagaagaagcatgactttgtggacctgatcatcaagcacatcggcaccagcgccatcatggacctgctgctgcggctgctgacctgcatcgagcccccccagccccggcaggatgtgctgaactggctgaatgaggagaagatcatccagaggctggtggagatcgtgcaccccagccaggaggaggacagacacagcaatgccagccagagcctgtgtgagatcgtgcggctgagccgggaccagatgctgcagatccagaacagcacagagccagaccccctgctggccaccctggagaagcaggagatcatcgagcagctgctgagcaacatcttccacaaggagaagaatgaaagtgccatcgtgtctgccatccagatcctgctgaccctgctggagacccggcggcccacctttgagggccacatcgagatctgccccccaggcatgagccacagcgcctgcagcgtgaacaagtctgtgctggaggccatccggggccgcctgggcagcttccacgagctgctgctggagccccccaagaagtctgtgatgaagaccacctggggcgtgctggacccccctgtgggcaacacccggctgaatgtcatccgcctcatcagcagcctgctgcagaccaacaccagcagcatcaatggagacctgatggagctgaacagcattggagtcatcctgaacatgttcttcaagtacacctggaacaacttcctgcacacccaggtggagatctgcatcgccctgatcctggccagcccctttgaaaatacagaaaatgccaccatcacagaccaggacagcactggagacaacctgctgctgaagcacctgttccagaagtgccagctgattgaaagaatcctggaggcctgggagatgaatgagaagaagcaggccgagggcggcagaagacatggctacatgggccacctgacccgcatcgccaactgcatcgtgcacagcacagacaagggccccaacagcgccctggtgcagcagctgatcaaggacctgcctgatgaggtgcgggagcgctgggagaccttctgcaccagcagcctgggggagaccaacaagaggaacacagtggacctggtgaccacctgccacatccacagcagcagtgatgatgaaattgacttcaaggagaccggcttcagccaggacagcagcctgcagcaggccttcagtgactaccagatgcagcagatgaccagcaacttcatcgaccagtttggcttcaatgatgagaagtttgctgaccaggatgacattggaaatgtgtcctttgacagagtgtctgacatcaacttcaccctgaacaccaatgaaagtggcaacatcgccctgtttgaggcctgctgcaaggagcgcatccagcagtttgatgatggcggcagtgatgaggaggacatctgggaggagaagcacatcgccttcaccccagagagccagaggaggagcagcagcggcagcacagattctgaggagagcacagattctgaggaggaggatggagccaagcaggacctgtttgagcccagcagcgccaacacagaggacaagatggaggtggacctgtctgagccccccaactggagcgccaactttgatgtgcccatggagaccacccatggagcccccctggacagcgtgggcagtgatgtgtggagcacagaggagcccatgcccaccaaggagaccggctgggccagcttcagcgagttcaccagcagcctgagcaccaaggacagcctgcggagcaacagccctgtggagatggagaccagcacagagcccatggaccccctgaccccatctgctgctgccctggccgtgcagcctgaggccgccggctctgtggccatggaggccagcagtgatggagaagaagatgctgagagcacagacaaggtgacagagaccgtgatgaatggaggcatgaaggagaccctgagcctgactgtggatgccaagacagaaacagctgtgttcaagaggctgctgggcggctgcagcgaggagggcaagctgagcaccagccaggatgctgcctgcaaggatgctgaagaatgtcctgagacagctgaggccaagtgtgccgcccccaggcctcccagcagcagccctgagcagaggacaggccagcccagcgcccctggggacacctctgtgaatggacctgtgtag

SEQ ID NO: 62338 - DNA, 2640 bp, Artificial Sequence
  derived and/or modified sequence
atgttctggaagtttgacctgcacagcagcagccacatcgacaccctgctggagcgggaggatgtgaccctgaaggagctgatggatgaagaagatgtgctgcaggagtgcaaggcccagaacaggaagctgattgagttcctgctgaaggccgagtgcctggaggacctggtgtccttcatcatcgaggagcccccccaggacatggatgagaagatccgctacaagtaccccaacatcagctgtgagctgctgaccagtgatgtgtcccagatgaatgaccggctgggggaggatgagagcctgctgatgaagctgtacagcttcctgctgaatgacagccccctgaaccccctgctggccagcttcttcagcaaggtgctgagcatcctgatcagcaggaagccagagcagatcgtggacttcctgaagaagaagcatgactttgtggacctgatcatcaagcacatcggcaccagcgccatcatggacctgctgctgcggctgctgacctgcatcgagcccccccagccccggcaggatgtgctgaactggctgaatgaggagaagatcatccagaggctggtggagatcgtgcaccccagccaggaggaggacagacacagcaatgccagccagagcctgtgtgagatcgtgcggctgagccgggaccagatgctgcagatccagaacagcacagagccagaccccctgctggccaccctggagaagcaggagatcatcgagcagctgctgagcaacatcttccacaaggagaagaatgaaagtgccatcgtgtctgccatccagatcctgctgaccctgctggagacccggcggcccacctttgagggccacatcgagatctgccccccaggcatgagccacagcgcctgcagcgtgaacaagtctgtgctggaggccatccggggccgcctgggcagcttccacgagctgctgctggagccccccaagaagtctgtgatgaagaccacctggggcgtgctggacccccctgtgggcaacacccggctgaatgtcatccgcctcatcagcagcctgctgcagaccaacaccagcagcatcaatggagacctgatggagctgaacagcattggagtcatcctgaacatgttcttcaagtacacctggaacaacttcctgcacacccaggtggagatctgcatcgccctgatcctggccagcccctttgaaaatacagaaaatgccaccatcacagaccaggacagcactggagacaacctgctgctgaagcacctgttccagaagtgccagctgattgaaagaatcctggaggcctgggagatgaatgagaagaagcaggccgagggcggcagaagacatggctacatgggccacctgacccgcatcgccaactgcatcgtgcacagcacagacaagggccccaacagcgccctggtgcagcagctgatcaaggacctgcctgatgaggtgcgggagcgctgggagaccttctgcaccagcagcctgggggagaccaacaagaggaacacagtggacctggtgaccacctgccacatccacagcagcagtgatgatgaaattgacttcaaggagaccggcttcagccaggacagcagcctgcagcaggccttcagtgactaccagatgcagcagatgaccagcaacttcatcgaccagtttggcttcaatgatgagaagtttgctgaccaggatgacattggaaatgtgtcctttgacagagtgtctgacatcaacttcaccctgaacaccaatgaaagtggcaacatcgccctgtttgaggcctgctgcaaggagcgcatccagcagtttgatgatggcggcagtgatgaggaggacatctgggaggagaagcacatcgccttcaccccagagagccagaggaggagcagcagcggcagcacagattctgaggagagcacagattctgaggaggaggatggagccaagcaggacctgtttgagcccagcagcgccaacacagaggacaagatggaggtggacctgtctgagccccccaactggagcgccaactttgatgtgcccatggagaccacccatggagcccccctggacagcgtgggcagtgatgtgtggagcacagaggagcccatgcccaccaaggagaccggctgggccagcttcagcgagttcaccagcagcctgagcaccaaggacagcctgcggagcaacagccctgtggagatggagaccagcacagagcccatggaccccctgaccccatctgctgctgccctggccgtgcagcctgaggccgccggctctgtggccatggaggccagcagtgatggagaagaagatgctgagagcacagacaaggtgacagagaccgtgatgaatggaggcatgaaggagaccctgagcctgactgtggatgccaagacagaaacagctgtgttcaagagggtgctgaagagctaccgggaggagggcaagctgagcaccagccaggatgctgcctgcaaggatgctgaagaatgtcctgagacagctgaggccaagtgtgccgcccccaggcctcccagcagcagccctgagcagaggacaggccagcccagcgcccctggggacacctctgtgaatggacctgtgtag

SEQ ID NO: 62339 - DNA, 5119 bp, Artificial Sequence
  derived and/or modified sequence
gaactcaaggcctgcttgatacgtccgccattttgggcgcttcgctgatggtgtcggtgagcgcgtttcccgcctgagcgcaactagcggcgggtcgtgggcacctccaggagagcttgtttcatatccatatcccactgtattcctgctaatctgctaatgcagtaaattggaggaaaactgttaccaggataacctgtaatgggcaaggagccacaaagaagaaaacatttcttttaatttttaaacttggtttgaaagaccagcatgttttggaaatttgatcttcactcatcatcccacatagacacacttctagaaagagaagatgtaacactgaaggagttaatggatgaggaagatgttttacaggaatgtaaagctcagaaccgcaaacttatagagtttctgttaaaagcagaatgtctcgaagatttagtctcattcattatagaagaaccacctcaagacatggatgaaaagatcagatacaagtatccaaatatatcttgtgagttgctcacttctgatgtctcccagatgaatgatagactgggagaagatgaatccttgctaatgaaattatatagcttcctcctaaacgattcccctttgaatccactacttgccagtttcttcagcaaggtgctaagtattcttatcagcagaaaaccagaacagattgtggatttcttaaagaagaagcatgattttgtagaccttattataaagcacataggaacttctgctatcatggatttgttgctcaggctcctgacgtgtatcgaacctccacagcccaggcaagatgtgctgaattggttaaatgaggagaaaattatccagaggcttgtggaaatagttcatccatcgcaagaagaagatcgacattcaaatgcatcacaatcactttgtgaaattgttcgcctgagcagagaccagatgttacaaattcagaacagtacagagcccgaccccctgcttgccactctagaaaagcaagaaattatagagcagcttctatcaaatattttccacaaggagaaaaatgagtcagccatagtcagtgcaatccagatattgctgactttacttgagacacgacgaccaacatttgaaggccatatagagatctgcccaccaggcatgagccattcagcttgttcagtaaacaagagtgttctagaagccatcagaggaagacttggatcttttcatgaactcctgctggagccacccaagaaaagtgtgatgaagaccacatggggtgtgctggatcctcctgtggggaatacccggttgaatgtcattaggttgatatccagcctgcttcaaaccaataccagcagtataaatggggaccttatggagctgaatagcattggagtcatattgaacatgttcttcaagtatacatggaataactttttgcatacacaagtggaaatttgtattgcactgattcttgcaagtccttttgaaaacacagaaaatgccacaattaccgatcaagactccactggtgataatttgttattaaaacatcttttccaaaaatgtcaattaatagaacgaatacttgaagcctgggaaatgaatgagaagaaacaggctgagggaggaagacggcatggttacatgggacacctaacgaggatagctaactgtatcgtgcacagcactgacaagggccccaacagtgcattagtgcagcagcttatcaaagatcttcccgacgaagtcagggaacgatgggagacgttctgcacaagctccttaggagaaactaacaagaggaacacggtagatctagttacaacctgccatattcattcatccagtgatgatgaaattgactttaaagaaacgggtttctcacaggattcttctttgcagcaagccttttctgattatcagatgcaacaaatgacgtccaattttattgaccagtttggcttcaacgatgagaagtttgcagatcaagatgacattggcaatgtttcttttgatcgagtatcagacatcaactttactctcaatacaaatgaaagtggaaatattgccttgtttgaagcatgttgtaaggaaagaatacaacagtttgatgatggtggctctgatgaggaagatatatgggaggaaaagcacatcgcattcacaccagaatcccaaagacgatccagctcggggagtacagacagtgaggaaagtacagactctgaagaagaagatggagcaaagcaagacttgtttgaacccagcagtgccaacacggaggataaaatggaggtggacctgagtgaaccacccaactggtcagctaactttgatgtcccaatggaaacaacccacggtgctccattggattctgtgggatctgatgtctggagcacagaggagccgatgccaactaaagagacgggctgggcttctttttcagagttcacgtcttccctgagcacaaaagattctttaaggagtaattctccagtggaaatggaaaccagcactgaacccatggaccctctgactcccagtgcggctgccctggcagtgcagccagaagcggcaggcagtgtggccatggaagccagctctgacggagaggaggatgcagaaagtacagacaaggtaactgagacagtgatgaatggcggcatgaaggaaacgctcagcctcactgtagatgccaagacagagactgcggtcttcaaaaggttattgggaggatgcagtgaggaagggaaactgtctacctctcaagatgctgcttgtaaagacgcagaggagtgtcccgagactgcagaggcgaagtgcgcggcgcccaggcctcccagcagcagtcccgagcagaggactggccaaccaagcgcaccaggtgacacttcagtgaatggccctgtatgacgggtgacgtctgctgctgctgactgaggactgcagaccgccaccactcaggggctctggaggggtcagctggagcccaccaagctgtcactgctgcactcactctgcaagggatcaggaccagcaacctttatattctagattctaagacattgtacagagaaattcagaagtgtaaaaatattgcacattgacaaataccaagaatttttgcgtatgtttatattgtattgttctaaataatgggtagcctgtgaaataagatcttgccacccatgtaataatagtagtaatactatagttaaaatggctgtaagaatagttttataaaagtgaatacacagatctattgtatttgaaacataactttgacaattattagtgtgaccaaagtattaggcggttttcatacatttttcaccttgtacaaaattatgaattcatttttcctccaggccgacaaggagttgtagaatgaaaatgccctctaagtgttattttggttgttctaacttacaaaagtgattttgaataagaaatatttggtgttctttttataaccagtttttgattggtaattgttttctgtattgtttaaaacggatcaaaaatgtaagtctattggtagagattaagtaaagtatttattgctacatcatagttgataaattgatgttatcgtaaagccatatgttctgttcaagtcttgtttgcttgaaatgattattcctacaagtgaaacactagactatttggagtgtatatggcttgtgttttgggattttttttttttttttttggcttttgtttttgtttgtttttttgtttcatttggtagttcatctgccttttaacccattcaccaaaatttaccttgttaacaagcatcaccaatgaacatttcagagcaatctgcatatttaacagacctaaaataaatcctattaggcaagtcagttgaaaatgctcgtgctgctaatggaattagagtgcgttcattttacaggctagtattttaaaagtagaaatcaaaatctggcaccgaagcatgctaattgtttactgtaccttgtgaggttttcactcataaatttaaaccagtgtatttttttagaactggtttgtgtatatatatagtgattatggatactaattcaatgtaatttataattttctatgtcaatacaaaaatacatcacagccttctcaaacagctcaagcaatatattgtatattgccatatcgtctggtgaaagggttaaattacttcacctcttgcacttttagatgcaaatcagtttttcatttctgtaatagaaaattattcacgtatttttacatcatttgtttttcctgaccagtatttaaaaccaaaaggatattctgaaaaatggccaacaatttttttagaagtagcatcccaagcagcgtgcctaaacattacattgcatatggaaataaaagaatcaaacgtctaatgccttattatttctgatttcctttttcattttaagtggtgtggagattccagcactcccaggacagtggagtcagcagtaagccctgggacaggtggcaagggtgggtcccttgacctttgcacgcctcctcaggaaccccctttcccgggtgagcccctctctgaagagactgtccttgggcctcctctggaagcagcacccccagaggacagggctcctcctgcttgcctcagggctgcctgacttgaatggcgttggacctcggggattactggtagataatatgctctggtctcgcctggtggtgagttttgccagccatggccagggtttggctccactggtggcacacgtggcctccgtggtatggacctggtggcttctccatcccactgtggcctctgtggtatggacctggtggcttctccatcctacccaaggtaacagtgtcttgcttcatcccactgactgctgggagagagcctctgggacttttctttggggcatcattttgttttgtctttcgtagcagggaaaggatatgacaatggggaggacagttcttttggaggttggaggggccaagccaaggacaggagcaagtgtgccctcattttgtttctacttttaatttctgtgtgttggccatactgaattatgagactaacagatgtctacaatacaatacctgtattcaaaataacaaaaataaagcctgattctttgtttct

SEQ ID NO: 62340 - DNA, 5069 bp, Artificial Sequence
  derived and/or modified sequence
gtcggtgagcgcgtttcccgcctgagcgcaactagcggcgggtcgtgggcacctccaggagagcttgtttcatatccatatcccactgtattcctgctaatctgctaatgcagtaaattggaggaaaactgttaccaggataacctgtaatgggcaaggagccacaaagaagaaaacatttcttttaatttttaaacttggtttgaaagaccagcatgttttggaaatttgatcttcactcatcatcccacatagacacacttctagaaagagaagatgtaacactgaaggagttaatggatgaggaagatgttttacaggaatgtaaagctcagaaccgcaaacttatagagtttctgttaaaagcagaatgtctcgaagatttagtctcattcattatagaagaaccacctcaagacatggatgaaaagatcagatacaagtatccaaatatatcttgtgagttgctcacttctgatgtctcccagatgaatgatagactgggagaagatgaatccttgctaatgaaattatatagcttcctcctaaacgattcccctttgaatccactacttgccagtttcttcagcaaggtgctaagtattcttatcagcagaaaaccagaacagattgtggatttcttaaagaagaagcatgattttgtagaccttattataaagcacataggaacttctgctatcatggatttgttgctcaggctcctgacgtgtatcgaacctccacagcccaggcaagatgtgctgaattggttaaatgaggagaaaattatccagaggcttgtggaaatagttcatccatcgcaagaagaagatcgacattcaaatgcatcacaatcactttgtgaaattgttcgcctgagcagagaccagatgttacaaattcagaacagtacagagcccgaccccctgcttgccactctagaaaagcaagaaattatagagcagcttctatcaaatattttccacaaggagaaaaatgagtcagccatagtcagtgcaatccagatattgctgactttacttgagacacgacgaccaacatttgaaggccatatagagatctgcccaccaggcatgagccattcagcttgttcagtaaacaagagtgttctagaagccatcagaggaagacttggatcttttcatgaactcctgctggagccacccaagaaaagtgtgatgaagaccacatggggtgtgctggatcctcctgtggggaatacccggttgaatgtcattaggttgatatccagcctgcttcaaaccaataccagcagtataaatggggaccttatggagctgaatagcattggagtcatattgaacatgttcttcaagtatacatggaataactttttgcatacacaagtggaaatttgtattgcactgattcttgcaagtccttttgaaaacacagaaaatgccacaattaccgatcaagactccactggtgataatttgttattaaaacatcttttccaaaaatgtcaattaatagaacgaatacttgaagcctgggaaatgaatgagaagaaacaggctgagggaggaagacggcatggttacatgggacacctaacgaggatagctaactgtatcgtgcacagcactgacaagggccccaacagtgcattagtgcagcagcttatcaaagatcttcccgacgaagtcagggaacgatgggagacgttctgcacaagctccttaggagaaactaacaagaggaacacggtagatctagttacaacctgccatattcattcatccagtgatgatgaaattgactttaaagaaacgggtttctcacaggattcttctttgcagcaagccttttctgattatcagatgcaacaaatgacgtccaattttattgaccagtttggcttcaacgatgagaagtttgcagatcaagatgacattggcaatgtttcttttgatcgagtatcagacatcaactttactctcaatacaaatgaaagtggaaatattgccttgtttgaagcatgttgtaaggaaagaatacaacagtttgatgatggtggctctgatgaggaagatatatgggaggaaaagcacatcgcattcacaccagaatcccaaagacgatccagctcggggagtacagacagtgaggaaagtacagactctgaagaagaagatggagcaaagcaagacttgtttgaacccagcagtgccaacacggaggataaaatggaggtggacctgagtgaaccacccaactggtcagctaactttgatgtcccaatggaaacaacccacggtgctccattggattctgtgggatctgatgtctggagcacagaggagccgatgccaactaaagagacgggctgggcttctttttcagagttcacgtcttccctgagcacaaaagattctttaaggagtaattctccagtggaaatggaaaccagcactgaacccatggaccctctgactcccagtgcggctgccctggcagtgcagccagaagcggcaggcagtgtggccatggaagccagctctgacggagaggaggatgcagaaagtacagacaaggtaactgagacagtgatgaatggcggcatgaaggaaacgctcagcctcactgtagatgccaagacagagactgcggtcttcaaaagagtgttgaaatcctatcgtgaggaagggaaactgtctacctctcaagatgctgcttgtaaagacgcagaggagtgtcccgagactgcagaggcgaagtgcgcggcgcccaggcctcccagcagcagtcccgagcagaggactggccaaccaagcgcaccaggtgacacttcagtgaatggccctgtatgacgggtgacgtctgctgctgctgactgaggactgcagaccgccaccactcaggggctctggaggggtcagctggagcccaccaagctgtcactgctgcactcactctgcaagggatcaggaccagcaacctttatattctagattctaagacattgtacagagaaattcagaagtgtaaaaatattgcacattgacaaataccaagaatttttgcgtatgtttatattgtattgttctaaataatgggtagcctgtgaaataagatcttgccacccatgtaataatagtagtaatactatagttaaaatggctgtaagaatagttttataaaagtgaatacacagatctattgtatttgaaacataactttgacaattattagtgtgaccaaagtattaggcggttttcatacatttttcaccttgtacaaaattatgaattcatttttcctccaggccgacaaggagttgtagaatgaaaatgccctctaagtgttattttggttgttctaacttacaaaagtgattttgaataagaaatatttggtgttctttttataaccagtttttgattggtaattgttttctgtattgtttaaaacggatcaaaaatgtaagtctattggtagagattaagtaaagtatttattgctacatcatagttgataaattgatgttatcgtaaagccatatgttctgttcaagtcttgtttgcttgaaatgattattcctacaagtgaaacactagactatttggagtgtatatggcttgtgttttgggattttttttttttttttttggcttttgtttttgtttgtttttttgtttcatttggtagttcatctgccttttaacccattcaccaaaatttaccttgttaacaagcatcaccaatgaacatttcagagcaatctgcatatttaacagacctaaaataaatcctattaggcaagtcagttgaaaatgctcgtgctgctaatggaattagagtgcgttcattttacaggctagtattttaaaagtagaaatcaaaatctggcaccgaagcatgctaattgtttactgtaccttgtgaggttttcactcataaatttaaaccagtgtatttttttagaactggtttgtgtatatatatagtgattatggatactaattcaatgtaatttataattttctatgtcaatacaaaaatacatcacagccttctcaaacagctcaagcaatatattgtatattgccatatcgtctggtgaaagggttaaattacttcacctcttgcacttttagatgcaaatcagtttttcatttctgtaatagaaaattattcacgtatttttacatcatttgtttttcctgaccagtatttaaaaccaaaaggatattctgaaaaatggccaacaatttttttagaagtagcatcccaagcagcgtgcctaaacattacattgcatatggaaataaaagaatcaaacgtctaatgccttattatttctgatttcctttttcattttaagtggtgtggagattccagcactcccaggacagtggagtcagcagtaagccctgggacaggtggcaagggtgggtcccttgacctttgcacgcctcctcaggaaccccctttcccgggtgagcccctctctgaagagactgtccttgggcctcctctggaagcagcacccccagaggacagggctcctcctgcttgcctcagggctgcctgacttgaatggcgttggacctcggggattactggtagataatatgctctggtctcgcctggtggtgagttttgccagccatggccagggtttggctccactggtggcacacgtggcctccgtggtatggacctggtggcttctccatcccactgtggcctctgtggtatggacctggtggcttctccatcctacccaaggtaacagtgtcttgcttcatcccactgactgctgggagagagcctctgggacttttctttggggcatcattttgttttgtctttcgtagcagggaaaggatatgacaatggggaggacagttcttttggaggttggaggggccaagccaaggacaggagcaagtgtgccctcattttgtttctacttttaatttctgtgtgttggccatactgaattatgagactaacagatgtctacaatacaatacctgtattcaaaataacaaaaataaagcctgattctttgtttctag

SEQ ID NO: 62341 - DNA, 2640 bp, Artificial Sequence
  derived and/or modified sequence
atgttctggaagttcgacctgcacagcagcagccacatcgacacccttcttgaacgcgaggacgtgaccctgaaggaactgatggacgaggaagacgtgctgcaggagtgcaaggcccagaaccgcaaactgatcgaatttcttctgaaagcggaatgtttggaggatttagtgtcctttattatcgaagagccgcctcaggacatggacgagaagatccgctacaagtatccaaatattagctgcgaactcttaacaagtgatgtttcacagatgaatgatcgattgggtgaagatgagagcttactcatgaagctctattcattcttacttaacgacagcccactgaatcccctactcgctagttttttcagcaaggtgttaagcattctgattagcagaaaacccgagcagatcgtagacttcctgaagaaaaagcacgattttgtagacctcatcataaaacacattggaacctccgcaattatggatctgctgctgcgtctcctcacctgtatcgagcccccccagcctaggcaggatgtgctcaactggctgaacgaagagaaaatcattcaaaggctcgtcgaaatagtgcaccccagtcaggaggaggacaggcactcaaacgcctcacagagcctgtgtgagatcgttcgcctgtcgcgggatcagatgctgcagatacagaattccaccgagccagacccattgctggccacactggaaaaacaggagatcattgaacagctacttagtaatatcttccacaaagaaaaaaacgaaagcgcaatcgtgagcgcaatccagatcttgttgactcttctcgaaacgaggcgcccaaccttcgagggacacatagagatttgtccgcctggcatgagccattctgcctgttccgtgaacaagagcgtcctggaagccattcgagggcgcttaggctcatttcacgagctactccttgaaccgcctaagaaaagtgtgatgaaaaccacttggggcgttctcgatcccccggttgggaacaccagattgaacgtgatcagattaatctcgtccctgttacaaaccaatacctcctcaattaatggagaccttatggaattgaatagcatcggcgtgatactgaatatgttctttaagtacacatggaacaactttcttcacactcaagtcgagatctgcatcgcactaattttggcgagccctttcgagaacaccgagaatgctactattacagaccaggactccaccggagacaatctgttacttaaacatctgttccagaagtgtcagctcatagaaagaatccttgaggcctgggagatgaacgagaagaaacaggctgagggggggagaagacacggctacatgggccatctgacacgcatagctaactgcatcgtccactccaccgataagggacccaactccgcgctagtccaacaattgatcaaggaccttcccgatgaagttcgggagcggtgggaaacattttgtactagttcccttggagaaaccaacaaacgcaatacagtggatctcgtgacaacctgtcatatccactcttccagcgatgacgaaattgacttcaaggagactgggttctctcaggacagcagcctgcagcaagcgttctctgactaccagatgcagcagatgacaagcaactttattgatcagtttgggttcaacgatgagaagttcgccgatcaggatgatatcggaaatgtatctttcgaccgggtgagcgatataaacttcaccctcaatacaaatgaatctggaaacatcgctctgttcgaagcctgttgcaaggagaggatacagcagttcgatgatgggggttctgatgaagaggacatctgggaggaaaagcacatcgccttcacaccagagagccagcgtcgctcatcatccggctctaccgactcagaggagagtaccgatagtgaagaagaagacggcgctaagcaagacctcttcgagccaagtagtgccaacacagaagacaaaatggaagtcgacctttctgagcctccaaactggtctgctaattttgatgtgccaatggaaaccacccacggtgcaccgctggattccgtgggttccgacgtttggtctactgaggagcccatgcctaccaaagaaaccgggtgggcctctttttcagagtttacatcatctcttagcaccaaggatagcctgcgtagtaactcacccgtggaaatggagacaagcactgaaccaatggaccccctcactccctctgcggcagctctcgcggtccagcccgaggcagccggctcagtggccatggaggccagcagcgacggtgaggaagatgcggaaagcaccgataaagttaccgaaactgttatgaacggaggaatgaaggaaactttgtccctgacggtggatgccaaaacggaaaccgctgtgtttaagagactcctcggcggctgcagtgaagagggcaagctgtctaccagccaagatgccgcgtgcaaggacgccgaggagtgtccggagaccgcagaagccaagtgcgcagctcctcgtcccccaagtagcagtcccgagcagagaactggacagccatcggctccaggagatactagcgtgaatggccccgtgtag

SEQ ID NO: 62342 - DNA, 2640 bp, Artificial Sequence
  derived and/or modified sequence
atgttctggaagttcgacctgcacagcagcagccacatcgacaccctcctggagcgagaagacgtgactttaaaggagctgatggacgaggaagatgttcttcaggaatgtaaagcacaaaaccgtaaactcatagaattcctgctcaaagccgagtgtctggaagaccttgtctcttttattatcgaggagccccctcaggacatggacgaaaaaatccgatataaatacccaaacatttcctgcgagctgctgacttcagacgtttctcagatgaacgatagactcggggaagatgagtctctgctgatgaaattgtactcttttctgctcaatgactcacccctcaacccattgttggcttccttcttcagcaaggtgctgagtatcctgatctctcggaaaccggaacagattgtcgatttcctgaaaaaaaagcatgattttgtggacctgatcatcaaacatattggcactagtgctataatggatctcctcctccgactcctgacatgtattgagccacctcagccaaggcaggacgtcctaaattggctgaatgaggagaagattattcaacgactcgtggagatcgtccatccgagccaagaagaggacaggcattcaaacgccagccagtctctctgtgagattgtacgcttgtccagagaccaaatgctgcaaattcagaattcgaccgaacctgatccgctgctcgcgactctcgagaagcaggagatcatcgagcagttactgtcgaacatttttcataaagagaagaacgaaagcgccattgttagcgcaatccagatactgctgaccttattggagacccggcgaccaactttcgaagggcatattgaaatatgtccccccggcatgtctcacagtgcctgcagcgttaacaaaagcgtccttgaggccatacggggccgcctcggctcctttcatgagctgctgctggaaccgccgaaaaagagtgtgatgaagaccacctggggagtcttggatccccccgtgggaaatactcggctcaatgtgatcaggcttatatccagtctgcttcagaccaacacaagctctatcaacggcgacctgatggaacttaattcaattggcgttattctcaatatgtttttcaaatacacctggaataactttctgcacacccaggtcgaaatttgcattgctctgattctcgctagcccctttgagaatacggaaaatgccacgatcactgaccaggactccacaggcgacaacctgctcttaaagcatctgtttcagaagtgtcaactgattgaacgtatcctggaagcatgggagatgaacgagaaaaaacaggctgaggggggtagacgccacggctacatggggcatctgacacgtattgcgaactgcatcgttcattcaacggataaaggccctaattccgccctcgttcagcagctcattaaggatttgcctgatgaggtacgcgaaaggtgggagactttctgcacatctagcctgggggagactaacaagcgaaacaccgtcgatctggtgacaacctgccatatccattcgagcagcgacgatgaaattgacttcaaggagaccgggttcagccaagacagctccctccaacaagcttttagcgactaccagatgcaacagatgacctcaaacttcattgatcaattcggttttaatgacgagaaatttgccgatcaggacgacattgggaatgtgtcctttgaccgggtgtctgatattaattttacgttgaatacaaacgagtccgggaatattgccttattcgaggcttgttgcaaggaacggatccagcagtttgacgacggagggtccgatgaagaggacatctgggaggaaaaacacatagctttcacacccgagtctcagagaagatctagcagcggttcaacagacagcgaggagagtacagattcggaagaggaggacggcgctaagcaggatctatttgagccttcatcagccaacaccgaagacaagatggaggtcgatctgagcgagcctccgaattggtccgccaatttcgatgtgcctatggaaacaactcatggcgcgccactggattcagtgggcagtgacgtgtggtccaccgaagaacctatgccaaccaaagaaaccggctgggccagcttctctgagtttacctcatcactgtctactaaggactcccttcgcagcaactctccagtggagatggagacctctacggagccaatggatccattgactccatccgccgccgccctggccgtccaacccgaagcggcgggttcagttgccatggaagcctcttctgacggcgaagaagacgcagagtcaactgacaaggtgactgagaccgtcatgaacgggggcatgaaggagacactttctttaacggtagacgccaagacggagacagccgtgttcaaaagagttctgaagtcgtatagggaggaaggcaaactgtccacctctcaggacgccgcatgcaaagacgccgaagagtgtccagaaaccgctgaagccaagtgtgcagccccacgccccccatcctcctctcctgagcagcgcactggccagcccagcgccccaggggacacaagtgtaaatgggccagtgtag

SEQ ID NO: 62343 - DNA, 2640 bp, Artificial Sequence
  derived and/or modified sequence
atgttttggaagtttgatctgcactcttccagccacatcgatactcttcttgagcgagaggacgtgactctcaaggagctgatggacgaggaagacgttttgcaagagtgcaaggcccagaatagaaagttaatagaattccttctgaaagcagaatgtctcgaagatctggtgtctttcatcattgaggaacctccacaagacatggacgagaaaatcaggtataagtaccctaacatcagttgtgagctgctcaccagcgatgtttcacaaatgaatgataggctgggagaggacgaaagtctcctgatgaagttgtattcatttctcttaaatgacagcccactgaatcccctgctggcatcattcttctcaaaggtcctctccatcttgatcagtcgcaaacccgagcaaattgttgactttctgaagaaaaaacacgatttcgtggacctgatcataaagcatattggtacgagtgccatcatggatctgctgcttaggctgctcacctgtatcgagccgcctcaaccgcgacaggacgtcctgaattggctcaatgaagaaaagattattcagcgcctcgtagaaattgtgcaccctagccaagaggaggatagacattccaacgcgtctcagagcctgtgcgagatcgtcagactctctcgcgaccagatgttgcagatccaaaacagcacagaaccagacccactgctggccaccctggaaaagcaggagattatcgagcagctgctctccaacatctttcacaaggagaaaaacgagtccgcaatagtaagtgccattcagatcctgttgacacttctggagacccgtcgtccaacctttgaaggccacattgagatatgtcctcctggcatgtcccattctgcatgttctgtcaataagagcgtgctagaagctatcagggggcgtctaggctcgttccacgaattgctgctggagccacccaagaagtctgtcatgaagacgacttggggtgtcttggaccccccagtgggcaatacacggctgaatgtcatcagactgatctctagcttgcttcagaccaatacctcttcaatcaacggcgacttgatggaactgaattctatcggggtaatcctcaacatgttctttaagtatacctggaataacttcttgcatacccaagtcgagatctgcatagcactgattttagccagcccttttgagaacacagagaatgcgacaatcaccgaccaagactctacgggggataacctcctgctgaagcacctctttcagaagtgtcaactcatcgaaaggatccttgaagcctgggaaatgaatgagaaaaagcaggcagaaggaggaaggagacatggttacatggggcacttgacccgtatcgccaactgtatcgtgcatagtactgacaaaggaccaaacagcgcgctggtgcagcagttgattaaggacctgcctgacgaggtgcgtgagcgatgggagaccttttgcacgtcctcccttggtgagactaacaagcggaatactgtggatcttgtcaccacctgtcacattcatagttctagcgacgacgagattgacttcaaggagactggtttttcacaggattccagtctgcaacaggccttcagcgactatcagatgcagcagatgacctccaacttcatagaccaattcggctttaacgacgaaaagttcgccgatcaggatgacatcggaaatgtcagctttgatcgggtgtcagacatcaacttcacgcttaataccaacgaatccggaaacatcgctctctttgaggcctgctgcaaagaacggattcaacagtttgatgacggcggttctgatgaggaggatatatgggaggaaaagcatattgcctttacaccagaatcccagaggaggtcatcctcgggttcaaccgactctgaagagagtaccgactccgaggaggaggatggtgctaagcaggacctgtttgagccatcctctgccaacaccgaagataagatggaagtggacctgagcgagccccctaattggtcagctaatttcgatgtgcccatggaaacaacacatggagctcctctagattcggtgggatcagacgtatggtccacagaagagcctatgcctacaaaggaaacaggctgggcctctttcagcgagttcacctcctcactcagtaccaaggacagtctgagatctaatagccccgtcgagatggagacgtccacagagcctatggatcccctgacaccttccgcggcagcactggccgtgcagccggaggctgccggaagtgtagccatggaggccagtagtgacggagaggaagacgcggaaagcactgataaggtgacggagacggtaatgaatggagggatgaaggagacactgtccctcactgtggatgccaaaactgagactgcagtgttcaagcgcctcctcgggggatgcagcgaggagggaaagctaagtacctcacaagacgctgcatgtaaggatgctgaggaatgccccgagactgccgaggccaagtgtgctgctccgcgacccccttcttcttcgcccgagcagcggacagggcagccaagtgctcccggtgatacctccgtgaatggccctgtgtag

SEQ ID NO: 62344 - DNA, 2640 bp, Artificial Sequence
  derived and/or modified sequence
atgttctggaaattcgaccttcattcctcttcacacattgacacactgctcgaacgggaagacgtgactctaaaagagctcatggatgaggaggacgtgctgcaggagtgtaaggcgcagaataggaaattgatcgaatttctgttaaaagctgagtgcttagaagacctggtgtctttcattatcgaagagccaccacaggacatggatgaaaagatccggtataaatatcccaatatatcttgtgaactccttaccagcgacgtgtcacaaatgaatgatcggcttggtgaagatgagagcctccttatgaagctttacagttttctgcttaatgattctcctctgaaccccctgctcgcatctttttttagcaaagtgctctccattctaatctcacgtaaacctgaacaaattgtcgatttccttaaaaagaaacatgatttcgtggatctcattattaagcacatcggaacttctgcgattatggatctgcttctgaggctgctgacctgtattgaaccccctcagccacggcaagacgtgcttaattggttgaacgaggagaaaataatccagcggctggttgaaatagtccatccctcacaggaagaggaccgacactccaatgcatcgcagagcctgtgcgaaatagtgaggttatctcgggatcagatgttgcagattcaaaactccacagaaccagaccctctgctcgcaaccttagaaaagcaggagatcatcgaacagttgctcagcaacatattccacaaagagaagaacgaaagtgctatcgtcagtgctatccaaattttgctcaccctgctggaaacccgaaggcctactttcgaaggccatatcgaaatatgccctcccggaatgtcgcatagcgcatgctctgtgaacaaatcagtgcttgaggccattagaggcagactcggctctttccatgaactgctgctagaacccccaaaaaaatccgttatgaaaaccacctggggggtgttggacccaccagtcgggaatacacggctgaacgtgatcagattgatctcctctttgctgcaaactaatacttcgagtatcaatggcgacttgatggagctcaatagcataggagtcattctgaatatgttcttcaaatacacctggaataatttcctgcacactcaagtggaaatttgtatagcgttgatcctggctagcccatttgagaataccgagaacgccactatcactgaccaggattcaacaggagataatctgctgctgaagcatttgtttcagaagtgccaattgattgaacggattcttgaagcgtgggagatgaatgaaaagaagcaggcagagggagggagacgccacggctatatggggcatctgaccaggatcgctaactgtattgtccattcaaccgacaagggcccaaacagcgcgttggtgcagcagctcatcaaagatttgcccgatgaagttagagagaggtgggagacattttgcacctccagcctgggtgagactaacaagcggaacacagttgatttggtcacgacttgccacattcattcttccagcgatgatgaaatcgacttcaaggagaccggcttctcacaagattcctcactccagcaggcattctccgactatcagatgcagcaaatgaccagtaactttatcgatcagttcggatttaacgacgagaagttcgccgaccaagacgacatcgggaatgtttcatttgatagagtctctgacattaactttaccctgaatacaaatgagagtgggaatatcgcactgttcgaggcatgttgcaaggaacggatccagcaatttgatgatggcggttccgacgaagaggatatatgggaggaaaagcacatcgccttcaccccagagagtcaacgccgatcatccagcgggtcaaccgactctgaagaaagcaccgattccgaggaggaagacggcgcaaagcaggacctgttcgagccttctagtgccaatacagaggacaagatggaagtcgacctgagtgaacccccaaactggagcgccaacttcgacgtccctatggagactacacacggcgctccactggattctgtaggctccgatgtgtggtccacagaggaacctatgccaaccaaggagaccggatgggcctctttttcggaattcaccagtagtctatctaccaaagactctctccggtcgaattctcccgtggagatggaaacaagtactgaacctatggaccccctgaccccctctgccgcagcattggcggtgcagcccgaagcagcagggtccgtggccatggaggccagcagcgacggagaggaggacgccgaatcgaccgacaaggttacagaaaccgtgatgaatggagggatgaaagagactctgtcactcacagttgatgcgaagactgagacagccgtgttcaaacgcgtcctgaagtcataccgggaagaagggaagttgtcaacaagccaggacgccgcttgtaaggatgctgaagaatgtccagagacggccgaggccaaatgcgcagccccaaggcctccaagctccagtcccgaacagcgcactggacagccctctgccccaggtgataccagtgtgaacggaccagtatag

SEQ ID NO: 62345 - protein, 873 aa, Artificial Sequence
  derived and/or modified sequence
MFWKFDLHSSSHIDTLLEREDVTLKELMDEEDVLQECKAQNRKLIEFLLKAECLEDLVSFIIEEPPQDMDEKIRYKYPNISCELLTSDVSQMNDRLGEDESLLMKLYSFLLNDSPLNPLLASFFSKVLSILISRKPEQIVDFLKKKHDFVDLIIKHIGTSAIMDLLLRLLTCIEPPQPRQDVLNWLNEEKIIQRLVEIVHPSQEEDRHSNASQSLCEIVRLSRDQMLQIQNSTEPDPLLATLEKQEIIEQLLSNIFHKEKNESAIVSAIQILLTLLETRRPTFEGHIEICPPGMSHSACSVNKSVLEAIRGRLGSFHELLLEPPKKSVMKTTWGVLDPPVGNTRLNVIRLISSLLQTNTSSINGDLMELNSIGVILNMFFKYTWNNFLHTQVEICIALILASPFENTENATITDQDSTGDNLLLKHLFQKCQLIERILEAWEMNEKKQAEGGRRHGYMGHLTRIANCIVHSTDKGPNSALVQQLIKDLPDEVRERWETFCTSSLGETNKRNTVDLVTTCHIHSSSDDEIDFKETGFSQDSSLQQAFSDYQMQQMTSNFIDQFGFNDEKFADQDDIGNVSFDRVSDINFTLNTNESGNIALFEACCKERIQQFDDGGSDEEDIWEEKHIAFTPESQRRSSSGSTDSEESTDSEEEDGAKQDLFEPSSANTEDKMEVDLSEPPNWSANFDVPMETTHGAPLDSVGSDVWSTEEPMPTKETGWASFSEFTSSLSTKDSLRSNSPVEMETSTEPMDPLTPSAAALAVQPEAAGSVAMEASSDGEEDAESTDKVTETVMNGGMKETLSLTVDAKTETAVFKSEEGKLSTSQDAACKDAEECPETAEAKCAAPRPPSSSPEQRTGQPSAPGDTSVNGPV

SEQ ID NO: 62346 - DNA, 2622 bp, Artificial Sequence
  derived and/or modified sequence
atgttctggaagttcgacctgcacagcagcagccacatcgacaccctgctggagagagaggacgtgaccctgaaggagctgatggacgaggaggacgtgctgcaggagtgcaaggcccagaacagaaagctgatcgagttcctgctgaaggccgagtgcctggaggacctggtgagcttcatcatcgaggagcccccccaggacatggacgagaagatcagatacaagtaccccaacatcagctgcgagctgctgaccagcgacgtgagccagatgaacgacagactgggcgaggacgagagcctgctgatgaagctgtacagcttcctgctgaacgacagccccctgaaccccctgctggccagcttcttcagcaaggtgctgagcatcctgatcagcagaaagcccgagcagatcgtggacttcctgaagaagaagcacgacttcgtggacctgatcatcaagcacatcggcaccagcgccatcatggacctgctgctgagactgctgacctgcatcgagcccccccagcccagacaggacgtgctgaactggctgaacgaggagaagatcatccagagactggtggagatcgtgcaccccagccaggaggaggacagacacagcaacgccagccagagcctgtgcgagatcgtgagactgagcagagaccagatgctgcagatccagaacagcaccgagcccgaccccctgctggccaccctggagaagcaggagatcatcgagcagctgctgagcaacatcttccacaaggagaagaacgagagcgccatcgtgagcgccatccagatcctgctgaccctgctggagaccagaagacccaccttcgagggccacatcgagatctgcccccccggcatgagccacagcgcctgcagcgtgaacaagagcgtgctggaggccatcagaggcagactgggcagcttccacgagctgctgctggagccccccaagaagagcgtgatgaagaccacctggggcgtgctggacccccccgtgggcaacaccagactgaacgtgatcagactgatcagcagcctgctgcagaccaacaccagcagcatcaacggcgacctgatggagctgaacagcatcggcgtgatcctgaacatgttcttcaagtacacctggaacaacttcctgcacacccaggtggagatctgcatcgccctgatcctggccagccccttcgagaacaccgagaacgccaccatcaccgaccaggacagcaccggcgacaacctgctgctgaagcacctgttccagaagtgccagctgatcgagagaatcctggaggcctgggagatgaacgagaagaagcaggccgagggcggcagaagacacggctacatgggccacctgaccagaatcgccaactgcatcgtgcacagcaccgacaagggccccaacagcgccctggtgcagcagctgatcaaggacctgcccgacgaggtgagagagagatgggagaccttctgcaccagcagcctgggcgagaccaacaagagaaacaccgtggacctggtgaccacctgccacatccacagcagcagcgacgacgagatcgacttcaaggagaccggcttcagccaggacagcagcctgcagcaggccttcagcgactaccagatgcagcagatgaccagcaacttcatcgaccagttcggcttcaacgacgagaagttcgccgaccaggacgacatcggcaacgtgagcttcgacagagtgagcgacatcaacttcaccctgaacaccaacgagagcggcaacatcgccctgttcgaggcctgctgcaaggagagaatccagcagttcgacgacggcggcagcgacgaggaggacatctgggaggagaagcacatcgccttcacccccgagagccagagaagaagcagcagcggcagcaccgacagcgaggagagcaccgacagcgaggaggaggacggcgccaagcaggacctgttcgagcccagcagcgccaacaccgaggacaagatggaggtggacctgagcgagccccccaactggagcgccaacttcgacgtgcccatggagaccacccacggcgcccccctggacagcgtgggcagcgacgtgtggagcaccgaggagcccatgcccaccaaggagaccggctgggccagcttcagcgagttcaccagcagcctgagcaccaaggacagcctgagaagcaacagccccgtggagatggagaccagcaccgagcccatggaccccctgacccccagcgccgccgccctggccgtgcagcccgaggccgccggcagcgtggccatggaggccagcagcgacggcgaggaggacgccgagagcaccgacaaggtgaccgagaccgtgatgaacggcggcatgaaggagaccctgagcctgaccgtggacgccaagaccgagaccgccgtgttcaagagcgaggagggcaagctgagcaccagccaggacgccgcctgcaaggacgccgaggagtgccccgagaccgccgaggccaagtgcgccgcccccagaccccccagcagcagccccgagcagagaaccggccagcccagcgcccccggcgacaccagcgtgaacggccccgtgtag

SEQ ID NO: 62347 - DNA, 2622 bp, Artificial Sequence
  derived and/or modified sequence
atgttttggaaattcgacctgcacagctcatcacacatagacaccctcttagagcgggaagatgttacattgaaagagttgatggacgaagaggacgtgctgcaggaatgcaaagctcaaaaccgcaaactgatcgagtttctactgaaagccgaatgtttggaggatctggtgtcatttattatagaggagcccccgcaggatatggatgaaaagatccgttacaaatatcctaacatctcctgcgagctgctgacctctgacgtgtctcagatgaacgacaggttaggggaagatgagagtcttcttatgaagctttatagcttcctgttgaatgactccccgttgaatcctctgttggcaagcttcttttctaaggtgttgtctattctcatctcgcgcaaacccgaacagatagtagacttcctgaagaagaagcatgacttcgttgacttgatcatcaagcatattggcacctctgctatcatggatctgctgctgcggctcctaacatgtatcgagcccccgcagcctaggcaggacgtcctgaactggctgaatgaggaaaaaattatacagcgcctggtggagatcgtccacccgagccaggaagaagatcgccacagcaacgcctcacagtcactttgcgaaatagttcgtcttagccgcgaccagatgctccagattcagaactctactgaacccgaccctctcctcgcgacactcgaaaaacaggagataattgagcaactcctcagcaacatctttcacaaggagaaaaatgaaagcgccatagtgtcagcaattcagattcttttgactctcctggaaactcgccgccctacattcgagggccacatcgagatttgtcccccaggtatgagccatagtgcatgctccgttaacaagtcagtgctcgaagccattagggggcgcctcggctcctttcacgaactgctgttggaacctccaaagaaatctgtgatgaaaactacatggggcgtccttgatcctcctgtcggtaacacacgactgaatgtgatcagacttatctcctctctgctacagactaacacctctagcatcaacggtgatttaatggaactgaatagcattggcgtcatcctcaatatgtttttcaaatatacctggaataattttcttcacacgcaggtagaaatatgcatcgccctcatactggcttcccccttcgagaacacagagaacgccactatcaccgaccaagatagtactggagacaatctgcttctcaaacacctctttcaaaagtgccagctcatcgagagaattctggaagcctgggaaatgaatgagaaaaaacaggcagagggaggcagacgacatggatacatgggtcaccttactcgtatagcaaattgcatcgtccactctaccgacaagggaccgaactcagctcttgtgcagcagctcataaaggacttgcccgatgaagtacgggagcgctgggaaacgttctgtacctcgagtctgggagaaactaataaaagaaatacagtggacctggtaaccacctgccacatacattcaagctcagacgacgaaattgatttcaaggagacaggcttctcacaagatagcagcctgcagcaggctttctcagattaccaaatgcagcagatgaccagcaacttcatcgaccaatttggatttaacgatgagaaattcgccgaccaagacgacatcgggaacgtgagttttgatcgggtttcagatataaactttacactcaacaccaatgaatctgggaacatcgccctcttcgaggcctgctgcaaggagagaatacagcagttcgatgatggaggttctgatgaagaggacatatgggaggaaaagcacattgcttttaccccagagagccagcggaggagcagctccggttccactgactctgaggagtccaccgattccgaagaggaagacggtgccaaacaggacctttttgaaccatccagcgccaacactgaggacaaaatggaagtggacctgagtgagccaccgaattggagtgccaacttcgacgttcccatggaaacaacccacggggcaccactggattcagtggggtccgacgtctggagcactgaagagcctatgccaaccaaggagactggatgggcaagcttcagtgaatttacatcttctctatcaaccaaagattcccttagaagcaactcccctgtcgagatggaaacctctacagaaccaatggaccctttgacaccatcagccgccgcgctggctgtgcagccggaggccgctgggtctgttgcaatggaggccagctcagacggtgaagaagacgctgagtctacggataaagtgaccgaaactgtgatgaacggaggtatgaaggaaacattgtccctgacagtggatgccaagacagaaacagccgttttcaagtcagaagaaggcaagctctccacatcccaagacgccgcctgtaaagacgcggaggagtgtccggaaaccgccgaagctaaatgtgctgcacctcgccccccttcatccagccctgagcaaaggacggggcagccctcagccccaggtgacacctccgtgaacggacccgtctag

SEQ ID NO: 62348 - DNA, 2622 bp, Artificial Sequence
  derived and/or modified sequence
atgttctggaagtttgacctgcacagcagcagccacatcgacaccctgctggagcgggaggatgtgaccctgaaggagctgatggatgaagaagatgtgctgcaggagtgcaaggcccagaacaggaagctgattgagttcctgctgaaggccgagtgcctggaggacctggtgtccttcatcatcgaggagcccccccaggacatggatgagaagatccgctacaagtaccccaacatcagctgtgagctgctgaccagtgatgtgtcccagatgaatgaccggctgggggaggatgagagcctgctgatgaagctgtacagcttcctgctgaatgacagccccctgaaccccctgctggccagcttcttcagcaaggtgctgagcatcctgatcagcaggaagccagagcagatcgtggacttcctgaagaagaagcatgactttgtggacctgatcatcaagcacatcggcaccagcgccatcatggacctgctgctgcggctgctgacctgcatcgagcccccccagccccggcaggatgtgctgaactggctgaatgaggagaagatcatccagaggctggtggagatcgtgcaccccagccaggaggaggacagacacagcaatgccagccagagcctgtgtgagatcgtgcggctgagccgggaccagatgctgcagatccagaacagcacagagccagaccccctgctggccaccctggagaagcaggagatcatcgagcagctgctgagcaacatcttccacaaggagaagaatgaaagtgccatcgtgtctgccatccagatcctgctgaccctgctggagacccggcggcccacctttgagggccacatcgagatctgccccccaggcatgagccacagcgcctgcagcgtgaacaagtctgtgctggaggccatccggggccgcctgggcagcttccacgagctgctgctggagccccccaagaagtctgtgatgaagaccacctggggcgtgctggacccccctgtgggcaacacccggctgaatgtcatccgcctcatcagcagcctgctgcagaccaacaccagcagcatcaatggagacctgatggagctgaacagcattggagtcatcctgaacatgttcttcaagtacacctggaacaacttcctgcacacccaggtggagatctgcatcgccctgatcctggccagcccctttgaaaatacagaaaatgccaccatcacagaccaggacagcactggagacaacctgctgctgaagcacctgttccagaagtgccagctgattgaaagaatcctggaggcctgggagatgaatgagaagaagcaggccgagggcggcagaagacatggctacatgggccacctgacccgcatcgccaactgcatcgtgcacagcacagacaagggccccaacagcgccctggtgcagcagctgatcaaggacctgcctgatgaggtgcgggagcgctgggagaccttctgcaccagcagcctgggggagaccaacaagaggaacacagtggacctggtgaccacctgccacatccacagcagcagtgatgatgaaattgacttcaaggagaccggcttcagccaggacagcagcctgcagcaggccttcagtgactaccagatgcagcagatgaccagcaacttcatcgaccagtttggcttcaatgatgagaagtttgctgaccaggatgacattggaaatgtgtcctttgacagagtgtctgacatcaacttcaccctgaacaccaatgaaagtggcaacatcgccctgtttgaggcctgctgcaaggagcgcatccagcagtttgatgatggcggcagtgatgaggaggacatctgggaggagaagcacatcgccttcaccccagagagccagaggaggagcagcagcggcagcacagattctgaggagagcacagattctgaggaggaggatggagccaagcaggacctgtttgagcccagcagcgccaacacagaggacaagatggaggtggacctgtctgagccccccaactggagcgccaactttgatgtgcccatggagaccacccatggagcccccctggacagcgtgggcagtgatgtgtggagcacagaggagcccatgcccaccaaggagaccggctgggccagcttcagcgagttcaccagcagcctgagcaccaaggacagcctgcggagcaacagccctgtggagatggagaccagcacagagcccatggaccccctgaccccatctgctgctgccctggccgtgcagcctgaggccgccggctctgtggccatggaggccagcagtgatggagaagaagatgctgagagcacagacaaggtgacagagaccgtgatgaatggaggcatgaaggagaccctgagcctgactgtggatgccaagacagaaacagctgtgttcaagtctgaggagggcaagctgagcaccagccaggatgctgcctgcaaggatgctgaagaatgtcctgagacagctgaggccaagtgtgccgcccccaggcctcccagcagcagccctgagcagaggacaggccagcccagcgcccctggggacacctctgtgaatggacctgtgtag

SEQ ID NO: 62349 - DNA, 5093 bp, Artificial Sequence
  derived and/or modified sequence
gcttgatacgtccgccattttgggcgcttcgctgatggtgtcggtgagcgcgtttcccgcctgagcgcaactagcggcgggtcgtgggcacctccaggagagcttgtttcatatccatatcccactgtattcctgctaatctgctaatgcagtaaattggaggaaaactgttaccaggataacctgtaatgggcaaggagccacaaagaagaaaacatttcttttaatttttaaacttggtttgaaagaccagcatgttttggaaatttgatcttcactcatcatcccacatagacacacttctagaaagagaagatgtaacactgaaggagttaatggatgaggaagatgttttacaggaatgtaaagctcagaaccgcaaacttatagagtttctgttaaaagcagaatgtctcgaagatttagtctcattcattatagaagaaccacctcaagacatggatgaaaagatcagatacaagtatccaaatatatcttgtgagttgctcacttctgatgtctcccagatgaatgatagactgggagaagatgaatccttgctaatgaaattatatagcttcctcctaaacgattcccctttgaatccactacttgccagtttcttcagcaaggtgctaagtattcttatcagcagaaaaccagaacagattgtggatttcttaaagaagaagcatgattttgtagaccttattataaagcacataggaacttctgctatcatggatttgttgctcaggctcctgacgtgtatcgaacctccacagcccaggcaagatgtgctgaattggttaaatgaggagaaaattatccagaggcttgtggaaatagttcatccatcgcaagaagaagatcgacattcaaatgcatcacaatcactttgtgaaattgttcgcctgagcagagaccagatgttacaaattcagaacagtacagagcccgaccccctgcttgccactctagaaaagcaagaaattatagagcagcttctatcaaatattttccacaaggagaaaaatgagtcagccatagtcagtgcaatccagatattgctgactttacttgagacacgacgaccaacatttgaaggccatatagagatctgcccaccaggcatgagccattcagcttgttcagtaaacaagagtgttctagaagccatcagaggaagacttggatcttttcatgaactcctgctggagccacccaagaaaagtgtgatgaagaccacatggggtgtgctggatcctcctgtggggaatacccggttgaatgtcattaggttgatatccagcctgcttcaaaccaataccagcagtataaatggggaccttatggagctgaatagcattggagtcatattgaacatgttcttcaagtatacatggaataactttttgcatacacaagtggaaatttgtattgcactgattcttgcaagtccttttgaaaacacagaaaatgccacaattaccgatcaagactccactggtgataatttgttattaaaacatcttttccaaaaatgtcaattaatagaacgaatacttgaagcctgggaaatgaatgagaagaaacaggctgagggaggaagacggcatggttacatgggacacctaacgaggatagctaactgtatcgtgcacagcactgacaagggccccaacagtgcattagtgcagcagcttatcaaagatcttcccgacgaagtcagggaacgatgggagacgttctgcacaagctccttaggagaaactaacaagaggaacacggtagatctagttacaacctgccatattcattcatccagtgatgatgaaattgactttaaagaaacgggtttctcacaggattcttctttgcagcaagccttttctgattatcagatgcaacaaatgacgtccaattttattgaccagtttggcttcaacgatgagaagtttgcagatcaagatgacattggcaatgtttcttttgatcgagtatcagacatcaactttactctcaatacaaatgaaagtggaaatattgccttgtttgaagcatgttgtaaggaaagaatacaacagtttgatgatggtggctctgatgaggaagatatatgggaggaaaagcacatcgcattcacaccagaatcccaaagacgatccagctcggggagtacagacagtgaggaaagtacagactctgaagaagaagatggagcaaagcaagacttgtttgaacccagcagtgccaacacggaggataaaatggaggtggacctgagtgaaccacccaactggtcagctaactttgatgtcccaatggaaacaacccacggtgctccattggattctgtgggatctgatgtctggagcacagaggagccgatgccaactaaagagacgggctgggcttctttttcagagttcacgtcttccctgagcacaaaagattctttaaggagtaattctccagtggaaatggaaaccagcactgaacccatggaccctctgactcccagtgcggctgccctggcagtgcagccagaagcggcaggcagtgtggccatggaagccagctctgacggagaggaggatgcagaaagtacagacaaggtaactgagacagtgatgaatggcggcatgaaggaaacgctcagcctcactgtagatgccaagacagagactgcggtcttcaaaagtgaggaagggaaactgtctacctctcaagatgctgcttgtaaagacgcagaggagtgtcccgagactgcagaggcgaagtgcgcggcgcccaggcctcccagcagcagtcccgagcagaggactggccaaccaagcgcaccaggtgacacttcagtgaatggccctgtatgacgggtgacgtctgctgctgctgactgaggactgcagaccgccaccactcaggggctctggaggggtcagctggagcccaccaagctgtcactgctgcactcactctgcaagggatcaggaccagcaacctttatattctagattctaagacattgtacagagaaattcagaagtgtaaaaatattgcacattgacaaataccaagaatttttgcgtatgtttatattgtattgttctaaataatgggtagcctgtgaaataagatcttgccacccatgtaataatagtagtaatactatagttaaaatggctgtaagaatagttttataaaagtgaatacacagatctattgtatttgaaacataactttgacaattattagtgtgaccaaagtattaggcggttttcatacatttttcaccttgtacaaaattatgaattcatttttcctccaggccgacaaggagttgtagaatgaaaatgccctctaagtgttattttggttgttctaacttacaaaagtgattttgaataagaaatatttggtgttctttttataaccagtttttgattggtaattgttttctgtattgtttaaaacggatcaaaaatgtaagtctattggtagagattaagtaaagtatttattgctacatcatagttgataaattgatgttatcgtaaagccatatgttctgttcaagtcttgtttgcttgaaatgattattcctacaagtgaaacactagactatttggagtgtatatggcttgtgttttgggattttttttttttttttttggcttttgtttttgtttgtttttttgtttcatttggtagttcatctgccttttaacccattcaccaaaatttaccttgttaacaagcatcaccaatgaacatttcagagcaatctgcatatttaacagacctaaaataaatcctattaggcaagtcagttgaaaatgctcgtgctgctaatggaattagagtgcgttcattttacaggctagtattttaaaagtagaaatcaaaatctggcaccgaagcatgctaattgtttactgtaccttgtgaggttttcactcataaatttaaaccagtgtatttttttagaactggtttgtgtatatatatagtgattatggatactaattcaatgtaatttataattttctatgtcaatacaaaaatacatcacagccttctcaaacagctcaagcaatatattgtatattgccatatcgtctggtgaaagggttaaattacttcacctcttgcacttttagatgcaaatcagtttttcatttctgtaatagaaaattattcacgtatttttacatcatttgtttttcctgaccagtatttaaaaccaaaaggatattctgaaaaatggccaacaatttttttagaagtagcatcccaagcagcgtgcctaaacattacattgcatatggaaataaaagaatcaaacgtctaatgccttattatttctgatttcctttttcattttaagtggtgtggagattccagcactcccaggacagtggagtcagcagtaagccctgggacaggtggcaagggtgggtcccttgacctttgcacgcctcctcaggaaccccctttcccgggtgagcccctctctgaagagactgtccttgggcctcctctggaagcagcacccccagaggacagggctcctcctgcttgcctcagggctgcctgacttgaatggcgttggacctcggggattactggtagataatatgctctggtctcgcctggtggtgagttttgccagccatggccagggtttggctccactggtggcacacgtggcctccgtggtatggacctggtggcttctccatcccactgtggcctctgtggtatggacctggtggcttctccatcctacccaaggtaacagtgtcttgcttcatcccactgactgctgggagagagcctctgggacttttctttggggcatcattttgttttgtctttcgtagcagggaaaggatatgacaatggggaggacagttcttttggaggttggaggggccaagccaaggacaggagcaagtgtgccctcattttgtttctacttttaatttctgtgtgttggccatactgaattatgagactaacagatgtctacaatacaatacctgtattcaaaataacaaaaataaagcctgattctttgtttctagaaa

SEQ ID NO: 62350 - DNA, 2622 bp, Artificial Sequence
  derived and/or modified sequence
atgttctggaagttcgacctgcacagcagcagccacatcgacaccttgctcgagcgtgaggacgttaccttgaaggaactgatggacgaagaggacgtgcttcaggaatgcaaagctcagaatagaaaactaatagaattccttctgaaggctgagtgtctggaagatcttgtgtcatttattatcgaagaacccccccaggacatggatgagaagatccgctataagtaccccaacatttcttgcgaactgctgacctccgacgtgagtcagatgaatgaccggcttggcgaagacgagagcctcctgatgaaactgtactcttttctgctgaatgacagccctttgaatcctctgctggcttccttcttctccaaagttctgagcatccttataagccgcaagccagagcaaattgttgacttccttaagaagaaacatgattttgtcgacctcatcattaaacatattgggaccagcgcaatcatggatttgctcctgagacttctgacatgcattgagcccccacaaccccgccaagacgtgttgaactggttgaacgaagagaagattatccagcgcctagtcgagatcgtgcacccttcacaggaagaagacaggcacagtaacgcgtcccaaagcctctgcgagattgtccgcctgtctcgcgaccaaatgttgcaaatccagaatagtacagagcccgatccccttctcgctactttagaaaagcaggaaattattgagcaactgctgtcgaatatttttcacaaagaaaaaaacgagagcgccattgtaagcgctatccagatcctgttgacactgctagaaacccgcagacctacctttgagggacacatcgagatctgtcctccaggaatgagccacagcgcatgctctgtgaataagtcagtgctagaggcgatcaggggacgattgggctcattccatgaactgttgttggagcctccaaagaaaagcgtaatgaaaaccacgtggggcgtactggaccccccggttggcaataccagactgaacgtgatccgcttaatttcaagtctgctgcagaccaatacttcttctatcaacggggacctcatggagctgaacagtatcggcgtgatattgaacatgttcttcaagtatacatggaacaatttccttcatacgcaggtggagatatgtatcgcactcattctggcgagccctttcgagaataccgaaaacgcaaccattacagaccaagatagtacaggtgataacctcctactgaagcacctgttccagaagtgccagctcattgagcgaatcctcgaggcctgggaaatgaacgagaagaaacaggcagaaggagggcgccggcacggctacatgggccacctgaccaggatcgcaaactgtatcgtccattcaacggacaagggaccaaactctgccctcgtccagcagctgatcaaggacttgccagatgaggtgcgggagcgctgggagaccttttgcacgagcagtttgggggagaccaacaaacgtaataccgtagatcttgtgactacttgccacatccactcatcttcagatgatgagatcgactttaaagaaaccggcttctcccaggactcatccctacagcaggccttcagcgactatcagatgcagcagatgacttccaattttatcgaccagtttgggttcaacgatgagaaattcgctgatcaggacgacatcggaaacgtgtcttttgatcgggttagtgatatcaattttaccctcaacactaatgagtccggtaacattgctctctttgaagcgtgctgcaaggagcgcattcagcaattcgatgacggagggagcgatgaggaagatatctgggaagagaagcacatcgcatttacaccagagagccagcggagatctagcagtggctccactgactccgaagaaagcacagatagcgaggaagaggatggagccaagcaggacctgttcgagccttcttcagcgaacaccgaggataaaatggaggtcgatctctcagaacccccaaactggtctgccaacttcgatgtccccatggagactacacatggcgctcccttagactcagtcggttcggacgtgtggagcactgaagaacccatgcccacaaaggaaactggctgggcgtccttctccgagttcacctcgtccctctcaactaaggactccctgcgctcaaatagccctgtcgaaatggaaacaagtacagagccaatggaccctctgacgccaagcgcagctgccctcgccgtccagcccgaggctgccggttctgtggcaatggaggcttcatccgatggggaggaagatgcggaatcaaccgataaagtgaccgagaccgtcatgaatggaggaatgaaggaaactttgtctcttaccgtcgacgctaagacagagacagccgtctttaagtctgaggaaggcaaactgagcactagtcaggatgctgcatgcaaagatgctgaggagtgccccgagacagcagaggctaagtgtgcagccccacgtcccccctctagctcccctgagcaacggaccggacaaccatccgcccctggcgacacctccgtgaatggtcccgtgtag

SEQ ID NO: 62351 - DNA, 2622 bp, Artificial Sequence
  derived and/or modified sequence
atgttctggaagtttgatctccactcttcaagtcacatcgataccctgctcgaacgggaagacgtgacgctcaaagagctcatggatgaggaggatgtgctgcaagagtgtaaggcacagaacagaaaacttatcgagttccttctgaaggccgaatgccttgaagacctagtcagctttattatcgaggagccaccccaggacatggacgagaaaattagatacaaatatcccaatatttcctgcgaactcctgacatcagacgtgtcccagatgaacgaccgtctgggcgaggacgaaagcctgttaatgaaactgtacagtttcctattaaacgactctccgctgaatcctctcttggcttctttcttctctaaggtgttgtctatccttattagccgtaagcccgaacagatagttgattttctgaagaaaaagcacgactttgttgacctgataattaagcatatcggcacatcagcaattatggatcttctcttgaggctcctgacttgtatcgaaccccctcaaccgcgtcaggacgtgttaaattggcttaatgaggaaaagatcatccagcgcctggtcgaaatcgtacatccgtctcaggaagaagatcgacattctaacgcttcccaaagcctatgcgagatcgtcagactttcgagggaccagatgcttcagattcaaaacagtactgagcctgaccccctgctggcgacgctggaaaagcaggagatcattgaacagctgttgtcgaatattttccacaaagaaaagaatgagagtgcaattgtcagcgccatccagatcctcctgactctgttagagacccggcgtccaacatttgagggccacattgagatatgtcctcctggaatgtcacatagtgcctgctcagttaataagagtgtgctggaggccatcagaggccgactgggttcatttcatgaactgcttctggagcctcctaagaagagtgtgatgaaaactacctggggcgtccttgatccacctgtgggcaacacgcgactaaacgtcattcggcttattagttccctgttgcagacaaataccagctcgatcaacggcgaccttatggagctgaactccatcggggtcattctgaatatgttcttcaaatacacctggaacaacttcctacatacccaggtggaaatttgtattgccttgatcctggcatctccctttgaaaatacggagaacgccaccattacagatcaagattcgactggcgacaatctcttgctcaaacacttgtttcagaaatgccaactcatcgagaggattctggaggcctgggagatgaatgaaaagaagcaggccgaggggggtcgacgccatggttatatgggccacctaactaggattgctaactgtatagttcatagtactgacaaggggccaaacagtgccctagtgcagcagctgataaaggaccttcccgatgaagtgagagaacggtgggaaaccttctgtaccagtagcctgggggagacgaataaacgcaacaccgtggacttagttacaacctgtcatattcacagctcatccgacgatgaaatagattttaaagagactgggttctcgcaagattcctcgttacaacaggcattcagcgactaccagatgcaacagatgacgtctaattttattgaccagttcggttttaatgatgagaaattcgccgaccaagatgacatcggtaatgttagttttgaccgtgtctccgacattaattttaccctgaatacaaacgaatctgggaatatagccctgtttgaggcctgttgcaaggaacgtatccagcagtttgacgacggtggtagcgatgaagaggacatttgggaggagaaacatattgcttttaccccggagagccagaggcggtcaagctctggctcgacagattctgaggagagtaccgatagtgaggaagaagatggggcaaaacaggacttgttcgagccatccagcgccaacacagaagacaagatggaagtagacctgtccgagccgccaaattggtctgccaattttgatgtacctatggaaactacccatggcgcacctcttgatagcgttggcagtgatgtttggtccaccgaggaacccatgcccaccaaggaaacgggctgggcaagcttttccgaattcacttcttctctctccaccaaggactcccttaggtctaattctcccgtggagatggagacctccacagagccaatggatccattgacaccgagcgccgcagcactggccgttcaaccagaagcagccggaagtgtcgccatggaagcttcatccgatggggaagaggacgctgagagtacagacaaagtgactgagactgtgatgaacggaggcatgaaggagactctctcgttgacagtggacgctaaaactgaaaccgcggtcttcaagtcggaagagggcaaactgtccacgagccaagatgcggcttgcaaggatgccgaggagtgtcccgagacagcagaagccaagtgtgctgcccctagaccacctagttcgtcgcccgagcagcggacagggcagccctcagccccaggcgatacttccgtgaacggcccagtctag

SEQ ID NO: 62352 - protein, 867 aa, Artificial Sequence
  derived and/or modified sequence
MFWKFDLHSSSHIDTLLEREDVTLKELMDEEDVLQECKAQNRKLIEFLLKAECLEDLVSFIIEEPPQDMDEKIRYKYPNISCELLTSDVSQMNDRLGEDESLLMKLYSFLLNDSPLNPLLASFFSKVLSILISRKPEQIVDFLKKKHDFVDLIIKHIGTSAIMDLLLRLLTCIEPPQPRQDVLNWLNEEKIIQRLVEIVHPSQEEDRHSNASQSLCEIVRLSRDQMLQIQNSTEPDPLLATLEKQEIIEQLLSNIFHKEKNESAIVSAIQILLTLLETRRPTFEGHIEICPPGMSHSACSVNKSVLEAIRGRLGSFHELLLEPPKKSVMKTTWGVLDPPVGNTRLNVIRLISSLLQTNTSSINGDLMELNSIGVILNMFFKYTWNNFLHTQVEICIALILASPFENTENATITDQDSTGDNLLLKHLFQKCQLIERILEAWEMNEKKQAEGGRRHGYMGHLTRIANCIVHSTDKGPNSALVQQLIKDLPDEVRERWETFCTSSLGETNKRNTVDLVTTCHIHSSSDDEIDFKETGFSQDSSLQQMQQMTSNFIDQFGFNDEKFADQDDIGNVSFDRVSDINFTLNTNESGNIALFEACCKERIQQFDDGGSDEEDIWEEKHIAFTPESQRRSSSGSTDSEESTDSEEEDGAKQDLFEPSSANTEDKMEVDLSEPPNWSANFDVPMETTHGAPLDSVGSDVWSTEEPMPTKETGWASFSEFTSSLSTKDSLRSNSPVEMETSTEPMDPLTPSAAALAVQPEAAGSVAMEASSDGEEDAESTDKVTETVMNGGMKETLSLTVDAKTETAVFKSEEGKLSTSQDAACKDAEECPETAEAKCAAPRPPSSSPEQRTGQPSAPGDTSVNGPV

SEQ ID NO: 62353 - DNA, 2604 bp, Artificial Sequence
  derived and/or modified sequence
atgttctggaagttcgacctgcacagcagcagccacatcgacaccctgctggagagagaggacgtgaccctgaaggagctgatggacgaggaggacgtgctgcaggagtgcaaggcccagaacagaaagctgatcgagttcctgctgaaggccgagtgcctggaggacctggtgagcttcatcatcgaggagcccccccaggacatggacgagaagatcagatacaagtaccccaacatcagctgcgagctgctgaccagcgacgtgagccagatgaacgacagactgggcgaggacgagagcctgctgatgaagctgtacagcttcctgctgaacgacagccccctgaaccccctgctggccagcttcttcagcaaggtgctgagcatcctgatcagcagaaagcccgagcagatcgtggacttcctgaagaagaagcacgacttcgtggacctgatcatcaagcacatcggcaccagcgccatcatggacctgctgctgagactgctgacctgcatcgagcccccccagcccagacaggacgtgctgaactggctgaacgaggagaagatcatccagagactggtggagatcgtgcaccccagccaggaggaggacagacacagcaacgccagccagagcctgtgcgagatcgtgagactgagcagagaccagatgctgcagatccagaacagcaccgagcccgaccccctgctggccaccctggagaagcaggagatcatcgagcagctgctgagcaacatcttccacaaggagaagaacgagagcgccatcgtgagcgccatccagatcctgctgaccctgctggagaccagaagacccaccttcgagggccacatcgagatctgcccccccggcatgagccacagcgcctgcagcgtgaacaagagcgtgctggaggccatcagaggcagactgggcagcttccacgagctgctgctggagccccccaagaagagcgtgatgaagaccacctggggcgtgctggacccccccgtgggcaacaccagactgaacgtgatcagactgatcagcagcctgctgcagaccaacaccagcagcatcaacggcgacctgatggagctgaacagcatcggcgtgatcctgaacatgttcttcaagtacacctggaacaacttcctgcacacccaggtggagatctgcatcgccctgatcctggccagccccttcgagaacaccgagaacgccaccatcaccgaccaggacagcaccggcgacaacctgctgctgaagcacctgttccagaagtgccagctgatcgagagaatcctggaggcctgggagatgaacgagaagaagcaggccgagggcggcagaagacacggctacatgggccacctgaccagaatcgccaactgcatcgtgcacagcaccgacaagggccccaacagcgccctggtgcagcagctgatcaaggacctgcccgacgaggtgagagagagatgggagaccttctgcaccagcagcctgggcgagaccaacaagagaaacaccgtggacctggtgaccacctgccacatccacagcagcagcgacgacgagatcgacttcaaggagaccggcttcagccaggacagcagcctgcagcagatgcagcagatgaccagcaacttcatcgaccagttcggcttcaacgacgagaagttcgccgaccaggacgacatcggcaacgtgagcttcgacagagtgagcgacatcaacttcaccctgaacaccaacgagagcggcaacatcgccctgttcgaggcctgctgcaaggagagaatccagcagttcgacgacggcggcagcgacgaggaggacatctgggaggagaagcacatcgccttcacccccgagagccagagaagaagcagcagcggcagcaccgacagcgaggagagcaccgacagcgaggaggaggacggcgccaagcaggacctgttcgagcccagcagcgccaacaccgaggacaagatggaggtggacctgagcgagccccccaactggagcgccaacttcgacgtgcccatggagaccacccacggcgcccccctggacagcgtgggcagcgacgtgtggagcaccgaggagcccatgcccaccaaggagaccggctgggccagcttcagcgagttcaccagcagcctgagcaccaaggacagcctgagaagcaacagccccgtggagatggagaccagcaccgagcccatggaccccctgacccccagcgccgccgccctggccgtgcagcccgaggccgccggcagcgtggccatggaggccagcagcgacggcgaggaggacgccgagagcaccgacaaggtgaccgagaccgtgatgaacggcggcatgaaggagaccctgagcctgaccgtggacgccaagaccgagaccgccgtgttcaagagcgaggagggcaagctgagcaccagccaggacgccgcctgcaaggacgccgaggagtgccccgagaccgccgaggccaagtgcgccgcccccagaccccccagcagcagccccgagcagagaaccggccagcccagcgcccccggcgacaccagcgtgaacggccccgtgtag

SEQ ID NO: 62354 - DNA, 2604 bp, Artificial Sequence
  derived and/or modified sequence
atgttttggaaattcgacctacattcttccagtcacatcgatactttactcgagcgcgaggacgtgacgctcaaagagctgatggacgaggaagacgttctgcaggagtgtaaagcacaaaaccggaagctgatcgagttcctgctgaaggcagaatgtctcgaggacctggtttctttcattatcgaagaaccaccacaggacatggacgaaaagattcgttacaaataccccaatatcagttgtgaactgttgacctcagacgtcagccagatgaacgacaggctgggtgaggacgaaagcctcctaatgaaactgtactcgttcctccttaatgatagccccctcaatccacttctagcctcctttttctctaaagtcctaagcatactcattagtcggaaaccggagcagatcgtggattttttgaaaaaaaagcatgacttcgtggatctgatcatcaagcatattggcacttcagcgatcatggatcttctgctgcgattactgacctgtatcgaacccccccaaccacggcaggatgtcctgaattggctcaacgaggagaagatcattcaacgcttggtcgaaattgtgcacccgtcacaagaggaagacagacacagcaacgccagccaaagcctctgcgagatagtgcggctcagtagggaccagatgctgcagatccagaatagcactgagccagacccactcctcgccacgcttgagaaacaggagatcatagagcaactactctctaatatctttcacaaagaaaaaaacgagagcgccatagtctctgccatccagatcttgctgacgctgctggaaactcggagacccaccttcgaaggccacattgagatttgcccccctggaatgtcacactctgcgtgctccgttaacaagtctgtactggaggcaattagagggcgactggggagctttcatgagctcctgctggaaccccccaaaaaaagtgtcatgaagacaacctggggagtgctggacccgccggtaggcaacacgcgtctgaatgtcatacggctgatcagtagtctgctgcagacaaataccagttcaattaacggagacttgatggagttaaactccatcggtgtcatcctcaacatgttttttaaatatacatggaacaatttcctgcacactcaggttgaaatctgtatagcactaattcttgcttcaccatttgaaaatacagagaacgcaaccatcaccgaccaggatagtactggcgacaacctcctgctgaaacatctcttccagaagtgtcagcttattgagcggatcctggaggcctgggagatgaatgaaaagaagcaggccgaggggggtcgcaggcatggttatatggggcatctaactagaattgccaattgcattgttcattctaccgataagggtcccaatagcgctctcgtgcaacagttgataaaagatcttccggatgaagtgcgtgagagatgggagaccttttgtacgtccagcctgggcgagacgaacaagcgaaatactgtcgacctggttaccacctgtcatattcactcatctagcgacgatgaaattgactttaaagaaactggtttttcccaggactctagcctgcagcagatgcagcagatgacttccaattttattgatcagtttggctttaatgatgaaaagtttgcagatcaggacgatatcggaaacgtcagcttcgatcgtgtgagtgacatcaacttcaccctcaatactaatgagagtggcaacattgctctcttcgaagcgtgctgtaaggagaggatacagcagttcgacgatggaggtagcgacgaagaagacatctgggaagaaaagcacatcgcttttacccccgagtcacaaaggagatctagttctggtagcacagactcagaagagagcacggattccgaagaggaagacggtgctaagcaagatctgtttgaaccgtcaagcgccaacacggaggataaaatggaagtagacttatcggagccgcctaactggtcagccaatttcgatgttcccatggagaccactcacggggctcctctcgattctgtaggctccgatgtatggagcaccgaggaacccatgccgacaaaggagacaggttgggctagcttttccgaatttaccagcagtctgagcactaaagacagtctgcggagcaattctcctgttgagatggaaacaagcactgaacctatggacccactgacgccaagcgctgctgcattggcagttcaacccgaggccgcaggcagtgttgctatggaggccagcagtgacggagaggaggacgccgaatcgaccgacaaggtgactgagactgtgatgaacggggggatgaaggaaacacttagcctcaccgtggacgctaaaaccgagacggccgtcttcaagtcggaggagggtaagctttccaccagtcaggacgccgcttgcaaggatgccgaggagtgtcctgaaacagcggaggctaagtgcgcggcacctaggccgccaagcagcagcccagagcagcggactggccagccaagtgcccccggtgatacatccgtgaacggtccagtgtag

SEQ ID NO: 62355 - DNA, 2604 bp, Artificial Sequence
  derived and/or modified sequence
atgttctggaagtttgacctgcacagcagcagccacatcgacaccctgctggagcgggaggatgtgaccctgaaggagctgatggatgaagaagatgtgctgcaggagtgcaaggcccagaacaggaagctgattgagttcctgctgaaggccgagtgcctggaggacctggtgtccttcatcatcgaggagcccccccaggacatggatgagaagatccgctacaagtaccccaacatcagctgtgagctgctgaccagtgatgtgtcccagatgaatgaccggctgggggaggatgagagcctgctgatgaagctgtacagcttcctgctgaatgacagccccctgaaccccctgctggccagcttcttcagcaaggtgctgagcatcctgatcagcaggaagccagagcagatcgtggacttcctgaagaagaagcatgactttgtggacctgatcatcaagcacatcggcaccagcgccatcatggacctgctgctgcggctgctgacctgcatcgagcccccccagccccggcaggatgtgctgaactggctgaatgaggagaagatcatccagaggctggtggagatcgtgcaccccagccaggaggaggacagacacagcaatgccagccagagcctgtgtgagatcgtgcggctgagccgggaccagatgctgcagatccagaacagcacagagccagaccccctgctggccaccctggagaagcaggagatcatcgagcagctgctgagcaacatcttccacaaggagaagaatgaaagtgccatcgtgtctgccatccagatcctgctgaccctgctggagacccggcggcccacctttgagggccacatcgagatctgccccccaggcatgagccacagcgcctgcagcgtgaacaagtctgtgctggaggccatccggggccgcctgggcagcttccacgagctgctgctggagccccccaagaagtctgtgatgaagaccacctggggcgtgctggacccccctgtgggcaacacccggctgaatgtcatccgcctcatcagcagcctgctgcagaccaacaccagcagcatcaatggagacctgatggagctgaacagcattggagtcatcctgaacatgttcttcaagtacacctggaacaacttcctgcacacccaggtggagatctgcatcgccctgatcctggccagcccctttgaaaatacagaaaatgccaccatcacagaccaggacagcactggagacaacctgctgctgaagcacctgttccagaagtgccagctgattgaaagaatcctggaggcctgggagatgaatgagaagaagcaggccgagggcggcagaagacatggctacatgggccacctgacccgcatcgccaactgcatcgtgcacagcacagacaagggccccaacagcgccctggtgcagcagctgatcaaggacctgcctgatgaggtgcgggagcgctgggagaccttctgcaccagcagcctgggggagaccaacaagaggaacacagtggacctggtgaccacctgccacatccacagcagcagtgatgatgaaattgacttcaaggagaccggcttcagccaggacagcagcctgcagcagatgcagcagatgaccagcaacttcatcgaccagtttggcttcaatgatgagaagtttgctgaccaggatgacattggaaatgtgtcctttgacagagtgtctgacatcaacttcaccctgaacaccaatgaaagtggcaacatcgccctgtttgaggcctgctgcaaggagcgcatccagcagtttgatgatggcggcagtgatgaggaggacatctgggaggagaagcacatcgccttcaccccagagagccagaggaggagcagcagcggcagcacagattctgaggagagcacagattctgaggaggaggatggagccaagcaggacctgtttgagcccagcagcgccaacacagaggacaagatggaggtggacctgtctgagccccccaactggagcgccaactttgatgtgcccatggagaccacccatggagcccccctggacagcgtgggcagtgatgtgtggagcacagaggagcccatgcccaccaaggagaccggctgggccagcttcagcgagttcaccagcagcctgagcaccaaggacagcctgcggagcaacagccctgtggagatggagaccagcacagagcccatggaccccctgaccccatctgctgctgccctggccgtgcagcctgaggccgccggctctgtggccatggaggccagcagtgatggagaagaagatgctgagagcacagacaaggtgacagagaccgtgatgaatggaggcatgaaggagaccctgagcctgactgtggatgccaagacagaaacagctgtgttcaagtctgaggagggcaagctgagcaccagccaggatgctgcctgcaaggatgctgaagaatgtcctgagacagctgaggccaagtgtgccgcccccaggcctcccagcagcagccctgagcagaggacaggccagcccagcgcccctggggacacctctgtgaatggacctgtgtag

SEQ ID NO: 62356 - DNA, 2604 bp, Artificial Sequence
  derived and/or modified sequence
atgttctggaagttcgacctgcacagcagcagccacatcgacaccctgttggaaagagaagatgtgaccttgaaggagttgatggatgaggaggatgttctccaagaatgcaaggcacagaatcgaaaactgatcgagttccttctgaaggcagaatgcctggaagatttagttagctttatcatcgaagagcctcctcaggacatggacgagaaaattcgctacaaatatcctaatatttcgtgcgagcttctgaccagcgatgtgtcccagatgaacgatcggctgggcgaggacgaaagcctactaatgaagctctacagtttcctcctgaatgatagtccattaaaccctctgttggccagcttctttagcaaggttctgtcaatcttaatttcccgtaaacccgagcagattgtagacttcttaaagaaaaaacatgacttcgttgacctgatcatcaaacatatcgggacttcagcaatcatggacttgctgttgagattgttaacctgtatagagcccccacaaccccgccaggacgtccttaattggctcaacgaagagaagatcatacaaagactggtagaaatcgtccacccatcccaagaagaggacagacattccaacgcttcccagtcgctctgtgagattgtgcgtttgtcgcgggatcaaatgctgcagatccagaatagtacagagcccgaccctctgctggcaacattagaaaagcaggagatcatagaacagctactgtcaaatatctttcacaaggagaaaaatgagagcgcaatcgtgagtgccattcagatactccttacattgcttgagacacgtcgccctactttcgaaggccacatcgagatatgtccgccaggaatgagccactctgcttgcagtgtaaacaagtccgtgctggaggctattcggggacgcctcggctcatttcacgaactccttctagagcctcccaagaagagcgtgatgaagacaacctggggtgtgctggaccccccagtgggtaacactagactaaacgtgatccgccttatctcatcactcctgcagaccaatacttcatccatcaacggggacttgatggagctgaactccatcggagtgattttgaacatgttcttcaagtatacatggaataactttcttcacacccaggtagagatctgtattgctcttatcctggctagtccgttcgaaaacacggagaacgcaactattacggatcaggattcaacgggagataatctccttcttaaacacctctttcaaaaatgtcagctgatcgagagaatcttggaggcttgggagatgaacgagaagaagcaggctgagggcggtcgaagacatgggtacatgggacatctgacgcgtatcgctaattgcattgttcattccacagataagggtccaaactctgcattggtccagcagctgataaaggacctgcccgatgaggtaagggagcggtgggagacattctgtactagcagcctcggggagactaacaagcggaataccgtggacctagttaccacttgtcatattcactctagctcagatgacgagatagatttcaaggagacaggtttctcacaggactcctcacttcaacaaatgcaacagatgacttccaatttcatagatcagtttgggtttaatgatgagaaattcgctgaccaggacgatatcgggaatgtttcattcgatcgcgttagtgacattaacttcaccctcaacaccaacgagtccgggaatatagctctgtttgaggcttgctgcaaggaacggatccaacagttcgatgatggagggagcgatgaagaagatatttgggaggaaaagcacatcgctttcacgcccgaatcccagcgtcgttcctcctcaggatctacagattctgaggagtcaacagacagcgaggaggaagacggggccaagcaggacctatttgaaccttcatctgccaatacagaagataaaatggaggtggacttatccgagccccccaattggagtgcaaactttgatgtacctatggagaccacccacggagccccactcgattctgtggggtccgatgtgtggagcactgaggaaccaatgccaaccaaggagacaggatgggcttcgttctctgaattcacttcttcactgagtactaaggacagcctgcgcagcaacagtccagtggagatggagacctccacagagccaatggaccctctgacaccatcagctgccgcactggccgtccaacccgaagcggctggcagcgtggccatggaagcctccagcgacggtgaggaggacgccgaatcgacagacaaagtgaccgagacagtcatgaatggcgggatgaaggagactttgagcctgaccgtcgacgccaaaactgagaccgccgtgttcaagagcgaagaaggaaagcttagtacttctcaggacgcagcatgtaaggatgccgaagagtgtccagagactgctgaggcaaaatgcgccgccccccgcccaccaagttcctctccagaacagcggaccggccaaccatcagcacctggtgatacctccgtcaatggtcctgtttag

SEQ ID NO: 62357 - DNA, 2604 bp, Artificial Sequence
  derived and/or modified sequence
atgttttggaagtttgacctgcattcgtcaagtcatatagatactctcctcgaaagagaagatgtcacactcaaggagcttatggacgaggaggacgtgctacaagagtgtaaagcacagaaccgaaagctaattgaattcctgctaaaggccgagtgcctcgaagacctcgtgtcctttattatcgaagagccccctcaagacatggatgaaaagattagatacaagtaccctaatatctcttgtgagctgctgacatctgatgtgtcgcaaatgaacgaccgtctgggggaggatgaatcactgctgatgaagttgtattcttttcttttgaatgacagccccctgaatcccctcctcgcgtcttttttcagtaaggtgctttccatactcatttctcgcaagcctgagcagatcgtcgactttctcaagaagaaacacgattttgtcgacttaataataaaacatattggcaccagcgctattatggacttactgctgagattgctgacctgtattgagcctccccagccgcgacaggacgtactgaactggctgaatgaagagaagattattcagagactcgtcgagattgtccacccatcacaggaagaggatagacacagtaatgccagccagtccctgtgcgagatcgtgagactcagccgcgatcagatgctgcagattcagaattctacagaacccgatccccttctagccactctcgagaaacaagagattattgaacagctgctaagcaatattttccacaaggaaaagaatgaatcagccattgtctctgctatacagattctgttaacgcttctcgagaccaggcgcccaacatttgagggccacattgagatctgccctcctggcatgtcacacagtgcctgttctgtcaacaagagtgtcctggaagccatccgcggaagacttggtagttttcacgagctgctgttagagcctcccaaaaagtccgtaatgaaaactacatggggcgtgctcgacccccctgtggggaatacccggctgaatgttataaggctcatatccagcctgctgcagaccaataccagttcgattaacggcgacctcatggagttgaacagtattggggtgatcctgaacatgttttttaagtatacttggaataattttctacacacacaggtggagatctgtattgccttaattctcgccagccccttcgaaaacaccgaaaatgcgacaatcacagatcaagattctaccggggacaacttgctgctcaagcatcttttccaaaagtgccagcttatagagcggatcctggaggcatgggagatgaacgaaaaaaagcaggccgaaggcggacgcagacatgggtatatgggccacctgacccggattgctaattgcatcgttcactccacagacaagggacccaactctgcactggtgcagcaattgattaaggatctgcccgatgaagtcagggaacgatgggaaacattttgcaccagctctcttggggagacaaacaagcgaaacactgttgatctggtcaccacatgtcacattcatagttcttctgacgatgaaatcgatttcaaagagacgggcttttctcaggactcctccctccagcagatgcagcagatgaccagtaacttcatagaccaatttggctttaatgacgaaaaatttgcagaccaggatgatatcgggaatgttagtttcgatagagtgagcgacatcaacttcacgcttaacacaaacgagtctggcaatatcgcattgttcgaagcatgttgtaaagagcggatccagcagtttgatgatggcggaagcgacgaggaggatatttgggaggaaaaacacatcgccttcactcccgagtcccagagaaggtcgtcatctggttcgaccgactccgaagaatctaccgatagcgaagaagaggatggcgcaaagcaggacctattcgaaccttcttccgccaatactgaagataagatggaagttgatctaagcgaaccccctaactggtctgccaactttgatgtgccaatggaaacgacccacggggctcctctcgactccgtgggatctgatgtgtggagcacagaagagcctatgcctaccaaagaaacagggtgggcctccttctccgagttcacttcctcactgtccaccaaggattccttgcgctccaattcccctgtggaaatggagaccagtactgagcctatggaccccctgacaccctctgccgctgccctggcagtacagccagaggcggcaggtagtgtggcgatggaagctagtagcgacggggaggaggacgctgaatccaccgacaaagtcaccgagactgttatgaacggtggtatgaaggagactctcagccttactgttgatgccaaaactgagactgctgtgttcaaaagcgaggagggaaaattgagcacctcacaggacgctgcttgcaaagatgccgaggaatgccccgagaccgctgaggctaaatgcgccgctcctcgacctcccagttcgtctcccgagcagagaaccgggcagcctagcgccccaggtgatacaagtgtgaatgggcctgtatag

SEQ ID NO: 62358 - DNA, 4292 bp, Artificial Sequence
  derived and/or modified sequence
cgcttcgctgatggtgtcggtgagcgcgtttcccgcctgagcgcaactagcggcgggtcgtgggcacctccaggagagcttgtttcatatccatatcccactgtattcctgctaatctgctaatgcagtaaattggaggaaaactgttaccaggataacctgtaatgggcaaggagccacaaagaagaaaacatttcttttaatttttaaacttggtttgaaagaccagcatgttttggaaatttgatcttcactcatcatcccacatagacacacttctagaaagagaagatgtaacactgaaggagttaatggatgaggaagatgttttacaggaatgtaaagctcagaaccgcaaacttatagagtttctgttaaaagcagaatgtctcgaagatttagtctcattcattatagaagaaccacctcaagacatggatgaaaagatcagatacaagtatccaaatatatcttgtgagttgctcacttctgatgtctcccagatgaatgatagactgggagaagatgaatccttgctaatgaaattatatagcttcctcctaaacgattcccctttgaatccactacttgccagtttcttcagcaaggtgctaagtattcttatcagcagaaaaccagaacagattgtggatttcttaaagaagaagcatgattttgtagaccttattataaagcacataggaacttctgctatcatggatttgttgctcaggctcctgacgtgtatcgaacctccacagcccaggcaagatgtgctgaattggttaaatgaggagaaaattatccagaggcttgtggaaatagttcatccatcgcaagaagaagatcgacattcaaatgcatcacaatcactttgtgaaattgttcgcctgagcagagaccagatgttacaaattcagaacagtacagagcccgaccccctgcttgccactctagaaaagcaagaaattatagagcagcttctatcaaatattttccacaaggagaaaaatgagtcagccatagtcagtgcaatccagatattgctgactttacttgagacacgacgaccaacatttgaaggccatatagagatctgcccaccaggcatgagccattcagcttgttcagtaaacaagagtgttctagaagccatcagaggaagacttggatcttttcatgaactcctgctggagccacccaagaaaagtgtgatgaagaccacatggggtgtgctggatcctcctgtggggaatacccggttgaatgtcattaggttgatatccagcctgcttcaaaccaataccagcagtataaatggggaccttatggagctgaatagcattggagtcatattgaacatgttcttcaagtatacatggaataactttttgcatacacaagtggaaatttgtattgcactgattcttgcaagtccttttgaaaacacagaaaatgccacaattaccgatcaagactccactggtgataatttgttattaaaacatcttttccaaaaatgtcaattaatagaacgaatacttgaagcctgggaaatgaatgagaagaaacaggctgagggaggaagacggcatggttacatgggacacctaacgaggatagctaactgtatcgtgcacagcactgacaagggccccaacagtgcattagtgcagcagcttatcaaagatcttcccgacgaagtcagggaacgatgggagacgttctgcacaagctccttaggagaaactaacaagaggaacacggtagatctagttacaacctgccatattcattcatccagtgatgatgaaattgactttaaagaaacgggtttctcacaggattcttctttgcagcaaatgcaacaaatgacgtccaattttattgaccagtttggcttcaacgatgagaagtttgcagatcaagatgacattggcaatgtttcttttgatcgagtatcagacatcaactttactctcaatacaaatgaaagtggaaatattgccttgtttgaagcatgttgtaaggaaagaatacaacagtttgatgatggtggctctgatgaggaagatatatgggaggaaaagcacatcgcattcacaccagaatcccaaagacgatccagctcggggagtacagacagtgaggaaagtacagactctgaagaagaagatggagcaaagcaagacttgtttgaacccagcagtgccaacacggaggataaaatggaggtggacctgagtgaaccacccaactggtcagctaactttgatgtcccaatggaaacaacccacggtgctccattggattctgtgggatctgatgtctggagcacagaggagccgatgccaactaaagagacgggctgggcttctttttcagagttcacgtcttccctgagcacaaaagattctttaaggagtaattctccagtggaaatggaaaccagcactgaacccatggaccctctgactcccagtgcggctgccctggcagtgcagccagaagcggcaggcagtgtggccatggaagccagctctgacggagaggaggatgcagaaagtacagacaaggtaactgagacagtgatgaatggcggcatgaaggaaacgctcagcctcactgtagatgccaagacagagactgcggtcttcaaaagtgaggaagggaaactgtctacctctcaagatgctgcttgtaaagacgcagaggagtgtcccgagactgcagaggcgaagtgcgcggcgcccaggcctcccagcagcagtcccgagcagaggactggccaaccaagcgcaccaggtgacacttcagtgaatggccctgtatgacgggtgacgtctgctgctgctgactgaggactgcagaccgccaccactcaggggctctggaggggtcagctggagcccaccaagctgtcactgctgcactcactctgcaagggatcaggaccagcaacctttatattctagattctaagacattgtacagagaaattcagaagtgtaaaaatattgcacattgacaaataccaagaatttttgcgtatgtttatattgtattgttctaaataatgggtagcctgtgaaataagatcttgccacccatgtaataatagtagtaatactatagttaaaatggctgtaagaatagttttataaaagtgaatacacagatctattgtatttgaaacataactttgacaattattagtgtgaccaaagtattaggcggttttcatacatttttcaccttgtacaaaattatgaattcatttttcctccaggccgacaaggagttgtagaatgaaaatgccctctaagtgttattttggttgttctaacttacaaaagtgattttgaataagaaatatttggtgttctttttataaccagtttttgattggtaattgttttctgtattgtttaaaacggatcaaaaatgtaagtctattggtagagattaagtaaagtatttattgctacatcatagttgataaattgatgttatcgtaaagccatatgttctgttcaagtcttgtttgcttgaaatgattattcctacaagtgaaacactagactatttggagtgtatatggcttgtgttttgggattttttttttttttttttggcttttgtttttgtttgtttttttgtttcatttggtagttcatctgccttttaacccattcaccaaaatttaccttgttaacaagcatcaccaatgaacatttcagagcaatctgcatatttaacagacctaaaataaatcctattaggcaagtcagttgaaaatgctcgtgctgctaatggaattagagtgcgttcattttacaggctagtattttaaaagtagaaatcaaaatctggcaccgaagcatgctaattgtttactgtaccttgtgaggttttcactcataaatttaaaccagtgtatttttttagaactggtttgtgtatatatatagtgattatggatactaattcaatgtaatttataattttctatgtcaatacaaaaatacatcacagccttctcaaacagctcaagcaatatattgtatattgccatatcgtctggtgaaagggttaaattacttcacctcttgcacttttagatgcaaatcagtttttcatttctgtaatagaaaattattcacgtatttttacatcatttgtttttcctgaccagtatttaaaaccaaaaggatattctgaaaaatggccaacaatttttttagaagtagcatcccaagcagcgtgcctaaacattacattgcatatggaaa

SEQ ID NO: 62359 - protein, 844 aa, Artificial Sequence
  derived and/or modified sequence
MFWKFDLHSSSHIDTLLEREDVTLKELMDEEDVLQECKAQNRKLIEFLLKAECLEDLVSFIIEEPPQDMDEKIRYKYPNISCELLTSDVSQMNDRLGEDESLLMKLYSFLLNDSPLNPLLASFFSKVLSILISRKPEQIVDFLKKKHDFVDLIIKHIGTSAIMDLLLRLLTCIEPPQPRQDVLNWLNEEKIIQRLVEIVHPSQEEDRHSNASQSLCEIVRLSRDQMLQIQNSTEPDPLLATLEKQEIIEQLLSNIFHKEKNESAIVSAIQILLTLLETRRPTFEGHIEICPPGMSHSACSVNKSVLEAIRGRLGSFHELLLEPPKKSVMKTTWGVLDPPVGNTRLNVIRLISSLLQTNTSSINGDLMELNSIGVILNMFFKYTWNNFLHTQVEICIALILASPFENTENATITDQDSTGDNLLLKHLFQKCQLIERILEAWEMNEKKQAEGGRRHGYMGHLTRIANCIVHSTDKGPNSALVQQLIKDLPDEVRERWETFCTSSLGETNKRNTVDLAFSDYQMQQMTSNFIDQFGFNDEKFADQDDIGNVSFDRVSDINFTLNTNESGNIALFEACCKERIQQFDDGGSDEEDIWEEKHIAFTPESQRRSSSGSTDSEESTDSEEEDGAKQDLFEPSSANTEDKMEVDLSEPPNWSANFDVPMETTHGAPLDSVGSDVWSTEEPMPTKETGWASFSEFTSSLSTKDSLRSNSPVEMETSTEPMDPLTPSAAALAVQPEAAGSVAMEASSDGEEDAESTDKVTETVMNGGMKETLSLTVDAKTETAVFKSEEGKLSTSQDAACKDAEECPETAEAKCAAPRPPSSSPEQRTGQPSAPGDTSVNGPV

SEQ ID NO: 62360 - DNA, 2535 bp, Artificial Sequence
  derived and/or modified sequence
atgttctggaagttcgacctgcacagcagcagccacatcgacaccctgctggagagagaggacgtgaccctgaaggagctgatggacgaggaggacgtgctgcaggagtgcaaggcccagaacagaaagctgatcgagttcctgctgaaggccgagtgcctggaggacctggtgagcttcatcatcgaggagcccccccaggacatggacgagaagatcagatacaagtaccccaacatcagctgcgagctgctgaccagcgacgtgagccagatgaacgacagactgggcgaggacgagagcctgctgatgaagctgtacagcttcctgctgaacgacagccccctgaaccccctgctggccagcttcttcagcaaggtgctgagcatcctgatcagcagaaagcccgagcagatcgtggacttcctgaagaagaagcacgacttcgtggacctgatcatcaagcacatcggcaccagcgccatcatggacctgctgctgagactgctgacctgcatcgagcccccccagcccagacaggacgtgctgaactggctgaacgaggagaagatcatccagagactggtggagatcgtgcaccccagccaggaggaggacagacacagcaacgccagccagagcctgtgcgagatcgtgagactgagcagagaccagatgctgcagatccagaacagcaccgagcccgaccccctgctggccaccctggagaagcaggagatcatcgagcagctgctgagcaacatcttccacaaggagaagaacgagagcgccatcgtgagcgccatccagatcctgctgaccctgctggagaccagaagacccaccttcgagggccacatcgagatctgcccccccggcatgagccacagcgcctgcagcgtgaacaagagcgtgctggaggccatcagaggcagactgggcagcttccacgagctgctgctggagccccccaagaagagcgtgatgaagaccacctggggcgtgctggacccccccgtgggcaacaccagactgaacgtgatcagactgatcagcagcctgctgcagaccaacaccagcagcatcaacggcgacctgatggagctgaacagcatcggcgtgatcctgaacatgttcttcaagtacacctggaacaacttcctgcacacccaggtggagatctgcatcgccctgatcctggccagccccttcgagaacaccgagaacgccaccatcaccgaccaggacagcaccggcgacaacctgctgctgaagcacctgttccagaagtgccagctgatcgagagaatcctggaggcctgggagatgaacgagaagaagcaggccgagggcggcagaagacacggctacatgggccacctgaccagaatcgccaactgcatcgtgcacagcaccgacaagggccccaacagcgccctggtgcagcagctgatcaaggacctgcccgacgaggtgagagagagatgggagaccttctgcaccagcagcctgggcgagaccaacaagagaaacaccgtggacctggccttcagcgactaccagatgcagcagatgaccagcaacttcatcgaccagttcggcttcaacgacgagaagttcgccgaccaggacgacatcggcaacgtgagcttcgacagagtgagcgacatcaacttcaccctgaacaccaacgagagcggcaacatcgccctgttcgaggcctgctgcaaggagagaatccagcagttcgacgacggcggcagcgacgaggaggacatctgggaggagaagcacatcgccttcacccccgagagccagagaagaagcagcagcggcagcaccgacagcgaggagagcaccgacagcgaggaggaggacggcgccaagcaggacctgttcgagcccagcagcgccaacaccgaggacaagatggaggtggacctgagcgagccccccaactggagcgccaacttcgacgtgcccatggagaccacccacggcgcccccctggacagcgtgggcagcgacgtgtggagcaccgaggagcccatgcccaccaaggagaccggctgggccagcttcagcgagttcaccagcagcctgagcaccaaggacagcctgagaagcaacagccccgtggagatggagaccagcaccgagcccatggaccccctgacccccagcgccgccgccctggccgtgcagcccgaggccgccggcagcgtggccatggaggccagcagcgacggcgaggaggacgccgagagcaccgacaaggtgaccgagaccgtgatgaacggcggcatgaaggagaccctgagcctgaccgtggacgccaagaccgagaccgccgtgttcaagagcgaggagggcaagctgagcaccagccaggacgccgcctgcaaggacgccgaggagtgccccgagaccgccgaggccaagtgcgccgcccccagaccccccagcagcagccccgagcagagaaccggccagcccagcgcccccggcgacaccagcgtgaacggccccgtgtag

SEQ ID NO: 62361 - DNA, 2535 bp, Artificial Sequence
  derived and/or modified sequence
atgttctggaaattcgacctgcacagctcgtctcacatcgacactctcctggagagagaagacgtaactctcaaggaactgatggacgaggaagacgtcctccaggaatgcaaggctcagaatcgtaagctcattgaattcctcctgaaagctgagtgcctggaggatttggtgtcttttattattgaagagccccctcaggacatggacgagaagattcgctacaagtatcccaatatatcatgtgaacttctgaccagcgacgttagtcaaatgaacgaccgcttgggagaagatgaatcgctgctgatgaagttgtactctttcctgctgaatgattcccctcttaaccctctgttggcgtcttttttttcgaaagtgctaagcattctgatttcccggaaaccggagcaaatcgtagatttcttgaaaaagaagcatgattttgtggacctgattatcaagcacattgggacctccgctataatggatttgctccttagacttcttacctgtatagagccgccccaacctcggcaggatgtgctgaattggctcaatgaggagaagattattcaaaggctcgtcgaaatagtacacccaagccaggaagaggaccggcacagtaatgcgagccagagcttatgcgaaattgtaagattgagccgcgatcaaatgcttcagatacagaatagtacagagccagatccgctcttagccacgctggagaagcaagagatcatcgaacagctgctttctaatatctttcacaaggaaaagaatgagagtgccatcgtaagtgctatccaaatcctgctgaccctcctcgagacaagaagacctacttttgagggccatattgagatatgtccacccggaatgagccactccgcttgcagcgtgaacaagtcagtgttggaagccattaggggccggttaggatcattccacgaactactgttggagcctccgaaaaaaagcgtgatgaagacaacgtggggtgtcctggatccaccggtgggcaacaccagactgaacgtgattcgattaatcagtagcctgctgcagaccaatactagctccatcaacggggacctgatggaacttaactccatcggggtgatacttaacatgttcttcaaatacacttggaacaactttctgcatacccaggtcgagatctgcatcgcccttatccttgccagtccattcgaaaacacagagaacgctactattacagatcaggactccactggagacaacttgcttttgaagcacttattccaaaaatgtcagcttattgaacgcattttggaagcatgggagatgaacgaaaaaaaacaggcagagggagggcggagacacggatatatgggccatctgactaggatagccaactgcatagtgcacagtacagataagggccctaacagcgctcttgtacagcagctcattaaggacctgccagacgaagtgagagagcgctgggagactttctgtacttcttccctgggcgagacaaacaagaggaacactgtagacctggctttctcggactaccagatgcagcagatgacttccaatttcatcgatcagttcggattcaacgatgagaaattcgctgatcaggatgacatcgggaacgtgtcattcgaccgcgtgtcggacattaacttcacactgaacaccaacgagtccggaaacattgctctctttgaagcctgctgtaaagaaaggattcagcaatttgacgatgggggctcagatgaagaagacatctgggaagaaaaacacatcgccttcacccctgaaagccagagaagatcctcctctgggtcaacagactctgaggagtccactgattcagaagaagaagacggggctaaacaggatctcttcgagcctagctctgccaacactgaggataaaatggaggtggacctgtcagagccccctaactggagcgctaattttgatgtgccgatggaaaccacacacggcgcacctctcgactccgtgggatctgacgtgtggtcaactgaggagcctatgcctaccaaagagactgggtgggcttctttcagcgagttcacctcctcactttccaccaaggattccttgcggtcaaacagtccggtggaaatggaaacatcgacagagcctatggaccctctaacgccctcagcagccgcattggctgttcaacccgaggccgccggatcagtggcaatggaagcatcctcggacggagaggaagacgctgaatccaccgacaaggtgacagagacagtgatgaatggtgggatgaaggagactctttcactaaccgtagatgccaagaccgagacggctgtctttaagagcgaggaagggaagctctccacttcccaagatgccgcttgtaaggatgctgaggagtgcccggagaccgcagaagcaaaatgtgccgctccccgacctccttcatcatccccggagcagcgaacaggccagccgtcagctccaggtgatacaagtgtgaacgggccagtgtag

SEQ ID NO: 62362 - DNA, 2535 bp, Artificial Sequence
  derived and/or modified sequence
atgttctggaagtttgacctgcacagcagcagccacatcgacaccctgctggagcgggaggatgtgaccctgaaggagctgatggatgaagaagatgtgctgcaggagtgcaaggcccagaacaggaagctgattgagttcctgctgaaggccgagtgcctggaggacctggtgtccttcatcatcgaggagcccccccaggacatggatgagaagatccgctacaagtaccccaacatcagctgtgagctgctgaccagtgatgtgtcccagatgaatgaccggctgggggaggatgagagcctgctgatgaagctgtacagcttcctgctgaatgacagccccctgaaccccctgctggccagcttcttcagcaaggtgctgagcatcctgatcagcaggaagccagagcagatcgtggacttcctgaagaagaagcatgactttgtggacctgatcatcaagcacatcggcaccagcgccatcatggacctgctgctgcggctgctgacctgcatcgagcccccccagccccggcaggatgtgctgaactggctgaatgaggagaagatcatccagaggctggtggagatcgtgcaccccagccaggaggaggacagacacagcaatgccagccagagcctgtgtgagatcgtgcggctgagccgggaccagatgctgcagatccagaacagcacagagccagaccccctgctggccaccctggagaagcaggagatcatcgagcagctgctgagcaacatcttccacaaggagaagaatgaaagtgccatcgtgtctgccatccagatcctgctgaccctgctggagacccggcggcccacctttgagggccacatcgagatctgccccccaggcatgagccacagcgcctgcagcgtgaacaagtctgtgctggaggccatccggggccgcctgggcagcttccacgagctgctgctggagccccccaagaagtctgtgatgaagaccacctggggcgtgctggacccccctgtgggcaacacccggctgaatgtcatccgcctcatcagcagcctgctgcagaccaacaccagcagcatcaatggagacctgatggagctgaacagcattggagtcatcctgaacatgttcttcaagtacacctggaacaacttcctgcacacccaggtggagatctgcatcgccctgatcctggccagcccctttgaaaatacagaaaatgccaccatcacagaccaggacagcactggagacaacctgctgctgaagcacctgttccagaagtgccagctgattgaaagaatcctggaggcctgggagatgaatgagaagaagcaggccgagggcggcagaagacatggctacatgggccacctgacccgcatcgccaactgcatcgtgcacagcacagacaagggccccaacagcgccctggtgcagcagctgatcaaggacctgcctgatgaggtgcgggagcgctgggagaccttctgcaccagcagcctgggggagaccaacaagaggaacacagtggacctggccttcagtgactaccagatgcagcagatgaccagcaacttcatcgaccagtttggcttcaatgatgagaagtttgctgaccaggatgacattggaaatgtgtcctttgacagagtgtctgacatcaacttcaccctgaacaccaatgaaagtggcaacatcgccctgtttgaggcctgctgcaaggagcgcatccagcagtttgatgatggcggcagtgatgaggaggacatctgggaggagaagcacatcgccttcaccccagagagccagaggaggagcagcagcggcagcacagacagcgaggagagcacagacagcgaggaggaggatggagccaagcaggacctgtttgagcccagcagcgccaacacagaggacaagatggaggtggacctgtctgagccccccaactggagcgccaactttgatgtgcccatggagaccacccacggggcccccctggacagcgtgggcagtgatgtgtggagcacagaggagcccatgcccaccaaggagaccggctgggccagcttcagcgagttcaccagcagcctgagcaccaaggacagcctgcggagcaacagccctgtggagatggagaccagcacagagcccatggaccccctgacccccagcgctgctgccctggccgtgcagcctgaggccgccggctctgtggccatggaggccagcagtgatggagaggaggatgctgagagcacagacaaggtgacagaaacagtgatgaatggaggcatgaaggagaccctgagcctgactgtggatgccaagacagaaacagctgtgttcaagtctgaggagggcaagctgagcaccagccaggatgctgcctgcaaggatgctgaggagtgcccagagacagctgaggccaagtgtgccgccccccggccccccagcagcagccctgagcagaggacaggccagcccagcgcccctggggacacctctgtgaatggacctgtgtag

SEQ ID NO: 62363 - DNA, 2535 bp, Artificial Sequence
  derived and/or modified sequence
atgttctggaagttcgacctgcacagcagcagccacatcgacaccctgctcgaaagggaagacgtgactcttaaggagctaatggatgaggaggatgtactacaggagtgcaaagcccagaatcgcaaactaatcgagttcctattgaaggccgagtgtctggaagatctcgtctccttcatcatagaggaaccacctcaggatatggacgagaagatccgctataaatatcctaacatttcttgtgagcttttgaccagcgacgtatcgcagatgaacgatcgcttgggagaggacgaatcattactgatgaaactctattcattcttgctcaatgattcacctttaaacccacttctcgcgagcttcttttctaaggttctcagcattctgattagccggaagccggaacagattgtcgacttcctcaaaaagaagcatgattttgtggatctcataattaaacatatcggaacctctgcgatcatggatttgctgttgaggctgctgacatgtatcgagcctccacagcctaggcaggatgtgctgaactggttgaacgaggaaaagatcatccaacggctggtggagatagttcacccaagccaggaagaagaccgacacagtaacgcctctcagagtctctgcgaaattgtacgattgagcagggaccagatgctgcaaatccagaattcaacggagcctgatccactgctcgccacactcgagaaacaggaaattattgagcaattattgtccaacatcttccacaaagaaaagaatgagtctgctatagtctctgccatccagatccttctgacactccttgagactaggcggcctacctttgaaggacacatagagatctgcccccccggcatgtcccactcagcttgttctgtcaataaatccgtcctggaggcaatcagaggccggctggggagttttcacgagctgctcctagaaccgcccaagaagtcagtcatgaagaccacctggggggtgctggatcctcctgttggcaacacaagactgaatgtaatcagacttatttcctcgttgctccaaaccaacacatcaagcattaacggggatctcatggaattgaattccatcggtgtcatattaaacatgttcttcaaatacacttggaacaactttctgcacactcaggtggaaatctgcattgccttgatcctggctagtcccttcgaaaacacagagaatgctactataactgaccaggacagtaccggtgataatctcctactgaaacatctgtttcagaaatgccagcttattgaacgcattctggaggcatgggagatgaacgaaaaaaaacaggccgaggggggcagaaggcacggctacatggggcacctcactaggattgctaattgtatcgtacattctaccgacaagggaccaaattccgccctggtgcaacagttaatcaaagatctaccagatgaggtcagggaacggtgggaaaccttttgtactagtagcctgggtgagactaacaaaaggaacacagttgacctggcattctctgattatcagatgcagcagatgaccagtaactttattgatcagttcgggtttaatgatgagaagtttgctgatcaggatgatatcggcaacgtcagttttgatagggtttctgacatcaactttacgctcaacaccaatgagagtgggaacattgccctctttgaagcctgttgtaaggagcggatccagcagttcgacgatggcggatctgatgaggaagatatctgggaggagaagcacattgcttttacgccagagagtcagcggaggagctcctcagggtcgacagatagtgaagagtcaacagattcagaggaggaagatggcgctaagcaggatctgttcgaaccgagttcggctaatactgaggacaaaatggaggtggatttatcggagccacccaattggagtgctaacttcgacgtccccatggagacgacccatggagctcctctggactctgtaggatctgacgtgtggtctacagaggagccaatgcctaccaaggagaccggttgggcgtccttcagcgagttcacctctagcctttccacaaaggactccttgagatctaatagccccgtagaaatggagaccagcaccgaacctatggaccccttaacccccagcgctgccgctttggcggttcagcctgaggcagctggttcagttgctatggaggcttcctcggatggcgaggaagacgccgagtcaaccgacaaagtgacggaaaccgtcatgaacggtggtatgaaagaaaccctgagcctgaccgtggatgccaaaaccgaaaccgccgtgtttaagagtgaagaaggaaagctatccacctcgcaagacgccgcttgtaaggacgccgaagagtgtcctgagaccgccgaagcaaaatgtgcggctccacgcccacccagctcctctccagaacaacgcacaggccaacctagcgctccaggggacaccagcgtaaacgggccagtttag

SEQ ID NO: 62364 - DNA, 2535 bp, Artificial Sequence
  derived and/or modified sequence
atgttttggaagttcgacctgcactcaagctctcatattgacacactgctcgagagggaggatgttaccctgaaagagctgatggacgaagaagacgtactgcaagagtgcaaagctcaaaacaggaaattaattgagttcctgctgaaagccgaatgtctggaggacctggtctctttcatcattgaggagcctccacaggacatggacgagaagataagatacaaataccctaatatctcttgcgagctcctcacatccgacgtatcccagatgaacgaccggctcggtgaggacgagagtctgcttatgaagctttacagcttcttactcaatgactcaccgctaaaccctctccttgctagcttctttagcaaagttctgtctattcttatttccagaaaacccgagcagatcgtcgattttctaaaaaaaaagcatgattttgtggacctcatcataaaacatataggtacttccgcaatcatggatctactactccgcttgttaacctgtatagagcctcctcagcctaggcaggacgtgttgaactggctgaacgaagagaaaataatccaaaggcttgtcgagatcgtgcacccaagccaagaggaggatcgccactccaatgctagccagtctctctgcgagatcgtgcgtctgtctagagaccagatgttacagatacaaaactcaacagaacctgatcctctgcttgcaaccctcgaaaagcaggagatcatcgaacagctcctgtctaacatcttccacaaggagaagaacgaatctgctattgtttcagctattcagattttattaacgttgttggagactcggcgaccgacttttgagggccatatagagatctgtcctcccggaatgtctcactctgcctgtagcgttaacaagtctgtcctcgaagctatcagaggtagattgggatcttttcatgagctccttctggaaccccctaagaagtccgttatgaagacgacatggggggtactggatccccctgtaggaaatacaagactcaatgtcatcagactaatctccagtctcttgcaaaccaatacctcttcaatcaacggcgacctgatggagctaaactctattggggtgatccttaacatgttctttaagtacacctggaacaactttctccacacgcaagtggagatctgcatcgccctcatcctggcttcacccttcgaaaatacagaaaacgctactattactgatcaggattcaacaggggacaacctgctgcttaaacacctcttccagaaatgccagttaatcgagcggatcctggaagcttgggagatgaatgagaagaagcaggccgaagggggaagaaggcacggctacatgggccacttaacgaggattgccaactgcattgtgcactctaccgacaagggcccaaattcagcgcttgttcaacagctcattaaggacttgcctgacgaggtccgcgagagatgggagacattctgtacctccagtctgggcgagaccaacaagcggaataccgtcgacctggcattcagcgactatcagatgcaacagatgactagcaatttcattgaccagtttggttttaacgacgaaaaattcgcagatcaagatgatataggcaacgtctcttttgacagagtgtcagatataaactttactctgaacactaatgagagcggcaatattgctttgttcgaggcttgctgcaaggaacgaatccaacagtttgacgacggaggttccgacgaagaggatatctgggaggagaagcacatcgcctttacacctgaaagccagaggagatcttcttccggatcaactgatagtgaggaaagcacggacagtgaggaagaagatggcgctaagcaggacttgttcgaaccttcctccgctaatacagaagataagatggaagtggacctgtccgagccacctaattggagcgcaaattttgacgttccaatggaaacgacacatggagcgccattagattcagttgggtcagacgtttggtccaccgaggagccaatgccaacaaaggaaacaggctgggcttcattttccgagttcacatcctccttgtccacgaaagactctctgaggtcgaacagtccagtggaaatggaaacaagcacggaacctatggacccattgaccccttctgcggcagctctcgcagtccagccggaggctgcgggatccgtggctatggaggcttcctcagatggagaggaggacgctgagagtacggataaggtcacagagacagtgatgaatggcggaatgaaggagactctttctctgaccgtagatgcgaaaaccgaaactgcagtgttcaagtctgaagaaggcaagctgtctacttctcaggatgccgcttgcaaggacgctgaggagtgtcctgagaccgccgaggcaaagtgcgccgctcctcgccctccatcatcttccccagagcaaaggacgggacagccctccgctcctggcgacacttctgtgaacggacctgtctag

SEQ ID NO: 62365 - DNA, 2771 bp, Artificial Sequence
  derived and/or modified sequence
tttgggcgcttcgctgatggtgtcggtgagcgcgtttcccgcctgagcgcaactagcggcgggtcgtgggcacctccaggagagcttgtttcatatccatatcccactgtattcctgctaatctgctaatgcagtaaattggaggaaaactgttaccaggataacctgtaatgggcaaggagccacaaagaagaaaacatttcttttaatttttaaacttggtttgaaagaccagcatgttttggaaatttgatcttcactcatcatcccacatagacacacttctagaaagagaagatgtaacactgaaggagttaatggatgaggaagatgttttacaggaatgtaaagctcagaaccgcaaacttatagagtttctgttaaaagcagaatgtctcgaagatttagtctcattcattatagaagaaccacctcaagacatggatgaaaagatcagatacaagtatccaaatatatcttgtgagttgctcacttctgatgtctcccagatgaatgatagactgggagaagatgaatccttgctaatgaaattatatagcttcctcctaaacgattcccctttgaatccactacttgccagtttcttcagcaaggtgctaagtattcttatcagcagaaaaccagaacagattgtggatttcttaaagaagaagcatgattttgtagaccttattataaagcacataggaacttctgctatcatggatttgttgctcaggctcctgacgtgtatcgaacctccacagcccaggcaagatgtgctgaattggttaaatgaggagaaaattatccagaggcttgtggaaatagttcatccatcgcaagaagaagatcgacattcaaatgcatcacaatcactttgtgaaattgttcgcctgagcagagaccagatgttacaaattcagaacagtacagagcccgaccccctgcttgccactctagaaaagcaagaaattatagagcagcttctatcaaatattttccacaaggagaaaaatgagtcagccatagtcagtgcaatccagatattgctgactttacttgagacacgacgaccaacatttgaaggccatatagagatctgcccaccaggcatgagccattcagcttgttcagtaaacaagagtgttctagaagccatcagaggaagacttggatcttttcatgaactcctgctggagccacccaagaaaagtgtgatgaagaccacatggggtgtgctggatcctcctgtggggaatacccggttgaatgtcattaggttgatatccagcctgcttcaaaccaataccagcagtataaatggggaccttatggagctgaatagcattggagtcatattgaacatgttcttcaagtatacatggaataactttttgcatacacaagtggaaatttgtattgcactgattcttgcaagtccttttgaaaacacagaaaatgccacaattaccgatcaagactccactggtgataatttgttattaaaacatcttttccaaaaatgtcaattaatagaacgaatacttgaagcctgggaaatgaatgagaagaaacaggctgagggaggaagacggcatggttacatgggacacctaacgaggatagctaactgtatcgtgcacagcactgacaagggccccaacagtgcattagtgcagcagcttatcaaagatcttcccgacgaagtcagggaacgatgggagacgttctgcacaagctccttaggagaaactaacaagaggaacacggtagatctagccttttctgattatcagatgcaacaaatgacgtccaattttattgaccagtttggcttcaacgatgagaagtttgcagatcaagatgacattggcaatgtttcttttgatcgagtatcagacatcaactttactctcaatacaaatgaaagtggaaatattgccttgtttgaagcatgttgtaaggaaagaatacaacagtttgatgatggtggctctgatgaggaagatatatgggaggaaaagcacatcgcattcacaccagaatcccaaagacgatccagctcggggagtacagacagtgaggaaagtacagactctgaagaagaagatggagcaaagcaagacttgtttgaacccagcagtgccaacacggaggataaaatggaggtggacctgagtgaaccacccaactggtcagctaactttgatgtcccaatggaaacaacccacggtgctccattggattctgtgggatctgatgtctggagcacagaggagccgatgccaactaaagagacgggctgggcttctttttcagagttcacgtcttccctgagcacaaaagattctttaaggagtaattctccagtggaaatggaaaccagcactgaacccatggaccctctgactcccagtgcggctgccctggcagtgcagccagaagcggcaggcagtgtggccatggaagccagctctgacggagaggaggatgcagaaagtacagacaaggtaactgagacagtgatgaatggcggcatgaaggaaacgctcagcctcactgtagatgccaagacagagactgcggtcttcaaaagtgaggaagggaaactgtctacctctcaagatgctgcttgtaaagacgcagaggagtgtcccgagactgcagaggcgaagtgcgcggcgcccaggcctcccagcagcagtcccgagcagaggactggccaaccaagcgcaccaggtgacacttcagtgaatggccctgtatga

SEQ ID NO: 62366 - protein, 791 aa, Artificial Sequence
  derived and/or modified sequence
MFWKFDLHSSSHIDTLLEREDVTLKELMDEEDVLQECKAQNRKLIEFLLKAECLEDLVSFIIEEPPQDMDEKIRYKYPNISCELLTSDVSQMNDRLGEDESLLMKLYSFLLNDSPLNPLLASFFSKVLSILISRKPEQIVDFLKKKHDFVDLIIKHIGTSAIMDLLLRLLTCIEPPQPRQDVLNWLNEEKIIQRLVEIVHPSQEEDRHSNASQSLCEIVRLSRDQMLQIQNSTEPDPLLATLEKQEIIEQLLSNIFHKEKNESAIVSAIQILLTLLETRRPTFEGHIEICPPGMSHSACSVNKSVLEAIRGRLGSFHELLLEPPKNMFFKYTWNNFLHTQVEICIALILASPFENTENATITDQDSTGDNLLLKHLFQKCQLIERILEAWEMNEKKQAEGGRRHGYMGHLTRIANCIVHSTDKGPNSALVQQLIKDLPDEVRERWETFCTSSLGETNKRNTVDLAFSDYQMQQMTSNFIDQFGFNDEKFADQDDIGNVSFDRVSDINFTLNTNESGNIALFEACCKERIQQFDDGGSDEEDIWEEKHIAFTPESQRRSSSGSTDSEESTDSEEEDGAKQDLFEPSSANTEDKMEVDLSEPPNWSANFDVPMETTHGAPLDSVGSDVWSTEEPMPTKETGWASFSEFTSSLSTKDSLRSNSPVEMETSTEPMDPLTPSAAALAVQPEAAGSVAMEASSDGEEDAESTDKVTETVMNGGMKETLSLTVDAKTETAVFKSEEGKLSTSQDAACKDAEECPETAEAKCAAPRPPSSSPEQSGVEIPALPGQWSQQ

SEQ ID NO: 62367 - DNA, 2376 bp, Artificial Sequence
  derived and/or modified sequence
atgttctggaagttcgacctgcacagcagcagccacatcgacaccctgctggagagagaggacgtgaccctgaaggagctgatggacgaggaggacgtgctgcaggagtgcaaggcccagaacagaaagctgatcgagttcctgctgaaggccgagtgcctggaggacctggtgagcttcatcatcgaggagcccccccaggacatggacgagaagatcagatacaagtaccccaacatcagctgcgagctgctgaccagcgacgtgagccagatgaacgacagactgggcgaggacgagagcctgctgatgaagctgtacagcttcctgctgaacgacagccccctgaaccccctgctggccagcttcttcagcaaggtgctgagcatcctgatcagcagaaagcccgagcagatcgtggacttcctgaagaagaagcacgacttcgtggacctgatcatcaagcacatcggcaccagcgccatcatggacctgctgctgagactgctgacctgcatcgagcccccccagcccagacaggacgtgctgaactggctgaacgaggagaagatcatccagagactggtggagatcgtgcaccccagccaggaggaggacagacacagcaacgccagccagagcctgtgcgagatcgtgagactgagcagagaccagatgctgcagatccagaacagcaccgagcccgaccccctgctggccaccctggagaagcaggagatcatcgagcagctgctgagcaacatcttccacaaggagaagaacgagagcgccatcgtgagcgccatccagatcctgctgaccctgctggagaccagaagacccaccttcgagggccacatcgagatctgcccccccggcatgagccacagcgcctgcagcgtgaacaagagcgtgctggaggccatcagaggcagactgggcagcttccacgagctgctgctggagccccccaagaacatgttcttcaagtacacctggaacaacttcctgcacacccaggtggagatctgcatcgccctgatcctggccagccccttcgagaacaccgagaacgccaccatcaccgaccaggacagcaccggcgacaacctgctgctgaagcacctgttccagaagtgccagctgatcgagagaatcctggaggcctgggagatgaacgagaagaagcaggccgagggcggcagaagacacggctacatgggccacctgaccagaatcgccaactgcatcgtgcacagcaccgacaagggccccaacagcgccctggtgcagcagctgatcaaggacctgcccgacgaggtgagagagagatgggagaccttctgcaccagcagcctgggcgagaccaacaagagaaacaccgtggacctggccttcagcgactaccagatgcagcagatgaccagcaacttcatcgaccagttcggcttcaacgacgagaagttcgccgaccaggacgacatcggcaacgtgagcttcgacagagtgagcgacatcaacttcaccctgaacaccaacgagagcggcaacatcgccctgttcgaggcctgctgcaaggagagaatccagcagttcgacgacggcggcagcgacgaggaggacatctgggaggagaagcacatcgccttcacccccgagagccagagaagaagcagcagcggcagcaccgacagcgaggagagcaccgacagcgaggaggaggacggcgccaagcaggacctgttcgagcccagcagcgccaacaccgaggacaagatggaggtggacctgagcgagccccccaactggagcgccaacttcgacgtgcccatggagaccacccacggcgcccccctggacagcgtgggcagcgacgtgtggagcaccgaggagcccatgcccaccaaggagaccggctgggccagcttcagcgagttcaccagcagcctgagcaccaaggacagcctgagaagcaacagccccgtggagatggagaccagcaccgagcccatggaccccctgacccccagcgccgccgccctggccgtgcagcccgaggccgccggcagcgtggccatggaggccagcagcgacggcgaggaggacgccgagagcaccgacaaggtgaccgagaccgtgatgaacggcggcatgaaggagaccctgagcctgaccgtggacgccaagaccgagaccgccgtgttcaagagcgaggagggcaagctgagcaccagccaggacgccgcctgcaaggacgccgaggagtgccccgagaccgccgaggccaagtgcgccgcccccagaccccccagcagcagccccgagcagagcggcgtggagatccccgccctgcccggccagtggagccagcagtag

SEQ ID NO: 62368 - DNA, 2376 bp, Artificial Sequence
  derived and/or modified sequence
atgttctggaagtttgatttacacagttcgtcccacatagataccctgcttgagagagaggacgtgactctgaaagagctgatggacgaggaggacgtgctgcaggaatgcaaggctcagaataggaaactgatagagttcctgctcaaggccgagtgtctggaggacctggtgagtttcatcatcgaggagccacctcaggatatggatgagaaaattagatacaagtatcctaatatttcatgcgagctcctgacctctgacgtgtcacagatgaatgatcggctgggggaagacgagagcctcctgatgaagctttattccttcttgctcaatgatagtccgcttaaccctctgctggcctcatttttctccaaggtgctcagtattctgatctcccgaaagcccgaacaaattgtagacttcttaaaaaaaaagcacgattttgttgatctcattatcaagcatattgggacaagcgctattatggatcttctgctgcgcctactgacgtgtattgagcctcctcagcctagacaggatgttttaaactggctaaacgaggagaagattatacagagattagtggagatagttcacccatctcaggaggaggaccgccacagtaacgcgtcgcagtccctatgtgagattgtcagactctctagagaccaaatgctccaaatccagaatagcacagagcccgatcccctgctagccactctcgaaaaacaggagataatagaacaattattaagcaatatattccacaaggagaaaaatgagagcgctattgtgtcagccatccagatcttactcacattactggaaaccagacgccctacatttgaaggccacattgagatctgtccccccgggatgagccacagtgcatgttctgttaacaaatcggtcctggaggcaattaggggccgattgggcagtttccacgagctgctactggagccgcctaagaatatgttcttcaaatatacttggaataacttcctccatacccaggtggagatttgcatcgccctgattttagcctcccccttcgaaaatactgagaatgcaacaattacagatcaggactccactggtgacaatcttctgttaaaacacctgttccagaaatgtcagctcattgaacgcatcttggaggcgtgggagatgaatgagaaaaagcaagctgaaggtgggcgccggcacgggtatatgggccatctgacccgaattgccaattgcatcgtacacagcaccgataaaggacctaacagcgccctggtgcagcaactgatcaaggatctgccagacgaggtgagggagcgttgggagaccttctgcacatcttctctgggggagactaataagagaaacactgtggacttggccttctccgattaccagatgcagcagatgaccagcaattttatagaccagttcggtttcaacgacgaaaagttcgcagaccaggacgatattgggaatgtctctttcgaccgggtttccgatatcaatttcactttgaatactaacgagtcagggaatatcgccctgtttgaggcctgctgcaaggaacgaatccagcaatttgacgacggaggtagtgacgaggaggatatttgggaagagaagcacatcgcattcactcctgaatcccagcgaaggagttccagcggctcgaccgactctgaagagagcacggactctgaggaagaggacggtgccaagcaggatctctttgaaccttcgtcggctaacaccgaagacaaaatggaggtggatctgtccgaaccgccaaattggagcgctaacttcgatgttccaatggagaccactcatggcgcccccctggacagcgtgggaagtgatgtttggagcacggaagaacccatgcccaccaaggaaacaggctgggcctcttttagtgaatttacttcctccttgtctactaaagacagcctgcggtcaaactcacctgttgagatggaaacctccactgagccaatggatcctctgactccatcagctgccgcgctggcagtgcaaccagaagccgccggcagcgtggcgatggaagcttcctctgacggcgaggaggatgcggagtcgacagacaaggtcaccgaaactgtcatgaacggggggatgaaagagactctcagtctcaccgttgacgccaagacggagacagccgtgttcaaaagcgaggagggcaaactcagcacatctcaggatgccgcttgcaaggacgccgaggagtgtcctgaaacagcagaagctaaatgtgccgctccacgtccacctagctcctccccggaacagtccggggtcgaaatcccagctttacccggccagtggtctcagcagtag

SEQ ID NO: 62369 - DNA, 2376 bp, Artificial Sequence
  derived and/or modified sequence
atgttctggaagtttgacctgcacagcagcagccacatcgacaccctgctggagcgggaggatgtgaccctgaaggagctgatggatgaagaagatgtgctgcaggagtgcaaggcccagaacaggaagctgattgagttcctgctgaaggccgagtgcctggaggacctggtgtccttcatcatcgaggagcccccccaggacatggatgagaagatccgctacaagtaccccaacatcagctgtgagctgctgaccagtgatgtgtcccagatgaatgaccggctgggggaggatgagagcctgctgatgaagctgtacagcttcctgctgaatgacagccccctgaaccccctgctggccagcttcttcagcaaggtgctgagcatcctgatcagcaggaagccagagcagatcgtggacttcctgaagaagaagcatgactttgtggacctgatcatcaagcacatcggcaccagcgccatcatggacctgctgctgcggctgctgacctgcatcgagcccccccagccccggcaggatgtgctgaactggctgaatgaggagaagatcatccagaggctggtggagatcgtgcaccccagccaggaggaggacagacacagcaatgccagccagagcctgtgtgagatcgtgcggctgagccgggaccagatgctgcagatccagaacagcacagagccagaccccctgctggccaccctggagaagcaggagatcatcgagcagctgctgagcaacatcttccacaaggagaagaatgaaagtgccatcgtgtctgccatccagatcctgctgaccctgctggagacccggcggcccacctttgagggccacatcgagatctgccccccaggcatgagccacagcgcctgcagcgtgaacaagtctgtgctggaggccatccggggccgcctgggcagcttccacgagctgctgctggagccccccaagaacatgttcttcaagtacacctggaacaacttcctgcacacccaggtggagatctgcatcgccctgatcctggccagcccctttgagaacacagaaaatgccaccatcacagaccaggacagcactggagacaacctgctgctgaagcacctgttccagaagtgccagctgattgagcgcatcctggaggcctgggagatgaatgagaagaagcaggccgagggcggccgccgccacggctacatgggccacctgaccagaattgccaactgcatcgtgcacagcacagacaagggccccaacagcgccctggtgcagcagctgatcaaggacctgcctgatgaggtgcgggagcgctgggagaccttctgcaccagcagcctgggggagaccaacaagaggaacacagtggacctggccttcagtgactaccagatgcagcagatgaccagcaacttcatcgaccagtttggcttcaatgatgagaagtttgctgaccaggatgacattggaaatgtgtcctttgacagagtgtctgacatcaacttcaccctgaacaccaatgaaagtggcaacatcgccctgtttgaggcctgctgcaaggagcgcatccagcagtttgatgatggcggcagtgatgaggaggacatctgggaggagaagcacatcgccttcaccccagagagccagaggaggagcagcagcggcagcacagattctgaggagagcacagattctgaggaggaggatggagccaagcaggacctgtttgagcccagcagcgccaacacagaggacaagatggaggtggacctgtctgagccccccaactggagcgccaactttgatgtgcccatggagaccacccatggagcccccctggacagcgtgggcagtgatgtgtggagcacagaggagcccatgcccaccaaggagaccggctgggccagcttcagcgagttcaccagcagcctgagcaccaaggacagcctgcggagcaacagccctgtggagatggagaccagcacagagcccatggaccccctgaccccatctgctgctgccctggccgtgcagcctgaggccgccggctctgtggccatggaggccagcagtgatggagaagaagatgctgagagcacagacaaggtgacagagaccgtgatgaatggaggcatgaaggagaccctgagcctgactgtggatgccaagacagaaacagctgtgttcaagtctgaggagggcaagctgagcaccagccaggatgctgcctgcaaggatgctgaagaatgtcctgagacagctgaggccaagtgtgccgcccccaggcctcccagcagcagccctgagcagagcggcgtggagatcccagccctgcccggccagtggagccagcagtag

SEQ ID NO: 62370 - DNA, 2376 bp, Artificial Sequence
  derived and/or modified sequence
atgttctggaagttcgacctgcacagcagcagccacatcgacaccctactggaacgtgaagatgtgactctcaaggaattgatggatgaggaagacgtactccaggagtgtaaggctcaaaaccgcaaactaattgaattccttctgaaagcagaatgcctggaggatctcgtctcctttattatcgaagaaccaccacaagacatggacgagaagattagatataagtatcctaatatctcctgtgagctgctgacttcagatgtgtctcagatgaatgatcgtctgggcgaggatgagtcccttctaatgaagctctattccttcctgttgaatgattctccactgaaccccctgcttgcaagtttcttttcaaaggtgctgagcatcttgatcagccggaagcctgagcagatcgtggatttcctgaagaagaaacacgattttgttgaccttataataaaacatattgggactagtgctatcatggatctgctgctcagactcctgacatgcatcgagcctccgcagccacgacaggacgttctcaattggctaaatgaggagaaaattattcagcggctggtggaaatcgtacacccttctcaggaggaagataggcatagcaacgcgagtcagagcctctgtgagattgtgaggctctccagggaccaaatgctccagattcagaatagcaccgaaccagaccccctcttggccacactcgagaagcaagaaattattgagcaactgctttccaatatttttcacaaagagaaaaatgaatccgccatcgtgagcgctatccagattctcttgacactcctcgaaacccggcggcccaccttcgaaggccatatcgaaatatgcccacctgggatgtctcacagcgcttgttcagtcaacaagagtgttttggaggccatcaggggacggctgggctcttttcatgagttactgctggaaccccctaagaatatgttctttaaatacacctggaataatttcctacatacacaggttgagatctgcatcgccctgatccttgcctctccattcgagaataccgagaacgccacaattaccgatcaggacagtacaggggacaatctgcttctgaaacacctcttccagaagtgtcaactcattgaacggatcctggaagcctgggaaatgaatgagaagaagcaggccgagggaggccgcaggcacggatatatggggcatttgactcgtattgctaattgtattgtgcacagcactgataaagggcctaactccgccctggtgcagcagttaattaaagatctacccgatgaggtgagagaaaggtgggaaactttctgcacttcgagcctgggagagacgaacaagcgaaataccgtcgacctggcgttcagtgactatcaaatgcagcagatgaccagcaattttatagaccaattcgggttcaacgatgagaagttcgccgaccaggacgacataggcaacgtcagcttcgaccgggtcagcgacataaatttcactctgaacacaaacgaatccggcaacatagcattgttcgaggcatgttgcaaggagagaattcaacagttcgatgacggggggtcggacgaggaagacatttgggaagagaaacacatagcttttacccccgagtcccagaggagatcatcctctggatctactgattcggaggagtctaccgacagcgaagaagaggacggcgctaagcaggacctgttcgagcctagtagcgcaaatactgaagataagatggaggtcgacctgtccgagcctcctaactggagcgccaattttgatgtccccatggaaactacccatggggcaccacttgactctgtcggatctgatgtgtggtccacagaagaacccatgcccacaaaagagacaggatgggctagcttcagcgaatttacctcatctctgagcaccaaggatagcctacgcagcaattcgcccgttgagatggaaacctccactgaaccaatggacccgcttactccttcagctgctgcactggcagtgcagccggaggccgcgggttccgttgctatggaagcatcttccgacggcgaggaagatgcagagtcaaccgataaggtcacagaaactgtgatgaacgggggaatgaaagagacccttagcctgacagtggatgccaagaccgaaacggcggtttttaaaagcgaggagggtaagctgtccacgagtcaggacgcagcttgcaaagacgctgaagagtgcccagaaaccgctgaagcgaaatgcgccgcaccacgaccgccttcttcctcacctgaacaaagtggcgtggaaatacccgctctccctggacagtggagccagcagtag

SEQ ID NO: 62371 - DNA, 2376 bp, Artificial Sequence
  derived and/or modified sequence
atgttttggaaattcgatctgcactcgtcgtcacacatcgatactctgctggagagggaggacgtgacattgaaagaattgatggacgaggaagatgtgctccaagagtgcaaagctcagaacagaaaattaattgagtttctgctgaaagccgagtgtttggaggacttggttagcttcatcatcgaggagcctcctcaagacatggacgagaaaatcaggtataagtacccaaacatctcttgcgagctgttaacgagcgatgtttcacaaatgaacgatcgcctcggcgaggacgagagtcttctgatgaagctgtactcattcctgcttaacgatagtcctctaaaccctctactggcaagcttcttctccaaagttctgagtatactgatttctagaaagccagaacagattgtcgacttcttgaagaagaaacatgacttcgtggacttaatcatcaaacatattgggacgtcggcaattatggacctcctcctgaggcttctcacctgtattgaaccaccacagccgaggcaggatgtgttgaactggttgaatgaagagaagataatccagaggttggtcgagatcgtgcatccttctcaggaggaggacaggcactctaacgcatcccagtctctgtgtgaaatcgttagactgagtagggaccagatgcttcagattcagaatagtacagaaccagatccgctactggccacgttggagaagcaggaaatcatcgagcaactgctgtcaaatatcttccacaaggagaaaaatgaatccgcaattgtcagcgctatccagatactgttgacattgcttgagactcggaggcccaccttcgaagggcacattgaaatctgcccacctggcatgtctcactccgcctgcagcgtgaacaagtcagtccttgaggctattagggggcgactgggcagtttccacgagctgctgctggagcccccaaagaatatgttcttcaaatatacatggaacaatttcctgcacacccaggtggagatctgcatcgccttaatactggctagccctttcgaaaacaccgaaaacgcaaccatcaccgatcaggactcgaccggggacaacctgttgctcaaacatttgttccaaaagtgccagcttatcgagagaattctggaagcgtgggagatgaacgagaagaagcaggccgagggtggaagaaggcacggatacatgggccacctgacacgcatcgcgaactgtatcgtccacagtaccgataaaggcccaaatagcgcgctcgtccagcaactgataaaggatctccctgatgaagtcagggagcgttgggagaccttctgcacgtcatcactgggtgaaacaaacaagaggaatacagtggacctcgccttcagcgactaccagatgcagcagatgaccagcaactttatcgaccagttcggcttcaacgacgagaagttcgccgaccaggacgatataggcaatgtcagctttgaccgcgtgagcgatatcaactttaccctgaacaccaacgagagcggcaatatagctctgttcgaagcctgttgtaaggagcggatccagcagttcgatgacggaggctctgacgaagaggacatatgggaggaaaagcatatcgccttcacacccgaaagccagcgcaggtcctctagtgggagtactgactccgaagagagcacagactcagaagaagaagacggtgccaaacaggatttattcgaaccatctagcgctaacaccgaagataaaatggaagtggatttatctgaaccaccgaactggagcgccaatttcgatgtgcccatggagactacacacggagctcccctggattccgttggatccgacgtttggagtaccgaggaaccgatgccaacaaaagaaactgggtgggcctccttctcagaatttacgagttcactttccacgaaagacagcttaagaagtaactccccagtggaaatggagaccagcacagagccaatggaccctctcacaccctctgcagccgctctagctgtgcaacccgaggcagcgggaagcgtagctatggaagcttcctccgacggtgaagaggacgcagagtccacagataaagtgaccgagaccgtaatgaacgggggaatgaaggagactctgagtctcaccgtcgatgccaagaccgaaacagctgtgttcaaaagcgaggagggtaaactgtccacgagccaggacgcagcctgcaaagatgctgaggagtgtccagaaaccgccgaagcaaaatgtgcggcacccagacccccatcgtcttctcccgagcaaagcggagtggaaattcccgctctgcctgggcaatggagccagcagtag

SEQ ID NO: 62372 - DNA, 3228 bp, Artificial Sequence
  derived and/or modified sequence
cgtgggcacctccagataagaaaacaagctcagagagatgtggtgacttgctcaaatagtgacagaacttcctcggccatatggaggggtcatataatacccttgtgtcttcagtttgaggagagcttgtttcatatccatatcccactgtattcctgctaatctgctaatgcagtaaattggaggaaaactgttaccaggataacctgtaatgggcaaggagccacaaagaagaaaacatttcttttaatttttaaacttggtttgaaagaccagcatgttttggaaatttgatcttcactcatcatcccacatagacacacttctagaaagagaagatgtaacactgaaggagttaatggatgaggaagatgttttacaggaatgtaaagctcagaaccgcaaacttatagagtttctgttaaaagcagaatgtctcgaagatttagtctcattcattatagaagaaccacctcaagacatggatgaaaagatcagatacaagtatccaaatatatcttgtgagttgctcacttctgatgtctcccagatgaatgatagactgggagaagatgaatccttgctaatgaaattatatagcttcctcctaaacgattcccctttgaatccactacttgccagtttcttcagcaaggtgctaagtattcttatcagcagaaaaccagaacagattgtggatttcttaaagaagaagcatgattttgtagaccttattataaagcacataggaacttctgctatcatggatttgttgctcaggctcctgacgtgtatcgaacctccacagcccaggcaagatgtgctgaattggttaaatgaggagaaaattatccagaggcttgtggaaatagttcatccatcgcaagaagaagatcgacattcaaatgcatcacaatcactttgtgaaattgttcgcctgagcagagaccagatgttacaaattcagaacagtacagagcccgaccccctgcttgccactctagaaaagcaagaaattatagagcagcttctatcaaatattttccacaaggagaaaaatgagtcagccatagtcagtgcaatccagatattgctgactttacttgagacacgacgaccaacatttgaaggccatatagagatctgcccaccaggcatgagccattcagcttgttcagtaaacaagagtgttctagaagccatcagaggaagacttggatcttttcatgaactcctgctggagccacccaagaacatgttcttcaagtatacatggaataactttttgcatacacaagtggaaatttgtattgcactgattcttgcaagtccttttgaaaacacagaaaatgccacaattaccgatcaagactccactggtgataatttgttattaaaacatcttttccaaaaatgtcaattaatagaacgaatacttgaagcctgggaaatgaatgagaagaaacaggctgagggaggaagacggcatggttacatgggacacctaacgaggatagctaactgtatcgtgcacagcactgacaagggccccaacagtgcattagtgcagcagcttatcaaagatcttcccgacgaagtcagggaacgatgggagacgttctgcacaagctccttaggagaaactaacaagaggaacacggtagatctagccttttctgattatcagatgcaacaaatgacgtccaattttattgaccagtttggcttcaacgatgagaagtttgcagatcaagatgacattggcaatgtttcttttgatcgagtatcagacatcaactttactctcaatacaaatgaaagtggaaatattgccttgtttgaagcatgttgtaaggaaagaatacaacagtttgatgatggtggctctgatgaggaagatatatgggaggaaaagcacatcgcattcacaccagaatcccaaagacgatccagctcggggagtacagacagtgaggaaagtacagactctgaagaagaagatggagcaaagcaagacttgtttgaacccagcagtgccaacacggaggataaaatggaggtggacctgagtgaaccacccaactggtcagctaactttgatgtcccaatggaaacaacccacggtgctccattggattctgtgggatctgatgtctggagcacagaggagccgatgccaactaaagagacgggctgggcttctttttcagagttcacgtcttccctgagcacaaaagattctttaaggagtaattctccagtggaaatggaaaccagcactgaacccatggaccctctgactcccagtgcggctgccctggcagtgcagccagaagcggcaggcagtgtggccatggaagccagctctgacggagaggaggatgcagaaagtacagacaaggtaactgagacagtgatgaatggcggcatgaaggaaacgctcagcctcactgtagatgccaagacagagactgcggtcttcaaaagtgaggaagggaaactgtctacctctcaagatgctgcttgtaaagacgcagaggagtgtcccgagactgcagaggcgaagtgcgcggcgcccaggcctcccagcagcagtcccgagcagagtggtgtggagattccagcactcccaggacagtggagtcagcagtaagccctgggacaggtggcaagggtgggtcccttgacctttgcacgcctcctcaggaaccccctttcccgggtgagcccctctctgaagagactgtccttgggcctcctctggaagcagcacccccagaggacagggctcctcctgcttgcctcagggctgcctgacttgaatggcgttggacctcggggattactggtagataatatgctctggtctcgcctggtggtgagttttgccagccatggccagggtttggctccactggtggcacacgtggcctccgtggtatggacctggtggcttctccatcccactgtggcctctgtggtatggacctggtggcttctccatcctacccaaggtaacagtgtcttgcttcatcccactgactgctgggagagagcctctgggacttttctttggggcatcattttgttttgtctttcgtagcagggaaaggatatgacaatggggaggacagttcttttggaggttggaggggccaagccaaggacaggagcaagtgtgccctcattttgtttctacttttaatttctgtgtgttggccatactga

SEQ ID NO: 62373 - protein, 522 aa, Artificial Sequence
  derived and/or modified sequence
MGREELFLTFSFSSGFQESNVKTFCSKNILAILGFSSIIAVIALLAVGLTQNKALPENVKYGIVLDAGSSHTSLYIYKWPAEKENDTGVVHQVEECRVKGPGISKFVQKVNEIGIYLTDCMERAREVIPRSQHQETPVYLGATAGMRLLRMESEELADRVLDVVERSLSNYPFDFQGARIITGQEEGAYGWITINYLLGKFSQKTRWFSIVPYETNNQETFGALDLGGASTQVTFVPQNQTIESPDNALQFRLYGKDYNVYTHSFLCYGKDQALWQKLAKDIQVASNEILRDPCFHPGYKKVVNVSDLYKTPCTKRFEMTLPFQQFEIQGIGNYQQCHQSILELFNTSYCPYSQCAFNGIFLPPLQGDFGAFSAFYFVMKFLNLTSEKVSQEKVTEMMKKFCAQPWEEIKTSYAGVKEKYLSEYCFSGTYILSLLLQGYHFTADSWEHIHFIGKIQGSDAGWTLGYMLNLTNMIPAEQPLSTPLSHSTYVFLMVLFSLVLFTVAIIGLLIFHKPSYFWKDMV

SEQ ID NO: 62374 - DNA, 1569 bp, Artificial Sequence
  derived and/or modified sequence
atgggccgagaagaactttttctgacctttagcttttccagcggattccaagagtccaacgtcaagactttctgtagtaagaacatccttgccatcctcgggttctccagcattatcgctgtgatagctctcctcgcagtgggactcacccaaaacaaggctcttccagaaaacgttaaatatgggatcgtgctagatgccggcagcagtcacacatctttgtatatctataagtggccggccgaaaaagaaaacgacacaggagtagttcatcaggtggaggaatgccgggtgaaaggaccaggcatatccaagttcgtgcagaaagtgaacgagatcggaatctacttaactgactgcatggaacgggctagggaagtgattccacgctcccagcaccaggaaacaccagtatatctcggggcaaccgctggcatgcgcctcctgagaatggagtctgaagagctggccgatcgggttctggacgtcgttgaaagaagtctgagcaattatccctttgactttcagggagcgcgcattataacaggtcaggaggagggagcttatggatggatcacgatcaactaccttctgggcaagttctcccaaaagacccggtggttttctatcgtcccatatgaaactaacaaccaggaaacctttggggccctcgatcttgggggagccagcacgcaggttacctttgtgccccagaaccaaaccatcgagtctccggataatgcgctgcaatttagattgtacgggaaggactataacgtttatacacattcttttctgtgctacggcaaggaccaggccttatggcagaagctggcaaaagatattcaggtcgcatctaatgagatcttgagggacccctgcttccaccccggatataaaaaagtggtcaatgtttccgacctttacaagactccatgcactaaacgcttcgaaatgactttgccgttccagcagttcgaaatccaaggcatcggaaactaccagcagtgtcaccagagtatcctggaattatttaatacttcatactgcccttacagccagtgtgctttcaacggcatcttcctccccccacttcagggtgactttggagccttttccgccttttactttgtgatgaagttcctgaacttgacatccgagaaggtaagtcaggaaaaagtgaccgagatgatgaaaaaattctgtgcgcagccatgggaagaaattaaaacatcatacgcaggggtcaaggagaaatatctcagcgaatactgtttcagcggtacgtatatcctgtcactcctgctgcaggggtatcacttcactgcagattcttgggagcacattcacttcattggaaaaatacaggggagtgatgccggctggaccctgggttacatgctcaatctcacaaatatgattcctgctgagcagccactctccactccactcagtcattctacttacgtgttcctgatggttctcttcagcttggtgctatttaccgtagcgatcattgggttgttgatctttcacaagccctcatatttctggaaagatatggtgtag

SEQ ID NO: 62375 - DNA, 1569 bp, Artificial Sequence
  derived and/or modified sequence
atgggccgggaggagctgttcctgaccttctccttcagcagcggcttccaggagagcaatgtgaagaccttctgcagcaagaacatcctggccatcctgggcttcagcagcatcatcgccgtcatcgccctgctggccgtgggcctgacccagaacaaggccctgcctgaaaatgtgaagtatggaattgtgctggatgctggcagcagccacaccagcctgtacatctacaagtggccagctgagaaggaaaatgacacaggagtggtgcaccaggtggaggagtgccgggtgaagggccctggcatcagcaagtttgtgcagaaggtgaatgaaattggcatctacctgacagactgcatggagcgggcccgggaggtgatccccaggagccagcaccaggagacccctgtgtacctgggcgccacagctggcatgaggctgctgaggatggagagcgaggagctggccgacagagtgctggatgtggtggagaggagcctgagcaactacccctttgacttccagggcgcccgcatcatcaccggccaggaggagggcgcctacggctggatcaccatcaactacctgctgggcaagttcagccagaagacccgctggttcagcatcgtgccctatgagaccaacaaccaggagacctttggagccctggacctgggcggggccagcacccaggtgacctttgtgccccagaaccagaccatcgagagcccagacaatgccctgcagttccggctgtatggcaaggactacaacgtgtacacccacagcttcctgtgctacggcaaggaccaggccctgtggcagaagctggccaaggacatccaggtggccagcaatgagatcctgcgggacccctgcttccaccctggctacaagaaggtggtgaatgtgtctgacctgtacaagaccccctgcaccaagagatttgagatgaccctgcccttccagcagtttgagatccagggcatcggcaactaccagcagtgccaccagagcatcctggagctgttcaacaccagctactgcccctacagccagtgtgccttcaacggcatcttcctgccccccctgcagggcgactttggagccttcagcgccttctactttgtgatgaagttcctgaacctgaccagcgagaaggtgtcccaggagaaggtgacagagatgatgaagaagttctgtgcccagccctgggaggagatcaagaccagctatgctggggtgaaggagaagtacctgtctgagtactgcttcagcggcacctacatcctgagcctgctgctgcagggctaccacttcaccgctgacagctgggagcacatccacttcatcggcaagatccagggcagtgatgctggctggaccctgggctacatgctgaacctgaccaacatgatcccagctgagcagcccctgagcacccccctgagccacagcacctacgtgttcctgatggtgctcttcagcctggtgctcttcaccgtggccatcatcggcctgctgatcttccacaagcccagctacttctggaaggacatggtgtag

SEQ ID NO: 62376 - DNA, 1569 bp, Artificial Sequence
  derived and/or modified sequence
atgggccgggaggagctgttcctgaccttcagcttcagcagcggctttcaggagtcaaatgtcaaaacattttgcagcaagaatatcctggctatactgggtttttcctccatcatcgctgtgattgcccttctggctgttggcttgacccaaaataaagccctcccagaaaacgttaaatatgggatagtcctggacgcaggaagtagtcacacctccttatatatttataaatggccagcagagaaagagaatgacacgggggtagtgcatcaggtggaagagtgccgcgtgaagggtccagggatttctaaatttgtgcaaaaggttaacgaaataggtatctacctgaccgactgtatggagcgagcccgcgaggtgatccccaggagtcagcatcaggaaacaccagtgtatcttggggcaacagcgggaatgcggctacttcggatggagagcgaggagctcgctgacagagtgctcgatgtggtcgagcgctcgttgtctaactacccttttgacttccagggagcacgcatcattacaggccaggaagaaggagcatacgggtggatcaccatcaattatcttctgggcaagttttctcagaaaactagatggttcagcattgttccctatgagaccaacaaccaggaaacatttggggcgttagacctaggaggagccagcacgcaagtgacctttgttccacagaatcagaccatcgaaagtccagataacgcgttacagttccggctgtatggaaaggattataacgtgtacacccattctttcttgtgctatgggaaagatcaggctttatggcagaagctggctaaggatatacaggtcgccagtaatgagatcctgagagatccatgcttccacccggggtataaaaaggtggtcaacgtctccgacctgtacaaaaccccttgtaccaagcggtttgagatgaccctcccatttcagcagtttgagattcagggaatcggcaattaccagcagtgtcatcagtccatattagagctatttaatacatcgtattgtccctactcccagtgcgccttcaacggcattttcctgcctccccttcaaggcgactttggggctttctctgcattttacttcgttatgaagttcttgaacctaacctcagaaaaggtgtcacaggagaaggtcacagaaatgatgaagaagttttgcgcccagccatgggaggaaattaagaccagttatgccggcgtaaaagagaagtatctctctgagtattgcttctccggtacatatatcctcagcctgttactccaggggtatcactttactgcagactcctgggagcacatccatttcattggcaaaatccaggggtccgacgccggctggactctaggatacatgttgaacctcacgaacatgatccctgctgagcaacccctctctactccattgagccacagcacctacgtcttcctcatggtgctcttcagcctcgtgttattcacggtcgctattattggactcctgatcttccataagccaagctatttttggaaggatatggtgtag

SEQ ID NO: 62377 - DNA, 1569 bp, Artificial Sequence
  derived and/or modified sequence
atgggaagggaagagcttttcctcaccttctctttctctagcgggtttcaggagtccaacgtgaaaaccttctgctcgaagaatatattagccatcctcggcttttccagcattatagcagtaatagcgttacttgctgtaggactgactcagaacaaagcactgcctgagaatgtgaagtatggcatagttctggatgctggctcgtcacacacgtctctctacatttacaaatggcccgctgagaaagagaacgataccggagtggtgcaccaggtagaagaatgccgcgtaaagggccctggaatcagtaagtttgtacagaaggttaatgagattgggatctatcttaccgactgtatggaaagggccagagaagttatcccaaggtcacagcaccaggagacccctgtgtatttaggcgcaaccgcagggatgcgcctcctgaggatggaaagtgaagaattggctgatcgggtactggacgtggtcgagaggtccctgagcaattatccattcgatttccagggggcaaggattataaccggtcaggaggaaggagcatacggatggattaccattaattatttgctggggaaattctcacaaaagacccgctggttctccatcgttccttacgagactaataaccaggagactttcggggcactggacttaggaggcgcatctacccaggtaacttttgtgccgcagaatcagactattgagtcacccgacaatgctctccaatttagactctacggcaaggattacaatgtctatacacactctttcctgtgctacggcaaggaccaggctttgtggcagaagcttgccaaggatattcaagtggcttcgaacgagattctcagagacccatgcttccatccaggctacaagaaagtggtaaatgtgtcggacctttataaaaccccttgtaccaaacgatttgagatgacactaccgttccagcaattcgagattcagggcatcggtaattaccagcagtgtcaccagtccattcttgagctgtttaatacctcctattgcccatacagccagtgcgccttcaacggaattttcttgccgcctttgcaaggtgatttcggggcatttagcgccttttacttcgtcatgaagttcctgaatttaacttccgagaaagtttcacaagagaaagtaacagaaatgatgaagaaattctgcgcccagccttgggaggagataaagacctcctatgcaggggtcaaggaaaagtacctctcagagtactgttttagtggaacatacattttatctttgttgctccagggctaccactttaccgctgacagctgggagcacattcacttcattggaaagatacagggctcagacgctgggtggactctcgggtacatgcttaacctgacgaacatgattccagcggaacagcctctgagcactcccctatcacactctacctacgtctttttgatggtcctgttcagtctagttttattcaccgtcgcaattatcggcctactcatcttccacaaaccgtcctatttctggaaagacatggtttag

SEQ ID NO: 62378 - DNA, 1569 bp, Artificial Sequence
  derived and/or modified sequence
atgggcagagaggagctgttcctgaccttcagcttcagcagcggcttccaggagagcaacgtgaagaccttctgcagcaagaacatcctggccatcctgggcttcagcagcatcatcgccgtgatcgccctgctggccgtgggcctgacccagaacaaggccctgcccgagaacgtgaagtacggcatcgtgctggacgccggcagcagccacaccagcctgtacatctacaagtggcccgccgagaaggagaacgacaccggcgtggtgcaccaggtggaggagtgcagagtgaagggccccggcatcagcaagttcgtgcagaaggtgaacgagatcggcatctacctgaccgactgcatggagagagccagagaggtgatccccagaagccagcaccaggagacccccgtgtacctgggcgccaccgccggcatgagactgctgagaatggagagcgaggagctggccgacagagtgctggacgtggtggagagaagcctgagcaactaccccttcgacttccagggcgccagaatcatcaccggccaggaggagggcgcctacggctggatcaccatcaactacctgctgggcaagttcagccagaagaccagatggttcagcatcgtgccctacgagaccaacaaccaggagaccttcggcgccctggacctgggcggcgccagcacccaggtgaccttcgtgccccagaaccagaccatcgagagccccgacaacgccctgcagttcagactgtacggcaaggactacaacgtgtacacccacagcttcctgtgctacggcaaggaccaggccctgtggcagaagctggccaaggacatccaggtggccagcaacgagatcctgagagacccctgcttccaccccggctacaagaaggtggtgaacgtgagcgacctgtacaagaccccctgcaccaagagattcgagatgaccctgcccttccagcagttcgagatccagggcatcggcaactaccagcagtgccaccagagcatcctggagctgttcaacaccagctactgcccctacagccagtgcgccttcaacggcatcttcctgccccccctgcagggcgacttcggcgccttcagcgccttctacttcgtgatgaagttcctgaacctgaccagcgagaaggtgagccaggagaaggtgaccgagatgatgaagaagttctgcgcccagccctgggaggagatcaagaccagctacgccggcgtgaaggagaagtacctgagcgagtactgcttcagcggcacctacatcctgagcctgctgctgcagggctaccacttcaccgccgacagctgggagcacatccacttcatcggcaagatccagggcagcgacgccggctggaccctgggctacatgctgaacctgaccaacatgatccccgccgagcagcccctgagcacccccctgagccacagcacctacgtgttcctgatggtgctgttcagcctggtgctgttcaccgtggccatcatcggcctgctgatcttccacaagcccagctacttctggaaggacatggtgtag

SEQ ID NO: 62379 - DNA, 12515 bp, Artificial Sequence
  derived and/or modified sequence
cctgttgctctttgctctaatgagccttgagaaaggattgctggtcatgggaccagaggctttatggggagggaagaactgttcttgactttcagtttttcgagcgggtttcaagagtctaacgtgaagacattttgctccaagaatatcctagccatccttggcttctcctctatcatagctgtgatagctttgcttgctgtggggttgacccagaacaaagcattgccagaaaacgttaagtatgggattgtgctggatgcgggttcttctcacacaagtttatacatctataagtggccagcagaaaaggagaatgacacaggcgtggtgcatcaagtagaagaatgcagggttaaaggtcctggaatctcaaaatttgttcagaaagtaaatgaaataggcatttacctgactgattgcatggaaagagctagggaagtgattccaaggtcccagcaccaagagacacccgtttacctgggagccacggcaggcatgcggttgctcaggatggaaagtgaagagttggcagacagggttctggatgtggtggagaggagcctcagcaactacccctttgacttccagggtgccaggatcattactggccaagaggaaggtgcctatggctggattactatcaactatctgctgggcaaattcagtcagaaaacaaggtggttcagcatagtcccatatgaaaccaataatcaggaaacctttggagctttggaccttgggggagcctctacacaagtcacttttgtaccccaaaaccagactatcgagtccccagataatgctctgcaatttcgcctctatggcaaggactacaatgtctacacacatagcttcttgtgctatgggaaggatcaggcactctggcagaaactggccaaggacattcaggttgcaagtaatgaaattctcagggacccatgctttcatcctggatataagaaggtagtgaacgtaagtgacctttacaagaccccctgcaccaagagatttgagatgactcttccattccagcagtttgaaatccagggtattggaaactatcaacaatgccatcaaagcatcctggagctcttcaacaccagttactgcccttactcccagtgtgccttcaatgggattttcttgccaccactccagggggattttggggcattttcagctttttactttgtgatgaagtttttaaacttgacatcagagaaagtctctcaggaaaaggtgactgagatgatgaaaaagttctgtgctcagccttgggaggagataaaaacatcttacgctggagtaaaggagaagtacctgagtgaatactgcttttctggtacctacattctctccctccttctgcaaggctatcatttcacagctgattcctgggagcacatccatttcattggcaagatccagggcagcgacgccggctggactttgggctacatgctgaacctgaccaacatgatcccagctgagcaaccattgtccacacctctctcccactccacctatgtcttcctcatggttctattctccctggtccttttcacagtggccatcataggcttgcttatctttcacaagccttcatatttctggaaagatatggtatagcaaaagcagctgaaatatgctggctggagtgaggaaaaaaatcgtccagggagcattttcctccatcgcagtgttcaaggccatccttccctgtctgccagggccagtcttgacgagtgtgaagcttccttggcttttactgaagcctttcttttggaggtattcaatatcctttgcctcaaggacttcggcagatactgtctctttcatgagtttttcccagctacacctttctcctttgtactttgtgcttgtataggttttaaagacctgacacctttcataatctttgctttataaaagaacaatattgactttgtctagaagaactgagagtcttgagtcctgtgataggaggctgagctggctgaaagaagaatctcaggaactggttcagttgtactctttaagaacccctttctctctcctgtttgccatccattaagaaagccatatgatgcctttggagaaggcagacacacattccattcccagcctgctctgtgggtaggagaattttctacagtaggcaaatatgtgctaaagccaaagagttttataaggaaatatatgtgctcatgcagtcaatacagttctcaatcccacccaaagcaggtatgtcaataaatcacatattcctaggtgatacccaaatgctacagagtggaacactcagacctgagatttgcaaaaagcagatgtaaatatatgcattcaaacatcagggcttactatgaggtaggtggtatatacatgtcacaaataaaaatacagttacaactcagggtcacaaaaaatgcatcttccaatgcatatttttattatggtaaaatatacataaatataattcaccattttaacatttaattcatattaaatacgtacaaatcagtgacatttagtacattcacagtgttgtgccaccatcaccactatttagttccagaacatttgcatcatcaatacattgtctagagacaagactatcctgggtaggcagaaaccatagatcttttgtgtttacagctatggaaaccaactgtaccataaagatagttcactgagttttaaagccaagccacatcttatttttccaaggtttaatttagtgagagggcagcattagtgtggagtggcatgcttttgccctatcgtggaatttacacatcagaatgtgcaggatccaagtctgaaagtgttgccacccgtcacacaacatgggctttgtttgcttattccatgaagcagcagctatagaccttaccatggaaacatgaagagaccctgcacccctttccttaaggattgctgcaagagttacctgttgagcaggattgactggtgatgtttcattctgaccttgtcccaagctctccatctctagatctggggactgactgttgagctgatggggaaagaaaagctctcacacaaaccggaagccaaatgtcccctatctcttgaatgatcaagtcacttttgacaacatccaggtgaatataaaaacttaataaagctgtggaaaggaactcttaatcttcttttctgctacttaggttaaattcactagatcttgattaggaatcaaaattcgaattgggacatgttcaaattctttcttgtggtagttgcctatactgtcatcgctgctgttggttgagcatttgtggtgtaccacgctgtgtgctcaagggtattacattcatcttctcatttaatcctcacaacaatctgaagaaggtaggtattacaattcccacttcatagaaacagaaactgaggttcagagaggttaagtcatttgcccaaatggctgagccaaagcctaccatgtacctaacctttattttctttcccgaacataccaggctgtctcctcataacttccaagcatgcacttaaaactccacatgaatacaaggttcatgggacttggtattcatagaaagggaggcagaaagctggtctgttcctgataggcttgtaatttaatatcattctgttcatgtgctttggatggaagcacatctggcatatgatgctaatcagtggttcccatacccctggcttcctaattttaatgtttgctcacagcatagtagattgacatcaaatagtggccgatgatgatgaaaataaaggtcaaataagttgagccaataacagccgcttttttccttctgtctgcgtatacaaagcactgtcatgcacacaatctattctgaccctcacaacaacccataagggtgtaaatagtatttccattttacaaatgaggatcacacaaactactacatggcagagcagatactccaactcatgtcttctggttgaagcctattgctttttcttttctaaacactttccctcagcaagttggaattagacttcacaagtctccttcagagaacacaaatcttttcttattccattcctgtttggttgcctacgtccaatctccccctccccagagatgccaaaaaaaaaatcctttaaggtatttgggagccaaactcaacttgttaaaatctcaaattatggagacaatcagcagacacaacctaaccccaattattttggcaggaaggttggtttagaggcagatccagcaatctgctttgggccactctgggtggggtaggtgaaataagattggtcactgttaactaattttaatattggattggccattggttatcactgattaccattctcccctggattttcacccaggactcaaaacttggttctgctaaccctgttcctttatgaggaaccttttaaagattcctttataaggtgggagttttttttctatgaacctataggggagaaaaaagatcagcagaagtcattacttttttttttttttttttttttttttgagagagagtctcactccattgcccaggctggagtgcagtggtgctatctcggctcactgcaacctccgcctcctgggttcaagcaattctcctgcctcagcctcccgagtagctgggattgcaggtgcccaccaccacacccggctaatttttgtatttttagtaaagacagggtttcaccatgttggccaggctggtctccaactcccaatctcaggtgatcctattgcctcgggctcccaaagtgctgggattacaggagtgagccaccatgcctggccagaagtggttacttctgtagacaaaagaataatgctacttaatcaggctttctgtgtgacaagaaagagaaagaaaataaagaagtttcaattcatccaattcttaataagaaatatgtaaataaaattttttaaaattacacttcattttaatgttgtatcagtcaaggtccctgcaagagatggatggtatggtacactcaaactgggtaacacaggagagttttcagaaagcaactaaatccaaaatactatcaaggaatcaatataaaaattgttaatatttttctcatactaaattttcaaaatattttgtgtctattacatttacagcacatcttaattaggactagctgtgtgttcacctcacatgtggcttgtagctaccatactggacagcacatgtccaaaaaaatacacgtaaagttaaagtttaaaagacacaggaactaagccctcattgtctttcccttgggaggtagtttaaagagctatagatgctgtaacattcttgctattatttattatatatgacattattcctaaaaaagcttttgagatcctaggttgtattcctcaggttttgttgccttcccatgaagatgtgaaggcagggatgcctgttattcagtccaagatgcatgacaagagaccttgggaaagtttcatctggatttaaagattaattcttgatgcttacattccatactcaaaatgtaaatttgaatattaaaataaagatgattttttttttggagctagtcttgctctgttgcccaggctggaatgcagtggcatgatcatggctcactgcagcctcgacctcccaagctcaagcaaggctacaggtgtgcacctaagtagctaggactacaggtgtgcaccaccatgtctagctatttttttttctgtagagacagggttttcctatgttgtccaggctggtctcgaactcctgccctcaagcaatcctcctgccttggcctcccaaagtgttgagattacaggcgtaagccactgcacctggccaagatgaatattttaatagctcacagaacaaagtttgccacataatgataaaattactatgaaaatatattccctttattgtcagtttaaaagatgaactgagtttcacccaaactggtctggcccctctctgattcaaataccaatagttgctctgattcaaattccaactgttagaacatgacagctgctcataactagctttgcttactaaccatgtttctttccatttgtattaggtcctttactttttataacagcctcaaagtttcatgaattgctgcagtaaacattgattttcatgtttgtgagtctgcaagccagctgggcagctctacttcaggtggtaagggtggatcagacctattccatatacctcttgttctccttgtccagtggtttctagggatatgttctcatgatgaaccccgcagaggctcgtgaaagtgagaggaaactaggatgcctcttaaggtcttggtcaggatggggtctcctgtcacttctgtcacaggctattgtaagtcatatgagcaagctcaataaaatataaacaagtcagataaacagtgggaggaatggcaaagtcatatggccaaggccatgagtgattaattttaacacaggaaaaaagtaaagcattaaatgcgattatttaatatacaatgtcttattaactgaaatataaaatgtgtttactgtaaaatataatctgtttatctcaccaaagaaatattatctttaaaaaatgtcattacttctaagacatcatcagtctgcaacttctttccatagccttaatcaggatgctgtggcagctcccacattagcctcgcattctaaactggtagatgtcctaggaaaccatacatctatgtatttttcttattttatacgtttaggacaatgtatagctaattacccaactttttatttgcatacaaatctaatacaactgaacacaatcagttttatcacaggtataatggatttttcaatagtgaggaggtgcctccatgagccttctctttagaaaagtggcattcaagactcttcatttgaagtgaagattgctatgtcttttgcattgctctattttacataaattaagttataaattgacactataatcaactgacaccatgatcagtgatgatgatcaccctcatcagcactagagttgacttgtttttataacccctttgcatgtatgttgaatagcaaagttcatcagagaacatgtattagtcaatggtaagtaagatactctcatctaagaaataacatcacctcttctaatgaagttctaagaagagagggaagaaaaagtcttgggagctagtcagggaatagtgtgtatttgcaattacctaaactgaactctaccattactcctaacccagttcctcctcctgtgttttacatgattaatgccacccctgcctcaatgaaccaagatcagctccatcactgggacctccccattctgcctgtgcaatatttttcttttttatttctccttctaatattactgttattgctccagtaaagagctgtaatatattttacctggactgataccaggaatggtggtgttgcttccaatctgttgctgctagattaatctttgcaaagcacaggcttaatttcattgctgctcaactaaaaccactggtggctttccattgcctacaaaataaagtcaacctccccatcagacattcaaggctttcaatgatccatggccgccagctctctccaggctcatatcccactccactcctctgatgtttcctacactacactacactatactacactacagccaggtagaatgactgttcacccaacaccactcaggttgtcttctcaacttggaatactcttgcaccttcaaagctcatttcaaatgccccttcatttgtgaagccttctccaaatttccaagtcagaatgtctcttccttgtgctaccacaaccctttaactgagcctccattagtgcactgagaccattctgttcagtgtctgggtgaagcttcctggtgaaaaatatgttacctatttctttctgaaaagttggattcagggatattatcacggacctaaggtaatagttctagccaacctccctgtccactgccaggccgactacaaacccttctgttgctggcgagctggtccgcaccactagttctgcttcactctatttatctcttgatgtaaccatcttctttctccaggttttaagaaccagcccaactcctggttccctgatgaagcttttattcccctagccacatggaacttttcctttttggaacatgcctttagtttctgtgtagtttgccatgcagcacttcattgtacacattattaaaacagaattttaaggattagaatgaaccttaaaagatcatgcatctcaaaatttaatgtacatacaaattacccagggattttgttgaaataaaaattatttaattttaattaatataaataattcagtaggtctggggtgaggcctgaggttttacatttccaacaagctgccaggtaaagccaatacatctgtccaggaatcacactttgcgtatcaaaggtctagatgacattatcattccaaagagtttcttttacaggctctcagatcagtgttcatccactacctgactactgtcattcacaggcattctgttccacagcaggccagctaacgtggtatttacaaagctcactcctcttatacaacaatccaagtgtttcttttgtcagttgtctgtgccccaggagatccctctctgccttgccttgccctctgcctttggagaccagcacctcatactcagtgaaggcctggagtgcttaagagggatttcttccagctctcttgccctggtcttcagtgtattagatgtattacctccatgctctcagtagaggcccataggaaagagtaggtaggttatgccagctcacacgcatcctttaaaaatggtttagaagtttagctggtttcttattactcctgtctatggatgtttccttctgtcactctactagggatgaaacagctaatcatgttcaatagttacatttagattggtttttaaaaactatgattgtattagttcgtttccatgctgctgataaagacatatctgagactggaaacaaaaagggtttaattggacttacagttccacatggctggggaggcctcaaaatcaggtgggaggcaaaaggtacttcttacgtggtggcatcaagagcaaaatgaggaagaagcaaaagcagaaactcttcataaacccaccagatcttgtgggacttattatcacgagaatagcacagaaaagactggcctccatgattcaattacctcccactgcgtccctcccacaacatgtgggaattctgggagatacaattcaagttgagatttgggtggggacacagccaaaccatatcattcctccctgggctcctccaaatttcataatcctcacatttcaaaaccaatcattccttcccaacagttccccaaagtcttaactcatttcagcattaacccaaaagtccacagtccaaagtctcatctgagacaaggcaagtcccttccacttacaagcctgtaaaagcaagctagttacctcctagatacaatggggggtacaggtattgggtaaatacagctgttccaaatgagagaaattggccaaaacaaaggggttacagggtccatgcaagtctgaaatccagtggggcagtcaaattttaaagctccataatgatctcctttgactccatgtctcacattcaggtcatgctgatgcaagagataggttcccatggtcttgtgcagctccgcccctgtggctttgcagagtacagcctccctcctggctgctttctcaggctgatgttgagtgtctgtagcttttccaggcacaagatgcaagttggtggttgatctaccattctggggtctaccattctggggtctaccgttctgggactgtggccttcttctcacagctccactaggcagtgccccaacagggactctgtgtgggggctctgccccacatttcccttccacactgccctaggagaggttccccatgagggctctgcccctgcagcaaacttttgcctggacatccaggtgtttccatatatattctgaaatctaggcagaggttcccaaatctcaattcttgacatctctgcacccacaggctcaacatcacatggaagctgccaatgcttggggcctctaccctctgaagccacagcccaagctctatgttggctcctttcagccatggctggagcagctgggacacagggcaccaagtccctaggctgcacacagcacagagaccctgggcccagcccacaaaaccactttttcctcctgggcctctgggcctgtgatgggaggggctgccatgaaggtctctgacatgacctggagacattttccccatggtcttggggattaacattaggctccttgctgcttatgcaaatttctgcagccagcttgaatttctccttaaaaaaaatgggtttttcttttctactgcatcatcaggctgcagattttccacatttatgctcttgtttcccttttaaaacagaatgtttttaacagcacccaagtcaccttttgaatgctttgctgcttagaaatttattccaccagataccctaagtcatctctctcaagctctaagttccacaaatctctagggcaagggtgaaatgctgccagtctccttgctaaaacataacaagggtcacctttacttcagttcccaacaaggtcttcatctccatctgagaccacctcagcctggaccttattgttcatatcactatcagtatttttgtcaatgccattcacagtctctaggaggttccaaactttcctacattttcctatcttcttctgagccctccagattatttcaacacccagttccaaagttgcttccacattttcgggtatcttttcagcaatgccccactctactggtactattagtccattttcatgctgctgataaagacatacctgagactgggaacaaaaagaggtttaattggacttatagttccacctggctggggaggcctcagaatcatggcaggaggtgaaaggcatttcttacacggcagcagcaagagaaaaatgaagaagcagcaaaagcagaaacccctgataaaaccatcagatctcgtgagacttattcactatcacaagaatagcatgggaaagaccagcccccttgattcaattacctccccctgggtcctgtgggaattctggaaggtacaattcaagttgagatttgggtggggacacagccaaaccatatcaatgattttgtactttaaccagctgaatggaagtacaatctcttgctatatgacacaataattatttgcaaaatgagtaaacatatcataaggaaattatttttacaaggtttgaaacctgaaatgcagtctattatcatacataactaaaaatagagcctcaataaacagattcccagttttgaaaatgcaacatttgtactccacattgtcagttttcttaggtatatttataaatactcctataaaaatgtaaagaaacacataatgtagattgctaattttataataacacaagttgattttgacatccaacttattaattatgaaatgacttttggcctagtaacaatgaaaatgggggcaaatacagataaatggtaattcttagaatgaactactcagcaccaattctaagtttttcttgatggtaaatcataatgttccctttctcctcggttctgcaatctataggcataccataattgtaatcaatagcttaaaaatatgtctctctgtcctattctgtatctgtatctcttggatttttacctttgcaatagtcaactgaaccatcttcttggagtactcatgaagatggaagtctacatggagaatacaggatgaatccactctgtctcctgcagtgaagtctgtttgaaggatgtatttggctgtcttctggacaggccattctaataacagaaacaaacaagttattttaaaacttattggaatattcaaatattaaccaaagtagaaaaatataatacacatccatgtgcccatcacagaacttcactgattatcatcatttagccagtcttgaagaagcaagtgctaattacaatcacaaatgaaacaagattcagacttcatgaagagcactgcgctataataaaagaagaaatgagcacatacattcttttactgacagtcaaatggtgaaggtgggcagaatcattatgtgatgcaacatggcaaaagtatacagacagtgcatccagaggaaggcaccttgctgaatgactagaatggaagtaggagacattttgcaggcccccttcatcctgcagggagaaccagaaccacagcagctctatttgcctattcctctttaaattacaaagttaaaatttgggagtagtagaaaatcaattggttatcttatagagtctcctagaatatttcattggcattgagaaggtggaaaatgcaaattatatactttaaaatgtaatttttgcttttcacatatgcttaaagcctaaaacctcttaataaacttcttctgaaatata

SEQ ID NO: 62380 - DNA, 1209 bp, Artificial Sequence
  derived and/or modified sequence
atggagcgggcaagagaagtcattcctcggtctcagcaccaagagacccccgtttatcttggcgccaccgccggcatgcggcttctcaggatggaaagcgaagagttggccgaccgcgttctggacgtggtcgaacgttcactgtctaactatccttttgattttcagggggccagaattatcacgggccaagaggagggcgcatatggctggattaccatcaactaccttttggggaaatttagtcagaaaaccaggtggttcagcattgtcccttacgagaccaacaaccaagaaacctttggagcactcgacctgggaggagcatccactcaagtgacgtttgttccccaaaaccagaccatagaaagtcctgataacgcattgcagttcaggctttatggcaaggactacaatgtctacacgcatagctttctatgctacggtaaggatcaggccctgtggcagaagctggcgaaggacatacaggttgcaagcaatgagatccttagagacccttgtttccatccgggctacaagaaggtggtgaacgtgagcgatctgtacaagacgccatgtacaaagaggttcgagatgactctaccatttcagcagtttgaaatacaaggcataggtaattaccaacagtgtcaccagtctattctggagttgttcaacaccagctactgtccttatagtcagtgtgcatttaatgggattttcctgccccctctgcagggggacttcggcgcatttagcgcgttttattttgtcatgaagttcttgaacctcacttcagagaaagtctcacaggaaaaggtgaccgaaatgatgaaaaaattttgcgcccagccctgggaagagattaagacgtcctatgcaggcgtaaaggagaaatatctcagcgagtactgcttcagtggcacttatattctcagcctcctgttacagggctaccatttcaccgctgattcctgggaacacattcactttatcggcaaaatacagggctcggatgcaggttggacattaggttacatgctgaaccttactaatatgatacccgccgagcaacctctttctactcctctctcgcattctacctacgttttcctcatggtgctcttctccctagtgctcttcaccgtggccatcattggactgctgatctttcataagccgtcgtacttctggaaggatatggtgtag

SEQ ID NO: 62381 - DNA, 1209 bp, Artificial Sequence
  derived and/or modified sequence
atggagcgggcccgggaggtgatccccaggagccagcaccaggagacccctgtgtacctgggcgccacagctggcatgaggctgctgaggatggagagcgaggagctggccgacagagtgctggatgtggtggagaggagcctgagcaactacccctttgacttccagggcgcccgcatcatcaccggccaggaggagggcgcctacggctggatcaccatcaactacctgctgggcaagttcagccagaagacccgctggttcagcatcgtgccctatgagaccaacaaccaggagacctttggagccctggacctgggcggggccagcacccaggtgacctttgtgccccagaaccagaccatcgagagcccagacaatgccctgcagttccggctgtatggcaaggactacaacgtgtacacccacagcttcctgtgctacggcaaggaccaggccctgtggcagaagctggccaaggacatccaggtggccagcaatgagatcctgcgggacccctgcttccaccctggctacaagaaggtggtgaatgtgtctgacctgtacaagaccccctgcaccaagagatttgagatgaccctgcccttccagcagtttgagatccagggcatcggcaactaccagcagtgccaccagagcatcctggagctgttcaacaccagctactgcccctacagccagtgtgccttcaacggcatcttcctgccccccctgcagggcgactttggagccttcagcgccttctactttgtgatgaagttcctgaacctgaccagcgagaaggtgtcccaggagaaggtgacagagatgatgaagaagttctgtgcccagccctgggaggagatcaagaccagctatgctggggtgaaggagaagtacctgtctgagtactgcttcagcggcacctacatcctgagcctgctgctgcagggctaccacttcaccgctgacagctgggagcacatccacttcatcggcaagatccagggcagtgatgctggctggaccctgggctacatgctgaacctgaccaacatgatcccagctgagcagcccctgagcacccccctgagccacagcacctacgtgttcctgatggtgctcttcagcctggtgctcttcaccgtggccatcatcggcctgctgatcttccacaagcccagctacttctggaaggacatggtgtag

SEQ ID NO: 62382 - DNA, 1209 bp, Artificial Sequence
  derived and/or modified sequence
atggagcgggcccgggaggtgatcccccggagccagcaccaggagactccagtctatctaggggcaactgccggaatgagacttctgagaatggaaagcgaggagctggctgacagggttctggatgtagtcgagcgaagtttaagcaactaccctttcgacttccaaggggcacgaatcatcacgggacaggaggagggggcttacggatggattactatcaactacctcttggggaagttttctcagaaaactaggtggtttagtattgtgccgtacgagacaaacaatcaggaaacattcggcgctctcgacctgggcggcgcctctacccaggtcacttttgtcccccaaaatcagacaattgaaagccccgataacgccttgcaattccgattgtacggaaaggattacaatgtttatactcactcttttctctgctatgggaaggatcaggccttgtggcaaaaattggcgaaggacatccaggtagcatctaatgaaatcctgcgagatccttgctttcatcccggatacaaaaaagtggtcaacgttagtgatttgtacaaaacaccatgcactaagcgcttcgaaatgacactgccctttcagcagttcgagatacagggaattggaaactaccagcagtgccaccagtcaatcttggaactgtttaacacctcatactgcccctattctcagtgcgcctttaacggtattttcctgcctcctctgcagggcgattttggggcattctcagctttttactttgtgatgaagtttcttaatctgactagtgagaaggtgtcccaggaaaaggtgaccgaaatgatgaagaaattttgtgcacagccttgggaggaaatcaagacatcatatgccggagtaaaagagaagtatctgtcagagtattgcttttcaggaacatatatcctaagccttctgctgcaagggtatcatttcactgcagactcttgggaacacatccactttatcggcaagatccagggcagcgatgctgggtggactctcggctacatgttgaacctgacaaacatgattcctgcagaacaacccctgagcactcctctgtcacattccacctatgtatttttgatggtgttgttttcactggttctcttcaccgtggcaataatagggctgctgatctttcataagccttcttacttctggaaagatatggtgtag

SEQ ID NO: 62383 - DNA, 1209 bp, Artificial Sequence
  derived and/or modified sequence
atggagcgcgctagggaagtgatccccaggtcccagcatcaagaaacaccagtgtatctgggtgccactgccggtatgcgcctgctccggatggaaagcgaggaactcgccgatcgggtcctggatgtcgtggagcgatcactgagtaattacccctttgactttcagggggctaggatcataaccggtcaggaagagggcgcttacggctggattacaatcaactacctgcttgggaagttcagtcagaagacacgttggttctcgatcgtgccctatgagacgaataatcaagagacgttcggagccctggatctcggtggcgcatccactcaggtgaccttcgtcccccagaatcagactatcgaatcacccgataatgcattacagttccggctttacgggaaagactacaacgtgtatacacacagttttctttgctatggaaaggatcaggctttgtggcagaagctcgctaaggacatccaggtcgcctcaaacgagatactacgggacccctgttttcaccctggatacaaaaaggttgtgaacgtgagcgacctgtacaagaccccctgcactaagaggtttgaaatgactttgccctttcagcagtttgagatccaggggatcgggaactaccagcagtgtcaccaaagtattctcgagttgtttaacactagttattgcccatattcgcaatgcgccttcaacggaatctttctcccacctctccaaggcgatttcggggctttctctgcattctacttcgttatgaaatttttgaacttgacaagcgagaaagtttcccaggagaaggttacagagatgatgaaaaagttctgcgcccagccttgggaagaaatcaaaacgagctatgctggggtgaaggagaaatacctttctgaatattgtttctctggcacgtacatcctcagcctcctgctccaaggatatcatttcacagcagactcgtgggagcatattcatttcattggaaaaattcagggcagcgatgccggatggacactgggatacatgcttaaccttaccaatatgattcccgcagaacagccgctgtcgacccccctttctcattctacgtacgtgttccttatggttctgttcagtctggtgctcttcaccgtcgccataatcggcttactaatattccacaagccttcctatttttggaaagatatggtgtag

SEQ ID NO: 62384 - DNA, 1209 bp, Artificial Sequence
  derived and/or modified sequence
atggagagagccagagaggtgatccccagaagccagcaccaggagacccccgtgtacctgggcgccaccgccggcatgagactgctgagaatggagagcgaggagctggccgacagagtgctggacgtggtggagagaagcctgagcaactaccccttcgacttccagggcgccagaatcatcaccggccaggaggagggcgcctacggctggatcaccatcaactacctgctgggcaagttcagccagaagaccagatggttcagcatcgtgccctacgagaccaacaaccaggagaccttcggcgccctggacctgggcggcgccagcacccaggtgaccttcgtgccccagaaccagaccatcgagagccccgacaacgccctgcagttcagactgtacggcaaggactacaacgtgtacacccacagcttcctgtgctacggcaaggaccaggccctgtggcagaagctggccaaggacatccaggtggccagcaacgagatcctgagagacccctgcttccaccccggctacaagaaggtggtgaacgtgagcgacctgtacaagaccccctgcaccaagagattcgagatgaccctgcccttccagcagttcgagatccagggcatcggcaactaccagcagtgccaccagagcatcctggagctgttcaacaccagctactgcccctacagccagtgcgccttcaacggcatcttcctgccccccctgcagggcgacttcggcgccttcagcgccttctacttcgtgatgaagttcctgaacctgaccagcgagaaggtgagccaggagaaggtgaccgagatgatgaagaagttctgcgcccagccctgggaggagatcaagaccagctacgccggcgtgaaggagaagtacctgagcgagtactgcttcagcggcacctacatcctgagcctgctgctgcagggctaccacttcaccgccgacagctgggagcacatccacttcatcggcaagatccagggcagcgacgccggctggaccctgggctacatgctgaacctgaccaacatgatccccgccgagcagcccctgagcacccccctgagccacagcacctacgtgttcctgatggtgctgttcagcctggtgctgttcaccgtggccatcatcggcctgctgatcttccacaagcccagctacttctggaaggacatggtgtag

SEQ ID NO: 62385 - DNA, 12589 bp, Artificial Sequence
  derived and/or modified sequence
agggaagaagggagaaagagagagagatttgaatatacattgcttcaaggatgcaaaaaattacaacctggaaaaggcttcgagtaactttaggaaaatgagctgctggactcctcagtcaatctgtcctttctagtcaatgaaaaagacagggtttgaggttccttccgaaacggggccggctaatttagcccctcccacgagcccaagggtctgttatatctctgtttccttgaggacctctctcacggagacggaccacagcaagcagaggctgggggggggaaagacgaggaaagaggaggaaaacaaaagctgctacttatggaagatacaaaggagtctaacgtgaagacattttgctccaagaatatcctagccatccttggcttctcctctatcatagctgtgatagctttgcttgctgtggggttgacccagaacaaagcattgccagaaaacgttaagtatgggattgtgctggatgcgggttcttctcacacaagtttatacatctataagtggccagcagaaaaggagaatgacacaggcgtggtgcatcaagtagaagaatgcagggttaaaggatggaaagtgaagagttggcagacagggttctggatgtggtggagaggagcctcagcaactacccctttgacttccagggtgccaggatcattactggccaagaggaaggtgcctatggctggattactatcaactatctgctgggcaaattcagtcagaaaacaaggtggttcagcatagtcccatatgaaaccaataatcaggaaacctttggagctttggaccttgggggagcctctacacaagtcacttttgtaccccaaaaccagactatcgagtccccagataatgctctgcaatttcgcctctatggcaaggactacaatgtctacacacatagcttcttgtgctatgggaaggatcaggcactctggcagaaactggccaaggacattcaggttgcaagtaatgaaattctcagggacccatgctttcatcctggatataagaaggtagtgaacgtaagtgacctttacaagaccccctgcaccaagagatttgagatgactcttccattccagcagtttgaaatccagggtattggaaactatcaacaatgccatcaaagcatcctggagctcttcaacaccagttactgcccttactcccagtgtgccttcaatgggattttcttgccaccactccagggggattttggggcattttcagctttttactttgtgatgaagtttttaaacttgacatcagagaaagtctctcaggaaaaggtgactgagatgatgaaaaagttctgtgctcagccttgggaggagataaaaacatcttacgctggagtaaaggagaagtacctgagtgaatactgcttttctggtacctacattctctccctccttctgcaaggctatcatttcacagctgattcctgggagcacatccatttcattggcaagatccagggcagcgacgccggctggactttgggctacatgctgaacctgaccaacatgatcccagctgagcaaccattgtccacacctctctcccactccacctatgtcttcctcatggttctattctccctggtccttttcacagtggccatcataggcttgcttatctttcacaagccttcatatttctggaaagatatggtatagcaaaagcagctgaaatatgctggctggagtgaggaaaaaaatcgtccagggagcattttcctccatcgcagtgttcaaggccatccttccctgtctgccagggccagtcttgacgagtgtgaagcttccttggcttttactgaagcctttcttttggaggtattcaatatcctttgcctcaaggacttcggcagatactgtctctttcatgagtttttcccagctacacctttctcctttgtactttgtgcttgtataggttttaaagacctgacacctttcataatctttgctttataaaagaacaatattgactttgtctagaagaactgagagtcttgagtcctgtgataggaggctgagctggctgaaagaagaatctcaggaactggttcagttgtactctttaagaacccctttctctctcctgtttgccatccattaagaaagccatatgatgcctttggagaaggcagacacacattccattcccagcctgctctgtgggtaggagaattttctacagtaggcaaatatgtgctaaagccaaagagttttataaggaaatatatgtgctcatgcagtcaatacagttctcaatcccacccaaagcaggtatgtcaataaatcacatattcctaggtgatacccaaatgctacagagtggaacactcagacctgagatttgcaaaaagcagatgtaaatatatgcattcaaacatcagggcttactatgaggtaggtggtatatacatgtcacaaataaaaatacagttacaactcagggtcacaaaaaatgcatcttccaatgcatatttttattatggtaaaatatacataaatataattcaccattttaacatttaattcatattaaatacgtacaaatcagtgacatttagtacattcacagtgttgtgccaccatcaccactatttagttccagaacatttgcatcatcaatacattgtctagagacaagactatcctgggtaggcagaaaccatagatcttttgtgtttacagctatggaaaccaactgtaccataaagatagttcactgagttttaaagccaagccacatcttatttttccaaggtttaatttagtgagagggcagcattagtgtggagtggcatgcttttgccctatcgtggaatttacacatcagaatgtgcaggatccaagtctgaaagtgttgccacccgtcacacaacatgggctttgtttgcttattccatgaagcagcagctatagaccttaccatggaaacatgaagagaccctgcacccctttccttaaggattgctgcaagagttacctgttgagcaggattgactggtgatgtttcattctgaccttgtcccaagctctccatctctagatctggggactgactgttgagctgatggggaaagaaaagctctcacacaaaccggaagccaaatgtcccctatctcttgaatgatcaagtcacttttgacaacatccaggtgaatataaaaacttaataaagctgtggaaaggaactcttaatcttcttttctgctacttaggttaaattcactagatcttgattaggaatcaaaattcgaattgggacatgttcaaattctttcttgtggtagttgcctatactgtcatcgctgctgttggttgagcatttgtggtgtaccacgctgtgtgctcaagggtattacattcatcttctcatttaatcctcacaacaatctgaagaaggtaggtattacaattcccacttcatagaaacagaaactgaggttcagagaggttaagtcatttgcccaaatggctgagccaaagcctaccatgtacctaacctttattttctttcccgaacataccaggctgtctcctcataacttccaagcatgcacttaaaactccacatgaatacaaggttcatgggacttggtattcatagaaagggaggcagaaagctggtctgttcctgataggcttgtaatttaatatcattctgttcatgtgctttggatggaagcacatctggcatatgatgctaatcagtggttcccatacccctggcttcctaattttaatgtttgctcacagcatagtagattgacatcaaatagtggccgatgatgatgaaaataaaggtcaaataagttgagccaataacagccgcttttttccttctgtctgcgtatacaaagcactgtcatgcacacaatctattctgaccctcacaacaacccataagggtgtaaatagtatttccattttacaaatgaggatcacacaaactactacatggcagagcagatactccaactcatgtcttctggttgaagcctattgctttttcttttctaaacactttccctcagcaagttggaattagacttcacaagtctccttcagagaacacaaatcttttcttattccattcctgtttggttgcctacgtccaatctccccctccccagagatgccaaaaaaaaaatcctttaaggtatttgggagccaaactcaacttgttaaaatctcaaattatggagacaatcagcagacacaacctaaccccaattattttggcaggaaggttggtttagaggcagatccagcaatctgctttgggccactctgggtggggtaggtgaaataagattggtcactgttaactaattttaatattggattggccattggttatcactgattaccattctcccctggattttcacccaggactcaaaacttggttctgctaaccctgttcctttatgaggaaccttttaaagattcctttataaggtgggagttttttttctatgaacctataggggagaaaaaagatcagcagaagtcattacttttttttttttttttttttttttttgagagagagtctcactccattgcccaggctggagtgcagtggtgctatctcggctcactgcaacctccgcctcctgggttcaagcaattctcctgcctcagcctcccgagtagctgggattgcaggtgcccaccaccacacccggctaatttttgtatttttagtaaagacagggtttcaccatgttggccaggctggtctccaactcccaatctcaggtgatcctattgcctcgggctcccaaagtgctgggattacaggagtgagccaccatgcctggccagaagtggttacttctgtagacaaaagaataatgctacttaatcaggctttctgtgtgacaagaaagagaaagaaaataaagaagtttcaattcatccaattcttaataagaaatatgtaaataaaattttttaaaattacacttcattttaatgttgtatcagtcaaggtccctgcaagagatggatggtatggtacactcaaactgggtaacacaggagagttttcagaaagcaactaaatccaaaatactatcaaggaatcaatataaaaattgttaatatttttctcatactaaattttcaaaatattttgtgtctattacatttacagcacatcttaattaggactagctgtgtgttcacctcacatgtggcttgtagctaccatactggacagcacatgtccaaaaaaatacacgtaaagttaaagtttaaaagacacaggaactaagccctcattgtctttcccttgggaggtagtttaaagagctatagatgctgtaacattcttgctattatttattatatatgacattattcctaaaaaagcttttgagatcctaggttgtattcctcaggttttgttgccttcccatgaagatgtgaaggcagggatgcctgttattcagtccaagatgcatgacaagagaccttgggaaagtttcatctggatttaaagattaattcttgatgcttacattccatactcaaaatgtaaatttgaatattaaaataaagatgattttttttttggagctagtcttgctctgttgcccaggctggaatgcagtggcatgatcatggctcactgcagcctcgacctcccaagctcaagcaaggctacaggtgtgcacctaagtagctaggactacaggtgtgcaccaccatgtctagctatttttttttctgtagagacagggttttcctatgttgtccaggctggtctcgaactcctgccctcaagcaatcctcctgccttggcctcccaaagtgttgagattacaggcgtaagccactgcacctggccaagatgaatattttaatagctcacagaacaaagtttgccacataatgataaaattactatgaaaatatattccctttattgtcagtttaaaagatgaactgagtttcacccaaactggtctggcccctctctgattcaaataccaatagttgctctgattcaaattccaactgttagaacatgacagctgctcataactagctttgcttactaaccatgtttctttccatttgtattaggtcctttactttttataacagcctcaaagtttcatgaattgctgcagtaaacattgattttcatgtttgtgagtctgcaagccagctgggcagctctacttcaggtggtaagggtggatcagacctattccatatacctcttgttctccttgtccagtggtttctagggatatgttctcatgatgaaccccgcagaggctcgtgaaagtgagaggaaactaggatgcctcttaaggtcttggtcaggatggggtctcctgtcacttctgtcacaggctattgtaagtcatatgagcaagctcaataaaatataaacaagtcagataaacagtgggaggaatggcaaagtcatatggccaaggccatgagtgattaattttaacacaggaaaaaagtaaagcattaaatgcgattatttaatatacaatgtcttattaactgaaatataaaatgtgtttactgtaaaatataatctgtttatctcaccaaagaaatattatctttaaaaaatgtcattacttctaagacatcatcagtctgcaacttctttccatagccttaatcaggatgctgtggcagctcccacattagcctcgcattctaaactggtagatgtcctaggaaaccatacatctatgtatttttcttattttatacgtttaggacaatgtatagctaattacccaactttttatttgcatacaaatctaatacaactgaacacaatcagttttatcacaggtataatggatttttcaatagtgaggaggtgcctccatgagccttctctttagaaaagtggcattcaagactcttcatttgaagtgaagattgctatgtcttttgcattgctctattttacataaattaagttataaattgacactataatcaactgacaccatgatcagtgatgatgatcaccctcatcagcactagagttgacttgtttttataacccctttgcatgtatgttgaatagcaaagttcatcagagaacatgtattagtcaatggtaagtaagatactctcatctaagaaataacatcacctcttctaatgaagttctaagaagagagggaagaaaaagtcttgggagctagtcagggaatagtgtgtatttgcaattacctaaactgaactctaccattactcctaacccagttcctcctcctgtgttttacatgattaatgccacccctgcctcaatgaaccaagatcagctccatcactgggacctccccattctgcctgtgcaatatttttcttttttatttctccttctaatattactgttattgctccagtaaagagctgtaatatattttacctggactgataccaggaatggtggtgttgcttccaatctgttgctgctagattaatctttgcaaagcacaggcttaatttcattgctgctcaactaaaaccactggtggctttccattgcctacaaaataaagtcaacctccccatcagacattcaaggctttcaatgatccatggccgccagctctctccaggctcatatcccactccactcctctgatgtttcctacactacactacactatactacactacagccaggtagaatgactgttcacccaacaccactcaggttgtcttctcaacttggaatactcttgcaccttcaaagctcatttcaaatgccccttcatttgtgaagccttctccaaatttccaagtcagaatgtctcttccttgtgctaccacaaccctttaactgagcctccattagtgcactgagaccattctgttcagtgtctgggtgaagcttcctggtgaaaaatatgttacctatttctttctgaaaagttggattcagggatattatcacggacctaaggtaatagttctagccaacctccctgtccactgccaggccgactacaaacccttctgttgctggcgagctggtccgcaccactagttctgcttcactctatttatctcttgatgtaaccatcttctttctccaggttttaagaaccagcccaactcctggttccctgatgaagcttttattcccctagccacatggaacttttcctttttggaacatgcctttagtttctgtgtagtttgccatgcagcacttcattgtacacattattaaaacagaattttaaggattagaatgaaccttaaaagatcatgcatctcaaaatttaatgtacatacaaattacccagggattttgttgaaataaaaattatttaattttaattaatataaataattcagtaggtctggggtgaggcctgaggttttacatttccaacaagctgccaggtaaagccaatacatctgtccaggaatcacactttgcgtatcaaaggtctagatgacattatcattccaaagagtttcttttacaggctctcagatcagtgttcatccactacctgactactgtcattcacaggcattctgttccacagcaggccagctaacgtggtatttacaaagctcactcctcttatacaacaatccaagtgtttcttttgtcagttgtctgtgccccaggagatccctctctgccttgccttgccctctgcctttggagaccagcacctcatactcagtgaaggcctggagtgcttaagagggatttcttccagctctcttgccctggtcttcagtgtattagatgtattacctccatgctctcagtagaggcccataggaaagagtaggtaggttatgccagctcacacgcatcctttaaaaatggtttagaagtttagctggtttcttattactcctgtctatggatgtttccttctgtcactctactagggatgaaacagctaatcatgttcaatagttacatttagattggtttttaaaaactatgattgtattagttcgtttccatgctgctgataaagacatatctgagactggaaacaaaaagggtttaattggacttacagttccacatggctggggaggcctcaaaatcaggtgggaggcaaaaggtacttcttacgtggtggcatcaagagcaaaatgaggaagaagcaaaagcagaaactcttcataaacccaccagatcttgtgggacttattatcacgagaatagcacagaaaagactggcctccatgattcaattacctcccactgcgtccctcccacaacatgtgggaattctgggagatacaattcaagttgagatttgggtggggacacagccaaaccatatcattcctccctgggctcctccaaatttcataatcctcacatttcaaaaccaatcattccttcccaacagttccccaaagtcttaactcatttcagcattaacccaaaagtccacagtccaaagtctcatctgagacaaggcaagtcccttccacttacaagcctgtaaaagcaagctagttacctcctagatacaatggggggtacaggtattgggtaaatacagctgttccaaatgagagaaattggccaaaacaaaggggttacagggtccatgcaagtctgaaatccagtggggcagtcaaattttaaagctccataatgatctcctttgactccatgtctcacattcaggtcatgctgatgcaagagataggttcccatggtcttgtgcagctccgcccctgtggctttgcagagtacagcctccctcctggctgctttctcaggctgatgttgagtgtctgtagcttttccaggcacaagatgcaagttggtggttgatctaccattctggggtctaccattctggggtctaccgttctgggactgtggccttcttctcacagctccactaggcagtgccccaacagggactctgtgtgggggctctgccccacatttcccttccacactgccctaggagaggttccccatgagggctctgcccctgcagcaaacttttgcctggacatccaggtgtttccatatatattctgaaatctaggcagaggttcccaaatctcaattcttgacatctctgcacccacaggctcaacatcacatggaagctgccaatgcttggggcctctaccctctgaagccacagcccaagctctatgttggctcctttcagccatggctggagcagctgggacacagggcaccaagtccctaggctgcacacagcacagagaccctgggcccagcccacaaaaccactttttcctcctgggcctctgggcctgtgatgggaggggctgccatgaaggtctctgacatgacctggagacattttccccatggtcttggggattaacattaggctccttgctgcttatgcaaatttctgcagccagcttgaatttctccttaaaaaaaatgggtttttcttttctactgcatcatcaggctgcagattttccacatttatgctcttgtttcccttttaaaacagaatgtttttaacagcacccaagtcaccttttgaatgctttgctgcttagaaatttattccaccagataccctaagtcatctctctcaagctctaagttccacaaatctctagggcaagggtgaaatgctgccagtctccttgctaaaacataacaagggtcacctttacttcagttcccaacaaggtcttcatctccatctgagaccacctcagcctggaccttattgttcatatcactatcagtatttttgtcaatgccattcacagtctctaggaggttccaaactttcctacattttcctatcttcttctgagccctccagattatttcaacacccagttccaaagttgcttccacattttcgggtatcttttcagcaatgccccactctactggtactattagtccattttcatgctgctgataaagacatacctgagactgggaacaaaaagaggtttaattggacttatagttccacctggctggggaggcctcagaatcatggcaggaggtgaaaggcatttcttacacggcagcagcaagagaaaaatgaagaagcagcaaaagcagaaacccctgataaaaccatcagatctcgtgagacttattcactatcacaagaatagcatgggaaagaccagcccccttgattcaattacctccccctgggtcctgtgggaattctggaaggtacaattcaagttgagatttgggtggggacacagccaaaccatatcaatgattttgtactttaaccagctgaatggaagtacaatctcttgctatatgacacaataattatttgcaaaatgagtaaacatatcataaggaaattatttttacaaggtttgaaacctgaaatgcagtctattatcatacataactaaaaatagagcctcaataaacagattcccagttttgaaaatgcaacatttgtactccacattgtcagttttcttaggtatatttataaatactcctataaaaatgtaaagaaacacataatgtagattgctaattttataataacacaagttgattttgacatccaacttattaattatgaaatgacttttggcctagtaacaatgaaaatgggggcaaatacagataaatggtaattcttagaatgaactactcagcaccaattctaagtttttcttgatggtaaatcataatgttccctttctcctcggttctgcaatctataggcataccataattgtaatcaatagcttaaaaatatgtctctctgtcctattctgtatctgtatctcttggatttttacctttgcaatagtcaactgaaccatcttcttggagtactcatgaagatggaagtctacatggagaatacaggatgaatccactctgtctcctgcagtgaagtctgtttgaaggatgtatttggctgtcttctggacaggccattctaataacagaaacaaacaagttattttaaaacttattggaatattcaaatattaaccaaagtagaaaaatataatacacatccatgtgcccatcacagaacttcactgattatcatcatttagccagtcttgaagaagcaagtgctaattacaatcacaaatgaaacaagattcagacttcatgaagagcactgcgctataataaaagaagaaatgagcacatacattcttttactgacagtcaaatggtgaaggtgggcagaatcattatgtgatgcaacatggcaaaagtatacagacagtgcatccagaggaaggcaccttgctgaatgactagaatggaagtaggagacattttgcaggcccccttcatcctgcagggagaaccagaaccacagcagctctatttgcctattcctctttaaattacaaagttaaaatttgggagtagtagaaaatcaattggttatcttatagagtctcctagaatatttcattggcattgagaaggtggaaaatgcaaattatatactttaaaatgtaatttttgcttttcacatatgcttaaagcctaaaacctcttaataaacttcttctgaaatata

SEQ ID NO: 62386 - DNA, 12471 bp, Artificial Sequence
  derived and/or modified sequence
agggaagaagggagaaagagagagagatttgaatatacattgcttcaaggatgcaaaaaattacaacctggaaaaggcttcgagtaactttaggaaaatgagctgctggactcctcagtcaatctgtcctttctagtcaatgaaaaagacagggtttgaggttccttccgaaacggggccggctaatttagcccctcccacgagcccaagggtctgttatatctctgtttccttgaggacctctctcacggagacggaccacagcaagcagaggctgggggggggaaagacgaggaaagaggaggaaaacaaaagctgctacttatggaagatacaaaggagtctaacgtgaagacattttgctccaagaatatcctagccatccttggcttctcctctatcatagctgtgatagctttgcttgctgtggggttgacccagaacaaagcattgccagaaaacgttaaggatggaaagtgaagagttggcagacagggttctggatgtggtggagaggagcctcagcaactacccctttgacttccagggtgccaggatcattactggccaagaggaaggtgcctatggctggattactatcaactatctgctgggcaaattcagtcagaaaacaaggtggttcagcatagtcccatatgaaaccaataatcaggaaacctttggagctttggaccttgggggagcctctacacaagtcacttttgtaccccaaaaccagactatcgagtccccagataatgctctgcaatttcgcctctatggcaaggactacaatgtctacacacatagcttcttgtgctatgggaaggatcaggcactctggcagaaactggccaaggacattcaggttgcaagtaatgaaattctcagggacccatgctttcatcctggatataagaaggtagtgaacgtaagtgacctttacaagaccccctgcaccaagagatttgagatgactcttccattccagcagtttgaaatccagggtattggaaactatcaacaatgccatcaaagcatcctggagctcttcaacaccagttactgcccttactcccagtgtgccttcaatgggattttcttgccaccactccagggggattttggggcattttcagctttttactttgtgatgaagtttttaaacttgacatcagagaaagtctctcaggaaaaggtgactgagatgatgaaaaagttctgtgctcagccttgggaggagataaaaacatcttacgctggagtaaaggagaagtacctgagtgaatactgcttttctggtacctacattctctccctccttctgcaaggctatcatttcacagctgattcctgggagcacatccatttcattggcaagatccagggcagcgacgccggctggactttgggctacatgctgaacctgaccaacatgatcccagctgagcaaccattgtccacacctctctcccactccacctatgtcttcctcatggttctattctccctggtccttttcacagtggccatcataggcttgcttatctttcacaagccttcatatttctggaaagatatggtatagcaaaagcagctgaaatatgctggctggagtgaggaaaaaaatcgtccagggagcattttcctccatcgcagtgttcaaggccatccttccctgtctgccagggccagtcttgacgagtgtgaagcttccttggcttttactgaagcctttcttttggaggtattcaatatcctttgcctcaaggacttcggcagatactgtctctttcatgagtttttcccagctacacctttctcctttgtactttgtgcttgtataggttttaaagacctgacacctttcataatctttgctttataaaagaacaatattgactttgtctagaagaactgagagtcttgagtcctgtgataggaggctgagctggctgaaagaagaatctcaggaactggttcagttgtactctttaagaacccctttctctctcctgtttgccatccattaagaaagccatatgatgcctttggagaaggcagacacacattccattcccagcctgctctgtgggtaggagaattttctacagtaggcaaatatgtgctaaagccaaagagttttataaggaaatatatgtgctcatgcagtcaatacagttctcaatcccacccaaagcaggtatgtcaataaatcacatattcctaggtgatacccaaatgctacagagtggaacactcagacctgagatttgcaaaaagcagatgtaaatatatgcattcaaacatcagggcttactatgaggtaggtggtatatacatgtcacaaataaaaatacagttacaactcagggtcacaaaaaatgcatcttccaatgcatatttttattatggtaaaatatacataaatataattcaccattttaacatttaattcatattaaatacgtacaaatcagtgacatttagtacattcacagtgttgtgccaccatcaccactatttagttccagaacatttgcatcatcaatacattgtctagagacaagactatcctgggtaggcagaaaccatagatcttttgtgtttacagctatggaaaccaactgtaccataaagatagttcactgagttttaaagccaagccacatcttatttttccaaggtttaatttagtgagagggcagcattagtgtggagtggcatgcttttgccctatcgtggaatttacacatcagaatgtgcaggatccaagtctgaaagtgttgccacccgtcacacaacatgggctttgtttgcttattccatgaagcagcagctatagaccttaccatggaaacatgaagagaccctgcacccctttccttaaggattgctgcaagagttacctgttgagcaggattgactggtgatgtttcattctgaccttgtcccaagctctccatctctagatctggggactgactgttgagctgatggggaaagaaaagctctcacacaaaccggaagccaaatgtcccctatctcttgaatgatcaagtcacttttgacaacatccaggtgaatataaaaacttaataaagctgtggaaaggaactcttaatcttcttttctgctacttaggttaaattcactagatcttgattaggaatcaaaattcgaattgggacatgttcaaattctttcttgtggtagttgcctatactgtcatcgctgctgttggttgagcatttgtggtgtaccacgctgtgtgctcaagggtattacattcatcttctcatttaatcctcacaacaatctgaagaaggtaggtattacaattcccacttcatagaaacagaaactgaggttcagagaggttaagtcatttgcccaaatggctgagccaaagcctaccatgtacctaacctttattttctttcccgaacataccaggctgtctcctcataacttccaagcatgcacttaaaactccacatgaatacaaggttcatgggacttggtattcatagaaagggaggcagaaagctggtctgttcctgataggcttgtaatttaatatcattctgttcatgtgctttggatggaagcacatctggcatatgatgctaatcagtggttcccatacccctggcttcctaattttaatgtttgctcacagcatagtagattgacatcaaatagtggccgatgatgatgaaaataaaggtcaaataagttgagccaataacagccgcttttttccttctgtctgcgtatacaaagcactgtcatgcacacaatctattctgaccctcacaacaacccataagggtgtaaatagtatttccattttacaaatgaggatcacacaaactactacatggcagagcagatactccaactcatgtcttctggttgaagcctattgctttttcttttctaaacactttccctcagcaagttggaattagacttcacaagtctccttcagagaacacaaatcttttcttattccattcctgtttggttgcctacgtccaatctccccctccccagagatgccaaaaaaaaaatcctttaaggtatttgggagccaaactcaacttgttaaaatctcaaattatggagacaatcagcagacacaacctaaccccaattattttggcaggaaggttggtttagaggcagatccagcaatctgctttgggccactctgggtggggtaggtgaaataagattggtcactgttaactaattttaatattggattggccattggttatcactgattaccattctcccctggattttcacccaggactcaaaacttggttctgctaaccctgttcctttatgaggaaccttttaaagattcctttataaggtgggagttttttttctatgaacctataggggagaaaaaagatcagcagaagtcattacttttttttttttttttttttttttttgagagagagtctcactccattgcccaggctggagtgcagtggtgctatctcggctcactgcaacctccgcctcctgggttcaagcaattctcctgcctcagcctcccgagtagctgggattgcaggtgcccaccaccacacccggctaatttttgtatttttagtaaagacagggtttcaccatgttggccaggctggtctccaactcccaatctcaggtgatcctattgcctcgggctcccaaagtgctgggattacaggagtgagccaccatgcctggccagaagtggttacttctgtagacaaaagaataatgctacttaatcaggctttctgtgtgacaagaaagagaaagaaaataaagaagtttcaattcatccaattcttaataagaaatatgtaaataaaattttttaaaattacacttcattttaatgttgtatcagtcaaggtccctgcaagagatggatggtatggtacactcaaactgggtaacacaggagagttttcagaaagcaactaaatccaaaatactatcaaggaatcaatataaaaattgttaatatttttctcatactaaattttcaaaatattttgtgtctattacatttacagcacatcttaattaggactagctgtgtgttcacctcacatgtggcttgtagctaccatactggacagcacatgtccaaaaaaatacacgtaaagttaaagtttaaaagacacaggaactaagccctcattgtctttcccttgggaggtagtttaaagagctatagatgctgtaacattcttgctattatttattatatatgacattattcctaaaaaagcttttgagatcctaggttgtattcctcaggttttgttgccttcccatgaagatgtgaaggcagggatgcctgttattcagtccaagatgcatgacaagagaccttgggaaagtttcatctggatttaaagattaattcttgatgcttacattccatactcaaaatgtaaatttgaatattaaaataaagatgattttttttttggagctagtcttgctctgttgcccaggctggaatgcagtggcatgatcatggctcactgcagcctcgacctcccaagctcaagcaaggctacaggtgtgcacctaagtagctaggactacaggtgtgcaccaccatgtctagctatttttttttctgtagagacagggttttcctatgttgtccaggctggtctcgaactcctgccctcaagcaatcctcctgccttggcctcccaaagtgttgagattacaggcgtaagccactgcacctggccaagatgaatattttaatagctcacagaacaaagtttgccacataatgataaaattactatgaaaatatattccctttattgtcagtttaaaagatgaactgagtttcacccaaactggtctggcccctctctgattcaaataccaatagttgctctgattcaaattccaactgttagaacatgacagctgctcataactagctttgcttactaaccatgtttctttccatttgtattaggtcctttactttttataacagcctcaaagtttcatgaattgctgcagtaaacattgattttcatgtttgtgagtctgcaagccagctgggcagctctacttcaggtggtaagggtggatcagacctattccatatacctcttgttctccttgtccagtggtttctagggatatgttctcatgatgaaccccgcagaggctcgtgaaagtgagaggaaactaggatgcctcttaaggtcttggtcaggatggggtctcctgtcacttctgtcacaggctattgtaagtcatatgagcaagctcaataaaatataaacaagtcagataaacagtgggaggaatggcaaagtcatatggccaaggccatgagtgattaattttaacacaggaaaaaagtaaagcattaaatgcgattatttaatatacaatgtcttattaactgaaatataaaatgtgtttactgtaaaatataatctgtttatctcaccaaagaaatattatctttaaaaaatgtcattacttctaagacatcatcagtctgcaacttctttccatagccttaatcaggatgctgtggcagctcccacattagcctcgcattctaaactggtagatgtcctaggaaaccatacatctatgtatttttcttattttatacgtttaggacaatgtatagctaattacccaactttttatttgcatacaaatctaatacaactgaacacaatcagttttatcacaggtataatggatttttcaatagtgaggaggtgcctccatgagccttctctttagaaaagtggcattcaagactcttcatttgaagtgaagattgctatgtcttttgcattgctctattttacataaattaagttataaattgacactataatcaactgacaccatgatcagtgatgatgatcaccctcatcagcactagagttgacttgtttttataacccctttgcatgtatgttgaatagcaaagttcatcagagaacatgtattagtcaatggtaagtaagatactctcatctaagaaataacatcacctcttctaatgaagttctaagaagagagggaagaaaaagtcttgggagctagtcagggaatagtgtgtatttgcaattacctaaactgaactctaccattactcctaacccagttcctcctcctgtgttttacatgattaatgccacccctgcctcaatgaaccaagatcagctccatcactgggacctccccattctgcctgtgcaatatttttcttttttatttctccttctaatattactgttattgctccagtaaagagctgtaatatattttacctggactgataccaggaatggtggtgttgcttccaatctgttgctgctagattaatctttgcaaagcacaggcttaatttcattgctgctcaactaaaaccactggtggctttccattgcctacaaaataaagtcaacctccccatcagacattcaaggctttcaatgatccatggccgccagctctctccaggctcatatcccactccactcctctgatgtttcctacactacactacactatactacactacagccaggtagaatgactgttcacccaacaccactcaggttgtcttctcaacttggaatactcttgcaccttcaaagctcatttcaaatgccccttcatttgtgaagccttctccaaatttccaagtcagaatgtctcttccttgtgctaccacaaccctttaactgagcctccattagtgcactgagaccattctgttcagtgtctgggtgaagcttcctggtgaaaaatatgttacctatttctttctgaaaagttggattcagggatattatcacggacctaaggtaatagttctagccaacctccctgtccactgccaggccgactacaaacccttctgttgctggcgagctggtccgcaccactagttctgcttcactctatttatctcttgatgtaaccatcttctttctccaggttttaagaaccagcccaactcctggttccctgatgaagcttttattcccctagccacatggaacttttcctttttggaacatgcctttagtttctgtgtagtttgccatgcagcacttcattgtacacattattaaaacagaattttaaggattagaatgaaccttaaaagatcatgcatctcaaaatttaatgtacatacaaattacccagggattttgttgaaataaaaattatttaattttaattaatataaataattcagtaggtctggggtgaggcctgaggttttacatttccaacaagctgccaggtaaagccaatacatctgtccaggaatcacactttgcgtatcaaaggtctagatgacattatcattccaaagagtttcttttacaggctctcagatcagtgttcatccactacctgactactgtcattcacaggcattctgttccacagcaggccagctaacgtggtatttacaaagctcactcctcttatacaacaatccaagtgtttcttttgtcagttgtctgtgccccaggagatccctctctgccttgccttgccctctgcctttggagaccagcacctcatactcagtgaaggcctggagtgcttaagagggatttcttccagctctcttgccctggtcttcagtgtattagatgtattacctccatgctctcagtagaggcccataggaaagagtaggtaggttatgccagctcacacgcatcctttaaaaatggtttagaagtttagctggtttcttattactcctgtctatggatgtttccttctgtcactctactagggatgaaacagctaatcatgttcaatagttacatttagattggtttttaaaaactatgattgtattagttcgtttccatgctgctgataaagacatatctgagactggaaacaaaaagggtttaattggacttacagttccacatggctggggaggcctcaaaatcaggtgggaggcaaaaggtacttcttacgtggtggcatcaagagcaaaatgaggaagaagcaaaagcagaaactcttcataaacccaccagatcttgtgggacttattatcacgagaatagcacagaaaagactggcctccatgattcaattacctcccactgcgtccctcccacaacatgtgggaattctgggagatacaattcaagttgagatttgggtggggacacagccaaaccatatcattcctccctgggctcctccaaatttcataatcctcacatttcaaaaccaatcattccttcccaacagttccccaaagtcttaactcatttcagcattaacccaaaagtccacagtccaaagtctcatctgagacaaggcaagtcccttccacttacaagcctgtaaaagcaagctagttacctcctagatacaatggggggtacaggtattgggtaaatacagctgttccaaatgagagaaattggccaaaacaaaggggttacagggtccatgcaagtctgaaatccagtggggcagtcaaattttaaagctccataatgatctcctttgactccatgtctcacattcaggtcatgctgatgcaagagataggttcccatggtcttgtgcagctccgcccctgtggctttgcagagtacagcctccctcctggctgctttctcaggctgatgttgagtgtctgtagcttttccaggcacaagatgcaagttggtggttgatctaccattctggggtctaccattctggggtctaccgttctgggactgtggccttcttctcacagctccactaggcagtgccccaacagggactctgtgtgggggctctgccccacatttcccttccacactgccctaggagaggttccccatgagggctctgcccctgcagcaaacttttgcctggacatccaggtgtttccatatatattctgaaatctaggcagaggttcccaaatctcaattcttgacatctctgcacccacaggctcaacatcacatggaagctgccaatgcttggggcctctaccctctgaagccacagcccaagctctatgttggctcctttcagccatggctggagcagctgggacacagggcaccaagtccctaggctgcacacagcacagagaccctgggcccagcccacaaaaccactttttcctcctgggcctctgggcctgtgatgggaggggctgccatgaaggtctctgacatgacctggagacattttccccatggtcttggggattaacattaggctccttgctgcttatgcaaatttctgcagccagcttgaatttctccttaaaaaaaatgggtttttcttttctactgcatcatcaggctgcagattttccacatttatgctcttgtttcccttttaaaacagaatgtttttaacagcacccaagtcaccttttgaatgctttgctgcttagaaatttattccaccagataccctaagtcatctctctcaagctctaagttccacaaatctctagggcaagggtgaaatgctgccagtctccttgctaaaacataacaagggtcacctttacttcagttcccaacaaggtcttcatctccatctgagaccacctcagcctggaccttattgttcatatcactatcagtatttttgtcaatgccattcacagtctctaggaggttccaaactttcctacattttcctatcttcttctgagccctccagattatttcaacacccagttccaaagttgcttccacattttcgggtatcttttcagcaatgccccactctactggtactattagtccattttcatgctgctgataaagacatacctgagactgggaacaaaaagaggtttaattggacttatagttccacctggctggggaggcctcagaatcatggcaggaggtgaaaggcatttcttacacggcagcagcaagagaaaaatgaagaagcagcaaaagcagaaacccctgataaaaccatcagatctcgtgagacttattcactatcacaagaatagcatgggaaagaccagcccccttgattcaattacctccccctgggtcctgtgggaattctggaaggtacaattcaagttgagatttgggtggggacacagccaaaccatatcaatgattttgtactttaaccagctgaatggaagtacaatctcttgctatatgacacaataattatttgcaaaatgagtaaacatatcataaggaaattatttttacaaggtttgaaacctgaaatgcagtctattatcatacataactaaaaatagagcctcaataaacagattcccagttttgaaaatgcaacatttgtactccacattgtcagttttcttaggtatatttataaatactcctataaaaatgtaaagaaacacataatgtagattgctaattttataataacacaagttgattttgacatccaacttattaattatgaaatgacttttggcctagtaacaatgaaaatgggggcaaatacagataaatggtaattcttagaatgaactactcagcaccaattctaagtttttcttgatggtaaatcataatgttccctttctcctcggttctgcaatctataggcataccataattgtaatcaatagcttaaaaatatgtctctctgtcctattctgtatctgtatctcttggatttttacctttgcaatagtcaactgaaccatcttcttggagtactcatgaagatggaagtctacatggagaatacaggatgaatccactctgtctcctgcagtgaagtctgtttgaaggatgtatttggctgtcttctggacaggccattctaataacagaaacaaacaagttattttaaaacttattggaatattcaaatattaaccaaagtagaaaaatataatacacatccatgtgcccatcacagaacttcactgattatcatcatttagccagtcttgaagaagcaagtgctaattacaatcacaaatgaaacaagattcagacttcatgaagagcactgcgctataataaaagaagaaatgagcacatacattcttttactgacagtcaaatggtgaaggtgggcagaatcattatgtgatgcaacatggcaaaagtatacagacagtgcatccagaggaaggcaccttgctgaatgactagaatggaagtaggagacattttgcaggcccccttcatcctgcagggagaaccagaaccacagcagctctatttgcctattcctctttaaattacaaagttaaaatttgggagtagtagaaaatcaattggttatcttatagagtctcctagaatatttcattggcattgagaaggtggaaaatgcaaattatatactttaaaatgtaatttttgcttttcacatatgcttaaagcctaaaacctcttaataaacttcttctgaaatata

SEQ ID NO: 62387 - DNA, 1119 bp, Artificial Sequence
  derived and/or modified sequence
atggaatctgaagaactggcagatcgggttctcgatgtggtggagagatccctcagcaattatcccttcgattttcagggtgcccgcatcatcaccggccaagaagagggcgcctacgggtggatcaccataaattacctgctgggtaagttttctcagaagaccaggtggttttccattgtaccttacgaaaccaataaccaggagactttcggtgcccttgatctaggtggcgcctcgacccaggttacattcgtgccgcagaaccagactattgagagcccggacaatgcactccaatttcgactctacggtaaggattataatgtttacacccattcctttctgtgttatgggaaagaccaagccctgtggcagaaactggccaaggatattcaggtcgcatctaacgagatcctcagagacccctgcttccaccccggctacaaaaaagttgttaatgtcagcgatctgtataagacgccctgtactaagagattcgaaatgacactgcccttccagcagtttgagattcaggggataggtaactatcagcaatgccaccaatccatcctcgagctttttaacacgtcctactgcccctatagtcagtgtgcttttaatggcatcttccttccacctctgcagggggacttcggagctttcagcgcgttttacttcgtgatgaagttcttgaaccttacgagtgagaaggtatcacaggagaaagtgacggagatgatgaagaagttctgtgcccaaccctgggaggaaatcaagacctcttacgccggcgtcaaggaaaaatacttgtctgaatattgtttctctggcacctatattctgagcctgcttctccagggttaccattttaccgcagacagttgggagcatattcattttataggtaagatccagggctccgacgcagggtggacactggggtacatgttgaatctaaccaatatgattcccgctgagcagccactgtccacaccgctgtctcattcaacctacgtctttctgatggtactctttagcctcgttctgtttaccgtggctattatcgggctgctgatctttcacaagccaagctatttctggaaggatatggtatag

SEQ ID NO: 62388 - DNA, 1119 bp, Artificial Sequence
  derived and/or modified sequence
atggagagcgaagagctcgccgatagagtcctcgacgtggtcgaacgcagcctgagcaattatccctttgactttcaaggcgctcgcattatcaccgggcaggaagagggagcgtatggctggattactatcaactatctcctagggaaattctcacagaagaccaggtggttctcgattgtcccctacgaaaccaataatcaggaaacgttcggcgctttagatcttggcggcgcatctacacaagtgacgttcgtgccacagaatcaaaccatcgaatctccagataacgccttacagttcagactgtacgggaaagactacaatgtttacacacactcgttcctctgttacggaaaggatcaggccctatggcagaagctggcaaaggacattcaggtggcctcgaatgagatcctcagagacccctgcttccacccagggtacaagaaagtggtgaacgtgagcgatttgtacaagaccccttgcacaaaacgcttcgagatgacactaccattccagcagttcgaaatacagggaatcggtaattaccaacagtgccaccagtccattctggaactgttcaacacctcatactgcccttactcacaatgcgcgtttaatggaatctttctccccccactgcagggggattttggagctttctcagcattctactttgtgatgaagttcctgaatttgacctcagagaaagtgagccaggagaaagtgaccgagatgatgaagaaattctgtgctcaaccatgggaggagattaagacctcatatgctggcgtcaaagagaagtatctgtcggaatactgtttttccggcacttacatcctgagtttactgcttcaggggtatcacttcacagcagatagctgggagcatattcatttcatcggcaagatccaaggtagtgatgcgggatggactttgggatatatgcttaatctcactaatatgatccccgccgagcagcccctctctaccccattgtcccattcaacctatgtattcctcatggttctcttcagcctagtactgttcactgtggcgataattggattgctgatcttccacaagcctagttatttctggaaggatatggtctag

SEQ ID NO: 62389 - DNA, 1119 bp, Artificial Sequence
  derived and/or modified sequence
atggagagcgaggagctggccgacagagtgctggatgtggtggagaggagcctgagcaactacccctttgacttccagggcgcccgcatcatcaccggccaggaggagggcgcctacggctggatcaccatcaactacctgctgggcaagttcagccagaagacccgctggttcagcatcgtgccctatgagaccaacaaccaggagacctttggagccctggacctgggcggggccagcacccaggtgacctttgtgccccagaaccagaccatcgagagcccagacaatgccctgcagttccggctgtatggcaaggactacaacgtgtacacccacagcttcctgtgctacggcaaggaccaggccctgtggcagaagctggccaaggacatccaggtggccagcaatgagatcctgcgggacccctgcttccaccctggctacaagaaggtggtgaatgtgtctgacctgtacaagaccccctgcaccaagagatttgagatgaccctgcccttccagcagtttgagatccagggcatcggcaactaccagcagtgccaccagagcatcctggagctgttcaacaccagctactgcccctacagccagtgtgccttcaacggcatcttcctgccccccctgcagggcgactttggagccttcagcgccttctactttgtgatgaagttcctgaacctgaccagcgagaaggtgtcccaggagaaggtgacagagatgatgaagaagttctgtgcccagccctgggaggagatcaagaccagctatgctggggtgaaggagaagtacctgtctgagtactgcttcagcggcacctacatcctgagcctgctgctgcagggctaccacttcaccgctgacagctgggagcacatccacttcatcggcaagatccagggcagtgatgctggctggaccctgggctacatgctgaacctgaccaacatgatcccagctgagcagcccctgagcacccccctgagccacagcacctacgtgttcctgatggtgctcttcagcctggtgctcttcaccgtggccatcatcggcctgctgatcttccacaagcccagctacttctggaaggacatggtgtag

SEQ ID NO: 62390 - DNA, 1119 bp, Artificial Sequence
  derived and/or modified sequence
atggagagcgaggagctggccgaccgggtgctggacgtggtggagcgaagtctctctaattacccgttcgactttcaaggagccagaatcataactgggcaggaagaaggggcctacggatggattacgatcaattatctgttgggcaagttttcccagaaaacccggtggttcagcattgtgccctacgaaaccaacaaccaagagactttcggggccctcgacctaggtggggccagcactcaagtaacgttcgtgccgcagaaccagacaatcgagtccccggacaacgctctgcagtttcgattgtacgggaaagactacaacgtgtacacccattcttttctgtgctacggaaaagaccaggcactctggcaaaaactggctaaggatattcaggttgcttcaaacgagatcctgagggacccttgttttcacccgggatacaagaaagtggtgaacgtgtctgacctgtataagaccccatgcactaaacggtttgaaatgacgctgccttttcagcagtttgagatacagggtatcgggaactatcagcagtgtcaccaatcaatcctggagctttttaatacgagctactgcccatattcacagtgcgccttcaacggcatcttcctgccgccgcttcagggagacttcggtgccttctctgccttttattttgtcatgaaatttctaaacctgacatccgagaaagtttctcaagaaaaagtgacagagatgatgaaaaaattttgcgctcagccctgggaagaaatcaaaacctcttatgccggcgtcaaggagaaatacctgtccgaatactgtttctcgggcacatacatcctgtcccttctactccaggggtaccactttacagccgacagttgggagcacatccacttcatcggaaaaatccagggttccgacgcaggttggactctgggatatatgcttaatctaacgaatatgatccccgccgaacagcctctttctaccccgttgagccactcgacctatgtttttttgatggtgctcttttccctcgtcctgttcacagtggccatcataggtctactaatctttcataaaccatcgtacttctggaaggatatggtatag

SEQ ID NO: 62391 - DNA, 1119 bp, Artificial Sequence
  derived and/or modified sequence
atggagagcgaggagctggccgaccgggtgctggacgtggtggagcgttcgctctctaactatccattcgacttccagggcgccagaataattacaggtcaggaggagggtgcttacggctggatcactattaattaccttctaggcaaattctcccagaaaacccgctggttcagcatcgtcccatacgagaccaataatcaggagacgttcggggctctggacctgggaggcgcctcaacacaggtcacctttgttcctcagaaccagacgatcgaatcgcctgacaatgccctgcaattccgtctatacggaaaagactataacgtatatactcactcctttctgtgttacggcaaggatcaggccctctggcagaagctggccaaggacattcaggtggcctcgaatgaaatcctgagagatccgtgctttcaccccgggtataagaaggtggtgaatgtgtccgacttgtataaaaccccctgtaccaaaaggtttgagatgaccctacccttccagcagttcgagattcaagggataggcaactaccaacagtgccaccagagcatactggagttattcaacactagttattgtccatatagtcagtgtgcatttaacggcatttttttgccacccttgcagggggattttggcgccttctccgccttttacttcgttatgaaattcctcaatctaactagtgagaaggtcagccaggagaaggtaaccgaaatgatgaaaaagttctgcgctcaaccatgggaggagatcaaaacatcatatgccggagtgaaagaaaagtacctaagtgagtattgcttttccggtacatacatccttagcctgttattgcaaggataccacttcaccgccgactcatgggagcacattcacttcattgggaagatccaaggttccgatgctggttggacactggggtatatgctcaacctgacaaacatgatcccggcagaacaacctctatctaccccactgtctcattccacatacgtttttctcatggtcttgttctctctagtactctttaccgtcgccatcattggcctgctgattttccacaaaccctcctacttctggaaagacatggtatag

SEQ ID NO: 62392 - DNA, 1119 bp, Artificial Sequence
  derived and/or modified sequence
atggaatccgaagagcttgcagaccgtgtgctcgacgtggtagagaggtcactctccaattatccattcgacttccagggcgcaaggattattacaggccaagaggagggagcatacgggtggatcacaataaattatttgcttggcaaattctcccagaaaacccggtggttctctatagtgccttatgagactaacaatcaagaaacatttggggcactggatttgggaggagcaagcactcaggtgacctttgtccctcagaatcagactatagagagcccagataatgctctccagtttaggctgtatggcaaagactataacgtgtatacccactccttcctgtgctacggcaaagaccaggccctgtggcagaagttagcgaaggatatacaggttgcaagcaacgagatattgagagacccctgcttccatcctggttataaaaaggtagtgaacgtgagtgacctttacaagacaccctgtaccaagcgcttcgaaatgacactgcctttccagcagttcgaaatccaggggataggtaattaccagcaatgtcatcaatctatcctggaacttttcaatacaagttactgtccttattctcaatgtgctttcaacggaatcttcctcccgcctcttcagggtgactttggggcattctccgctttttatttcgtcatgaagttcctgaacctgacatcagagaaggtgtcacaggaaaaggtcacagagatgatgaaaaagttctgcgctcagccatgggaagagataaaaacgtcatacgccggagtgaaggagaagtacctgtctgagtactgcttctccggaacctacatcctatcactgctcttgcagggctatcacttcacggctgattcttgggaacacatccatttcatcggtaaaatccaaggctctgacgcgggatggacactgggttatatgttaaatctgacaaacatgattcctgctgaacaaccccttagcactcccctcagtcattcaacctatgtcttccttatggtgcttttctcactcgtcctgttcactgtggcaattatcggtttgctgattttccataaacctagctacttctggaaagacatggtatag

SEQ ID NO: 62393 - DNA, 1119 bp, Artificial Sequence
  derived and/or modified sequence
atggaatccgaggaattggctgatagagttctggacgttgtcgaacgtagtctcagtaattaccccttcgatttccaaggtgcacggataattactggccaggaagagggggcttacggctggatcactataaactacttactgggcaagtttagccaaaagacacgctggttctctatcgtgccctacgagaccaataaccaggagacctttggtgccctggatctgggtggtgccagtacacaggtcacatttgtgcctcagaatcaaacaattgaatcccctgacaatgcgctccagttcaggctctacgggaaggattacaatgtatatacacactcgttcctctgctatggcaaggatcaggccctatggcagaagctagccaaggacatacaggtggcatcgaacgagatccttagagacccgtgtttccatcccggttataagaaggtcgtgaacgtatccgacctgtacaaaaccccctgcaccaaacggtttgagatgacgctgccttttcagcagttcgagattcagggaatcggaaactaccagcaatgtcaccagtccatccttgaattgttcaatactagttattgcccctacagccagtgtgcttttaacgggatattcctgcctcccctgcagggggatttcggagcgttttccgccttctactttgttatgaaattcctcaatctgactagcgagaaggtgtcacaggagaaagttactgagatgatgaaaaagttctgcgcccagccctgggaggagatcaagacctcctatgccggagtgaaggaaaagtacctctcggaatactgcttcagcgggacatacatcctcagcctactcttacaaggttatcatttcacagccgatagttgggagcatatccacttcatcggcaagatccagggttctgacgccggatggactttgggctatatgctgaacctcacaaatatgatacctgccgaacaacccctgagcacccctttaagccatagcacctatgtgtttctcatggtcctattttccttggttcttttcactgtggccatcatagggttactgattttccataagcccagctatttctggaaagacatggtttag

SEQ ID NO: 62394 - DNA, 1119 bp, Artificial Sequence
  derived and/or modified sequence
atggagagcgaggagctggccgacagagtgctggacgtggtggagagaagcctgagcaactaccccttcgacttccagggcgccagaatcatcaccggccaggaggagggcgcctacggctggatcaccatcaactacctgctgggcaagttcagccagaagaccagatggttcagcatcgtgccctacgagaccaacaaccaggagaccttcggcgccctggacctgggcggcgccagcacccaggtgaccttcgtgccccagaaccagaccatcgagagccccgacaacgccctgcagttcagactgtacggcaaggactacaacgtgtacacccacagcttcctgtgctacggcaaggaccaggccctgtggcagaagctggccaaggacatccaggtggccagcaacgagatcctgagagacccctgcttccaccccggctacaagaaggtggtgaacgtgagcgacctgtacaagaccccctgcaccaagagattcgagatgaccctgcccttccagcagttcgagatccagggcatcggcaactaccagcagtgccaccagagcatcctggagctgttcaacaccagctactgcccctacagccagtgcgccttcaacggcatcttcctgccccccctgcagggcgacttcggcgccttcagcgccttctacttcgtgatgaagttcctgaacctgaccagcgagaaggtgagccaggagaaggtgaccgagatgatgaagaagttctgcgcccagccctgggaggagatcaagaccagctacgccggcgtgaaggagaagtacctgagcgagtactgcttcagcggcacctacatcctgagcctgctgctgcagggctaccacttcaccgccgacagctgggagcacatccacttcatcggcaagatccagggcagcgacgccggctggaccctgggctacatgctgaacctgaccaacatgatccccgccgagcagcccctgagcacccccctgagccacagcacctacgtgttcctgatggtgctgttcagcctggtgctgttcaccgtggccatcatcggcctgctgatcttccacaagcccagctacttctggaaggacatggtgtag

SEQ ID NO: 62395 - protein, 422 aa, Artificial Sequence
  derived and/or modified sequence
MSADGAEADGSTQVTVEEPVQQPSVVDRVASMPLISSTCDMVSAAYASTKESYPHIKTVCDAAEKGVRTLTAAAVSGAQPILSKLEPQIASASEYAHRGLDKLEENLPILQQPTEKVSGAQEMVSSAKDTVATQLSEAVDATRGAVQSGVDKTKSVVTGGVQSVMGSRLGQMVLSGVDTVLGKSEEWADNHLPLTDAELARIATSLDGFDVASVQQQRQEQSYFVRLGSLSERLRQHAYEHSLGKLRATKQRAQEALLQLSQVLSLMETVKQGVDQKLVEGQEKLHQMWLSWNQKQLQGPEKEPPKPEQVESRALTMFRDIAQQLQATCTSLGSSIQGLPTNVKDQVQQARRQVEDLQATFSSIHSFQDLSSSILAQSRERVASAREALDHMVEYVAQNTPVTWLVGPFAPGITEKAPEEKK

SEQ ID NO: 62396 - DNA, 1269 bp, Artificial Sequence
  derived and/or modified sequence
atgtctgcagacggcgccgaggcggatggatcaacccaggttactgtggaggagccggtccagcagccgagtgttgtggacagagtggccagtatgcctctgatttctagcacttgcgacatggtgtcagcggcgtatgcttctaccaaagaaagctaccctcatatcaaaacagtctgtgacgcagccgaaaagggagtgagaacactgactgcagctgcagtctcgggtgctcagccaatcctgtcaaaactggagccgcagatcgccagtgcttcagagtacgcacacaggggccttgacaaactggaagagaacctccctattctgcagcagccgacggaaaaggtcagtggcgcccaagagatggtttcttcagctaaagataccgtggcaacacaactctcagaagcagtcgatgccaccaggggggctgttcagagcggggttgacaaaacgaagtcagtggtaactgggggagtccaaagcgtgatgggcagcaggctcggccaaatggtgctttcaggtgtcgacacagttctgggcaagagtgaggaatgggccgacaaccacctgccgctaacggacgccgagctggcgcgcatcgctacttcactggacggttttgatgtcgcatcagtgcaacagcagaggcaggagcagtcttactttgtcaggttgggttcactttcggaaaggctgcgtcagcacgcttatgagcactcgctcgggaagctgcgtgccacgaagcagcgtgctcaggaagctctcctgcagctatcccaggtgctttcactgatggagaccgtcaagcagggagtggatcagaaactcgtcgaggggcaggaaaaactccatcagatgtggctgtcctggaaccaaaagcagttgcagggcccggagaaagagcctccgaagcctgagcaggtggaatcacgggcattgaccatgtttcgcgacatcgcacaacagttgcaggccacatgcacatccctgggcagcagtatacaaggactgcctacaaatgttaaggatcaggtgcaacaggctagacgccaggtggaggatctgcaagccactttcagctctattcactcttttcaggatctcagcagttcgattctggcacagtctcgcgagagggtggcatcagcgcgagaagctctcgatcatatggtggaatatgtagctcaaaacaccccggttacctggctggtgggcccgttcgcgcctggaataaccgagaaagcgcctgaggagaagaagtag

SEQ ID NO: 62397 - DNA, 1269 bp, Artificial Sequence
  derived and/or modified sequence
atgtctgcagatggagctgaggctgatggcagcacccaggtgacagtggaggagcctgtgcagcagcccagcgtggtggacagagtggcctccatgcccctcatcagcagcacctgtgacatggtgtctgctgcctatgccagcaccaaggagagctacccccacatcaagacagtgtgtgatgctgctgagaagggcgtgaggaccctgacagctgctgctgtgtctggggcccagcccatcctgagcaagctggagccccagatcgccagcgcctctgaatatgcccaccggggcctggacaagctggaggagaacctgcccatcctgcagcagcccacagagaaggtgtctggggcccaggagatggtgagcagcgccaaggacacagtggccacccagctgtctgaggccgtggatgccaccagaggagctgtgcagagcggcgtggacaagaccaagtctgtggtgactggaggagtgcagagcgtgatgggcagccggctgggccagatggtgctgtctggagtggacacagtgctgggcaagtctgaggagtgggccgacaaccacctgcccctgacagatgctgagctggcccgcatcgccaccagcctggatggctttgatgtggcctctgtgcagcagcagaggcaggagcagagctactttgtgcggctgggcagcctgtctgagcggctgcggcagcacgcctatgagcacagcctgggcaagctgcgggccaccaagcagagggcccaggaggccctgctgcagctgagccaggtgctgagcctgatggagaccgtgaagcagggcgtggaccagaagctggtggagggccaggagaagctgcaccagatgtggctgtcctggaaccagaagcagctgcagggccctgagaaggagccccccaagccagagcaggtggagagccgggccctgaccatgttccgggacatcgcccagcagctgcaggccacctgcaccagcctgggcagcagcatccagggcctgcccaccaacgtgaaggaccaggtgcagcaggcccggcggcaggtggaggacctgcaggccaccttcagcagcatccacagcttccaggacctgagcagcagcatcctggcccagagccgggagcgggtggccagcgcccgggaggccctggaccacatggtggagtatgtggcccagaacacccctgtgacctggctggtgggcccctttgcccctggcatcacagagaaggcccctgaggagaagaagtag

SEQ ID NO: 62398 - DNA, 1269 bp, Artificial Sequence
  derived and/or modified sequence
atgagcgccgacggcgccgaggccgacggcagcacccaggtgaccgtggaggaacccgtgcagcagccttcagtcgttgaccgcgttgcatcaatgcccctgatttcaagcacctgtgatatggttagcgcagcttatgccagtaccaaagaatcataccctcacatcaagaccgtgtgtgacgccgcagagaaaggggtgagaaccctgacagctgcagcagtgtcaggtgctcagccaatcttgtccaagttggagccgcaaattgcatcagccagtgaatacgcccataggggtctcgataaattagaggagaatcttcctatactacagcagccaactgaaaaggtcagtggagcacaagagatggttagtagtgccaaagatactgtggccactcagctcagcgaggccgtcgatgctacccgtggcgccgtccagtctggcgtggacaagaccaaatcagttgtgactggaggcgtgcagtctgtgatgggcagccgattggggcaaatggtcctctctggcgtggacacagtgctggggaaatctgaagagtgggctgataaccatctaccgctcactgacgctgagctagcacgcattgcgacctcactagacgggtttgacgttgcatcagtccagcagcagcggcaggaacagagctactttgttcgcctcggttcactgtcagagcggctcaggcagcacgcctatgaacacagtctaggcaagctgagagccacaaagcagcgtgcccaggaggctcttcttcagttgtcccaggttttgtctttgatggagaccgtgaagcagggtgtcgatcagaagctggtggaaggccaggagaagctccatcaaatgtggctttcatggaaccagaaacagctccagggaccagagaaggaaccccccaagccagaacaggttgaatctagagcgctgacaatgtttagagatatcgcacagcaactgcaagccacttgtacatccctcgggtcctccattcagggcctccctactaatgtgaaggatcaggtccagcaagccaggcgtcaggtggaggatctgcaggctactttttcttcaattcattcattccaagatctgagctcatccatcctggcacagtctcgagagagggtcgccagcgcaagagaggcattggaccatatggttgagtacgttgcccagaacacccccgtcacctggttagtgggtcctttcgctccgggcattactgagaaggccccagaagaaaaaaaatag

SEQ ID NO: 62399 - DNA, 2154 bp, Artificial Sequence
  derived and/or modified sequence
ttttgaagtcgcggcagctgttcctgggacgtccggttgaccgcgcgtctgctgcagagaccatgtctgccgacggggcagaggctgatggcagcacccaggtgacagtggaagaaccggtacagcagcccagtgtggtggaccgtgtggccagcatgcctctgatcagctccacctgcgacatggtgtccgcagcctatgcctccaccaaggagagctacccgcacatcaagactgtctgcgacgcagcagagaagggagtgaggaccctcacggcggctgctgtcagcggggctcagccgatcctctccaagctggagccccagattgcatcagccagcgaatacgcccacagggggctggacaagttggaggagaacctccccatcctgcagcagcccacggagaaggtgtcgggggcccaagagatggtgtctagcgccaaggacacggtggccacccaattgtcggaggcggtggacgcgacccgcggtgctgtgcagagcggcgtggacaagacaaagtccgtagtgaccggcggcgtccaatcggtcatgggctcccgcttgggccagatggtgttgagtggggtcgacacggtgctggggaagtcggaggagtgggcggacaaccacctgccccttacggatgccgaactggcccgcatcgccacatccctggatggctttgacgtcgcgtccgtgcagcagcagcggcaggaacagagctacttcgtacgtctgggctccctgtcggagaggctgcggcagcacgcctatgagcactcgctgggcaagcttcgagccaccaagcagagggcacaggaggctctgctgcagctgtcgcaggtcctaagcctgatggaaactgtcaagcaaggcgttgatcagaagctggtggaaggccaggagaagctgcaccagatgtggctcagctggaaccagaagcagctccagggccccgagaaggagccgcccaagccagagcaggtcgagtcccgggcgctcaccatgttccgggacattgcccagcaactgcaggccacctgtacctccctggggtccagcattcagggcctccccaccaatgtgaaggaccaggtgcagcaggcccgccgccaggtggaggacctccaggccacgttttccagcatccactccttccaggacctgtccagcagcattctggcccagagccgtgagcgtgtcgccagcgcccgcgaggccctggaccacatggtggaatatgtggcccagaacacacctgtcacgtggctcgtgggaccctttgcccctggaatcactgagaaagccccggaggagaagaagtagggggagaggagaggactcagcgggccccgtctctataatgcagctgtgctctggagtcctcaacccggggctcatttcaaacttattttctagccactcctcccagctcttctgtgctgtccacttgggaagctaaggctctcaaaacgggcatcacccagttgacccatctctcagcctctctgagcttggaagaagcctgttctgagcctcaccctatcagtcagtagagagagatgtccagaaaaaatatctttcaggaaagttctcccctgcagaattttttttccttgttaaatatcaggaatataggccgggtgcggtggctcacacctgtaatcccagcactttgggaggctgaggcgggcggaacacctgaggtcaggtgttcgagaccagccaggccaacatggtgaaaccccgtctctactaaaaatacaaaaaaaaatgagccgggcatggtagcaggtgtctgttatcccagttaggaggctgaggcaagagaatctcttgaacctgagaggcggaggttgcagtgagccaagatcgcgccattgcactccagcctgggggacaagagtgagacttagtctcaaaaaaaaaaaaaaagaaaaaaaaatcagggatatagttcatatcccacttctttgtttacaccgatgtccctgaatatcagcctgtagctaatggacttgggatttctggtctaagtgggcctcctggggatggggtggtacactgagcttctgagcctcattgtagagtagaaaggtactggggcctgtgtggtaagccttgttgaaatgctctggtattcagtatt

SEQ ID NO: 62400 - DNA, 1269 bp, Artificial Sequence
  derived and/or modified sequence
atgagcgccgatggagctgaggcggatggatcaacccaggtgactgtggaggaacccgtacagcagccttcagtagtcgaccgggtggccagtatgccgctgatttcatctacctgtgatatggtgtcggctgcctacgccagcacaaaggaaagttaccctcatataaaaactgtgtgcgacgctgccgagaagggggtgaggacccttactgctgctgctgtgtccggtgcccagcctatcctatctaaattggagccccaaatcgctagtgcctctgaatatgcacaccgtggacttgacaagttagaagagaacttacccatattgcagcagcctaccgagaaagtgtcaggcgcacaggagatggtgtctagtgcgaaggacactgtcgccacacagctcagtgaagcagtcgacgccactcggggtgctgtgcagtccggagtcgataaaaccaaaagtgtggtcactggaggagtccagtccgtgatggggagcagactgggccagatggtgctgtcaggggtggacaccgtgctgggtaaatccgaagaatgggctgataatcaccttcctctgaccgacgcagagttggctaggatcgccacctctctcgacggtttcgacgtggcaagtgtccagcagcaacggcaggaacaaagttactttgtcaggctgggcagtctgagcgagcggttgagacagcatgcatatgagcattcactcggaaagctgagagcaaccaagcagcgagcccaggaagctcttctgcagctgagtcaggtcctttccctgatggagactgtgaaacaaggggtcgaccagaagctcgtcgaggggcaggagaagctgcaccaaatgtggctgagttggaaccagaaacaactgcagggcccagagaaggaaccacctaagccagaacaagtagagtcgagagctctgaccatgttccgagatatcgctcagcagctgcaggcgacgtgcacgtctctggggtctagcatccaaggccttcctacgaatgtaaaggaccaggtccaacaggccagaagacaggtggaggatctacaggcaacgttctctagtatccattccttccaggacctgagctcttctattctggcgcagagccgagagcgtgttgcctccgctcgagaagctctggaccacatggttgagtatgttgcgcagaatacgcctgttacatggctggtcggcccttttgcccctggaatcaccgagaaagcccctgaggaaaagaagtag

SEQ ID NO: 62401 - DNA, 1269 bp, Artificial Sequence
  derived and/or modified sequence
atgagcgccgacggcgccgaggccgacggcagcacccaggtgaccgtggaggagcccgtgcagcagcccagcgtggtggacagagtggccagcatgcccctgatcagcagcacctgcgacatggtgagcgccgcctacgccagcaccaaggagagctacccccacatcaagaccgtgtgcgacgccgccgagaagggcgtgagaaccctgaccgccgccgccgtgagcggcgcccagcccatcctgagcaagctggagccccagatcgccagcgccagcgagtacgcccacagaggcctggacaagctggaggagaacctgcccatcctgcagcagcccaccgagaaggtgagcggcgcccaggagatggtgagcagcgccaaggacaccgtggccacccagctgagcgaggccgtggacgccaccagaggcgccgtgcagagcggcgtggacaagaccaagagcgtggtgaccggcggcgtgcagagcgtgatgggcagcagactgggccagatggtgctgagcggcgtggacaccgtgctgggcaagagcgaggagtgggccgacaaccacctgcccctgaccgacgccgagctggccagaatcgccaccagcctggacggcttcgacgtggccagcgtgcagcagcagagacaggagcagagctacttcgtgagactgggcagcctgagcgagagactgagacagcacgcctacgagcacagcctgggcaagctgagagccaccaagcagagagcccaggaggccctgctgcagctgagccaggtgctgagcctgatggagaccgtgaagcagggcgtggaccagaagctggtggagggccaggagaagctgcaccagatgtggctgagctggaaccagaagcagctgcagggccccgagaaggagccccccaagcccgagcaggtggagagcagagccctgaccatgttcagagacatcgcccagcagctgcaggccacctgcaccagcctgggcagcagcatccagggcctgcccaccaacgtgaaggaccaggtgcagcaggccagaagacaggtggaggacctgcaggccaccttcagcagcatccacagcttccaggacctgagcagcagcatcctggcccagagcagagagagagtggccagcgccagagaggccctggaccacatggtggagtacgtggcccagaacacccccgtgacctggctggtgggccccttcgcccccggcatcaccgagaaggcccccgaggagaagaagtag

SEQ ID NO: 62402 - protein, 763 aa, Artificial Sequence
  derived and/or modified sequence
MATPGSEPQPFVPALSVATLHPLHHPHHHHHHHQHHGGTGAPGGAGGGGGGSGGFNLPLNRGLERALEEAANSGGLNLSARKLKEFPRTAAPGHDLSDTVQADLSKNRLVEVPMELCHFVSLEILNLYHNCIRVIPEAIVNLQMLTYLNLSRNQLSALPACLCGLPLKVLIASNNKLGSLPEEIGQLKQLMELDVSCNEITALPQQIGQLKSLRELNVRRNYLKVLPQELVDLSLVKFDFSCNKVLVIPICFREMKQLQVLLLENNPLQSPPAQICTKGKVHIFKYLSIQACQIKTADSLYLHTMERPHLHQHVEDGKKDSDSGVGSDNGDKRLSATEPSDEDTVSLNVPMSNIMEEEQIIKEDSCHRLSPVKGEFHQEFQPEPSLLGDSTNSGEERDQFTDRADGLHSEFMNYKARAEDCEELLRIEEDVHWQTEGIISSSKDQDMDIAMIEQLREAVDLLQDPNGLSTDITERSVLNLYPMGSAEALELQDSALNGQIQLETSPVCEVQSDLTLQSNGSQYSPNEIRENSPAVSPTTNSTAPFGLKPRSDPALILPPISFNTLTQAQTWDSSSYSVPSEGDSDNVFLRPQRNLESIDPQFTIRRKMEQMREEKELVEQLRESIEMRLKVSLHEDLGAALMDGVVLCHLVNHIRPRSVASIHVPSPAVPKLSMAKCRRNVENFLEACRKLGVPEADLCSPCDILQLDFRHIRKTVDTLLALGEKAPPPTSALRSRDLIGFCLVHILFIVLVYITYHWNALSA

SEQ ID NO: 62403 - DNA, 2292 bp, Artificial Sequence
  derived and/or modified sequence
atggccacgcccgggtctgaaccgcagccctttgtcccagccttgagcgtggcgaccctccaccccctccatcatccccaccatcaccaccatcatcaccagcatcatgggggtactggggctccagggggcgctgggggagggggagggggttccgggggattcaatctcccactcaaccgggggctcgagcgcgcattggaggaggccgccaattccgggggcttgaacctgagtgcccggaagcttaaggaattccctcgcacggccgcgcctggtcacgacttatctgacaccgtccaggcagatctgtcaaagaacaggctggttgaggtgcctatggaattatgtcactttgtctctctcgagatcctcaatctgtaccacaattgtatacgtgtgatcccggaagctatcgtgaacttgcagatgctgacttacctcaacctgtcccggaatcagctgtccgccctgcctgcctgtctgtgtggcctgcccttgaaggtgctcatcgcatcaaataataagcttgggagcctccctgaagaaatagggcagttgaaacagttgatggaacttgatgtgtcttgcaacgaaattactgctctgccacaacaaatagggcagctgaaatctttgcgagagttgaatgtgcggagaaactacctgaaggtcctgcctcaggagctggtggacctctcactcgtcaagtttgatttttcctgtaataaggtattagttatcccaatttgcttccgggaaatgaagcagctgcaagtcctgttactcgagaacaaccccctacaatccccccccgcacagatctgtaccaaggggaaggtccacatctttaagtatcttagcatccaagcctgccagataaagacagctgactccttgtaccttcatactatggagcgccctcacctccaccagcacgtggaagacggcaagaaagattcagactctggcgtgggcagcgacaatggcgacaagaggctctcagcaaccgaaccctccgacgaggacacagtgtcccttaatgtccccatgtccaacatcatggaggaagaacagatcatcaaggaggattcatgccaccgtctcagccccgtaaagggcgaattccaccaggagtttcaacctgagccctccctgctaggggactccaccaacagcggcgaagagcgcgaccagttcaccgatcgcgccgacggccttcattccgagttcatgaactataaagcccgcgccgaggattgcgaggagttactcaggattgaggaagacgtgcattggcagaccgagggaattattagctcaagcaaagaccaggacatggacatcgctatgattgagcagttgagagaggccgttgacctccttcaggaccctaatggactgtctaccgacataacggaaagaagcgttttgaacctttacccaatgggctctgctgaggccctggagttacaggatagtgcattaaacggtcagattcaactggagacctcacccgtctgcgaggtacagtccgacctgaccctgcagagcaatgggagtcagtacagcccaaacgaaatcagagaaaactcccctgctgtgtctcctactaccaattctaccgcaccgtttggactgaagcccaggagcgatcccgcactaatccttcctcctatctctttcaacaccctcacccaagctcagacctgggactctagctcatattccgtgccgtccgagggcgactctgataatgtcttcctgagaccgcagaggaatctcgaatccatcgacccacagtttactatccgacgaaaaatggagcagatgagggaggaaaaggaattggtggagcaattgagggagagcatagaaatgcgccttaaggtgtcacttcacgaggatctgggggcagctctgatggatggggttgtgctgtgccatctggtgaatcacattaggccccggagtgttgcctctattcacgtcccctctccggcagtacccaagctgagcatggcgaaatgccggcgcaatgtcgaaaacttccttgaagcctgtagaaagctgggtgtccccgaggccgacctatgcagtccgtgtgatatcctacagctcgacttcaggcatattcgcaagaccgttgacacactgttggccctcggagagaaagcaccgccacctacctcagccctcaggagccgggatctgatcggcttctgtctggtacatatcttgtttattgtgctggtgtacattacataccattggaacgcgttgagtgcttag

SEQ ID NO: 62404 - DNA, 2292 bp, Artificial Sequence
  derived and/or modified sequence
atggccaccccaggcagcgagccccagccctttgtgcctgccctgtctgtggccaccctgcaccccctgcaccacccccaccaccaccaccaccaccaccagcaccacggcggcactggagcccctgggggcgccggcggcggcggcggcggcagcggcggcttcaacctgcccctgaacagaggcctggagcgggccctggaggaggccgccaacagcggcggcctgaacctgagcgccaggaagctgaaggagttccccaggacagctgcccctggccatgacctgagtgacacagtgcaggccgacctgagcaagaaccggctggtggaggtgcccatggagctgtgccactttgtgtccctggagatcctgaacctgtaccacaactgcatccgggtcatccctgaggccatcgtgaacctgcagatgctgacctacctgaacctgagcaggaaccagctgagcgccctgcctgcctgcctgtgtggcctgcccctgaaggtgctgattgccagcaacaacaagctgggcagcctgcctgaggagatcggccagctgaagcagctgatggagctggatgtgtcctgcaatgagatcacagccctgccccagcagatcggccagctgaagagcctgcgggagctgaatgtgagaagaaactacctgaaggtgctgccccaggagctggtggacctgagcctggtgaagtttgacttcagctgcaacaaggtgctggtgatccccatctgcttccgggagatgaagcagctgcaggtgctgctgctggagaacaaccccctgcagagccccccagcccagatctgcaccaagggcaaggtgcacatcttcaagtacctgagcatccaggcctgccagatcaagacagctgacagcctgtacctgcacaccatggagcggccccacctgcaccagcacgtggaggatggcaagaaggacagcgacagcggcgtgggcagtgacaatggagacaagaggctgagcgccacagagcccagtgatgaggacacagtgtccctgaatgtgcccatgagcaacatcatggaggaggagcagatcatcaaggaggacagctgccaccggctgagccctgtgaagggggagttccaccaggagttccagcctgagcccagcctgctgggggacagcaccaacagcggggaggagcgggaccagttcacagacagagcagatggcctgcacagcgagttcatgaactacaaggcccgggcagaggactgtgaggagctgctgagaattgaagaagatgtgcactggcagacagagggcatcatcagcagcagcaaggaccaggacatggacatcgccatgattgagcagctgcgggaggccgtggacctgctgcaggaccccaacggcctgagcacagacatcacagagaggtctgtgctgaacctgtaccccatgggcagcgctgaggccctggagctgcaggacagcgccctgaatggccagatccagctggagaccagccctgtgtgtgaggtgcagagcgacctgaccctgcagagcaatggcagccagtacagccccaatgagatccgggagaacagccctgctgtgagccccaccaccaacagcacagcccccttcggcctgaagcccaggagtgaccctgccctgatcctgccccccatctccttcaacaccctgacccaggcccagacctgggacagcagcagctacagcgtgcccagcgagggggacagcgacaacgtgttcctgcggccccagaggaacctggagagcattgacccccagttcaccatccggaggaagatggagcagatgagggaggagaaggagctggtggagcagctgcgggagagcattgagatgaggctgaaggtgtccctgcacgaggacctgggcgccgccctgatggatggagtggtgctgtgccacctggtgaaccacatccggcccaggtctgtggccagcatccacgtgcccagccctgctgtgcccaagctgtccatggccaagtgcagaagaaatgtggagaacttcctggaggcctgcaggaagctgggcgtgcctgaggccgacctgtgcagcccctgtgacatcctgcagctggacttccgccacatcaggaagacagtggacaccctgctggccctgggggagaaggcccccccacccaccagcgccctgcggagccgggacctgattggcttctgcctggtgcacatcctcttcatcgtgctggtgtacatcacctaccactggaatgccctgagcgcctag

SEQ ID NO: 62405 - DNA, 3314 bp, Artificial Sequence
  derived and/or modified sequence
acaccctcctcccctccttccagcgcctttcggtggagcactgcggcactcagcccgagctgccgttttcccctcgcggggaacgctgtgacccccccgcaggagcggcggggcggggtgggggggcccgggagaagatggcgacgccgggaagcgaaccccaacctttcgtcccggccctttcggtagctactctgcacccacttcatcatccccaccaccaccaccaccaccatcagcaccacggaggaaccggcgcccccggcggggcgggtggtggcggcggtggcagcgggggcttcaacctgcccttgaaccggggtctggagcgcgcgcttgaggaggcggccaactccggggggctgaacctgagcgccaggaaattgaaggaatttccccgtaccgcagcccccgggcacgacctctcggacacggtgcaggcagacttatctaaaaacagactggttgaagttccaatggaattgtgccattttgtatcactggaaattcttaatctgtatcacaactgtatcagagtcattcctgaggccatcgttaatctgcagatgctgacttacctgaacttgagtcgaaatcagctgtccgccctgcctgcctgcctgtgtggtctgcctctcaaagtcttaatcgcaagtaacaacaaacttggatcattaccagaagagataggtcagctcaaacagttaatggagctggatgtcagctgcaacgagatcacagcgttgccccagcagataggtcagttgaaatctctacgagaactgaatgtcagaagaaattaccttaaagttttaccacaagaactagtagatctttccttggtaaagtttgacttttcctgcaacaaagtgctcgtgattccaatttgttttagagagatgaagcagctgcaagtgttactacttgagaataaccctctgcagtctcctccagcacagatttgcacaaagggcaaagttcacatatttaagtatctgagcatacaagcatgccagattaagacagctgactccctttatctccacaccatggagaggccacatttacaccagcacgtggaagatggcaagaaggattctgattcgggagttggaagtgataatggagataagcgattatctgccaccgagccttctgacgaagacactgttagcctcaatgtgccaatgtcaaacatcatggaagaagaacagatcatcaaggaggactcgtgccatcgccttagccccgttaaaggggaatttcatcaggaatttcaaccggagccttcccttttgggtgacagcaccaactcaggagaagaaagagaccagtttactgatagagcagatggtctccattcggaatttatgaactataaggcaagggcagaagactgtgaagagctgttacggatagaagaggatgtgcactggcaaactgagggcataataagttcatccaaagatcaggacatggatatagcaatgatcgagcagctgagagaagcagtagatttgctgcaagatcccaatggattaagcacagatattacagagagaagtgttttaaacctatatcctatgggatcagcagaagccttagaattacaagattctgcactgaatggtcaaatacagctggagacatctccggtgtgtgaggtgcaaagtgatctaacattacagagtaacgggagccagtattctccaaatgagattagagagaactcccctgcagtctctcctaccacaaacagcacagctccatttggcctgaagcctcgatcagacccagccctcattcttcctcctatctccttcaacacacttacacaggcacagacatgggacagctctagctacagtgttccatctgaaggagacagtgacaatgtgtttctaagacctcagagaaatttggaatctatagacccgcagtttacaatccggaggaaaatggagcagatgagagaagagaaagagctggtggaacaacttcgtgagagcattgagatgagattgaaggtcagtctacacgaagacctgggggcagccctcatggatggtgtcgtcctctgccatctggtcaaccacatccgcccacggtcggttgcaagcatccatgtcccatcaccagcggttcccaaacttagcatggccaaatgcagaagaaatgtggaaaactttttggaagcatgccgaaaattaggagtaccagaggctgacctctgctctccgtgtgacatcctgcagttggattttcgtcacattcgaaagactgttgacactctgctggcactcggggagaaagccccaccaccaacttctgccctccgctccagggaccttataggcttctgtcttgtccatattctctttatagtgctggtctatatcacttaccactggaatgctctgtccgcataatgtctgcacgtgcatccaaacgctgtgctctgtcgccctcaacctttgcagggtccttcctacctttgagcctttgccttgcaaacttccatccctgtcatgtcttcagttatctctcgagttttgaagctgaacagtagcaaatcagattttccagaagcacaaactttgtagaatacagtttagtataattcctctcacttactgaaatacaacgacgacgactgcaaagtgtatgcacaccgcatgcttcctcatccacatagtgccagcagcagtgccacgcagttcctcctctccctcccggtgagctgctgccctgggcagaggggaggagaattccaggacaagagtgtcaaggacagggatttagcatatggaagtctttcctttgggtcagtattgaactagaattctaattcgggactgggcaattgagctgtataggggccaccttgcagggaggacagaaaactaacattttggcccaacttgatctatacaaaactttaataataccactactgaccaagttggacgtgtacacgtactcacactgccttgatggccattcgattggattcctcccaaatttcctaaaaagggagccgcgaagggcgctgggcagtgtggccgccaacttccaccccggcaagcccctctgtcctatgcagaagggcgctcaagggaaggaagtgtcgttgctgttagagcctcacgtggaggagtcacttaaacaccagttttttactgcttaattccttgttaggtcttctcttgaggctcttagaaaagcgttttccagagagatttctatttttgaacaatggaacggatcactgcttttttgccacatcacatagtaactgccggtccagaatgtga

SEQ ID NO: 62406 - DNA, 2292 bp, Artificial Sequence
  derived and/or modified sequence
atggccacccccggcagcgagccccagcccttcgtgcccgccctgagtgtggctaccttacatccactgcatcacccccaccatcaccatcatcatcatcagcaccacggcgggactggggctcccggtggtgctgggggaggtggcggcggaagcggaggcttcaatttaccccttaacaggggcctcgagcgggctctggaggaggccgcaaactcgggcgggctcaatttgagtgcacgcaaactgaaggaattcccccggacagccgcacccgggcacgatttatccgatacagtgcaggcagacctatccaaaaacaggcttgtggaggtcccaatggagctctgtcacttcgtaagccttgaaatccttaacctttaccacaactgcatccgggttattcctgaggctattgtaaatctacagatgttgacatacctgaacctttcgcgcaaccagctctcagctcttcccgcctgcttatgcggactgcctctgaaagtgctcattgccagcaacaacaaactgggttctttgccggaggagatcggtcagctgaagcagcttatggagctggacgtatcttgtaacgagataacggccctgccccagcaaattggccagctgaaatccctgagagagctgaacgtgcggaggaattatctaaaagtgttgccccaggagctcgtggacttaagtcttgtgaaattcgacttcagctgcaacaaagtgctggtcatcccgatctgctttagagaaatgaagcagctgcaagtgctgctgctggagaacaacccgctccaatcgccgccggcgcagatctgcaccaaaggaaaggttcatatatttaaatatttaagtatccaggcctgccaaattaagacagccgattcactctatctgcatacaatggaacgccctcacttacaccaacatgtagaggatggcaagaaggacagtgactccggagtaggcagcgataacggggataagcggttgtctgctactgaaccctccgatgaggacacagtgagcttgaatgttccaatgagcaacataatggaggaagaacagattattaaagaagattcctgtcaccggctttctcctgtgaaaggagaattccaccaagaattccagccagaacccagcctactgggtgactctactaattcaggtgaggaaagggatcagtttaccgacagagctgatgggctgcatagcgaatttatgaactataaagccagagccgaagattgcgaggaattgctgagaattgaagaggatgtgcattggcagactgagggtataatatcctcctccaaagaccaagacatggatattgcgatgatcgagcagctgagagaagcagtagacctgctgcaggatccgaatggtctgagcactgacatcaccgagagatcagtactgaatctgtatccaatgggttctgcggaggcgttggagctgcaagacagcgctctgaacgggcagattcagctggagacttctcccgtttgtgaggtccagtcagacctgacactgcaaagcaacggtagtcagtactccccaaacgaaatccgcgaaaacagtccagccgtttctcctacaaccaatagcacagctccttttggactgaagcctcggagcgaccctgctctcattttaccccccatctctttcaacaccctcacacaggcacagacctgggatagctcatcttattcagtgccttctgagggagactccgataatgtttttctgcgcccacaacggaatctggaatccatagacccacagttcactatacgccgaaaaatggagcagatgcgtgaggagaaagaactagtagaacaactgagggagagcatcgaaatgcggctcaaagtctctttgcatgaggacctcggcgccgccctgatggacggcgtggttctgtgccacttggtgaatcacattagaccccggagcgtcgcaagtatccatgtgcctagtccagctgtcccaaagctttccatggctaagtgtcgaagaaacgtggagaatttcttagaagcctgtagaaagctgggagttccagaggccgatctttgttccccttgtgatatcttgcagctcgattttagacacatccgaaagacagtagacactctcttggctctcggcgagaaagccccccccccaacatccgcccttagatcaagggatttgatcggattctgccttgttcacattctttttatcgtgctggtgtacattacctaccactggaatgccctatctgcttag

SEQ ID NO: 62407 - DNA, 2292 bp, Artificial Sequence
  derived and/or modified sequence
atggccacacccggaagcgagcctcagccctttgtcccagcccttagtgtggccacactgcaccctctgcatcacccccatcaccatcaccaccaccatcagcaccatggcggaacaggggctcccggtggggcaggcggtggcggagggggtagcggtggctttaatttgcctttgaatcgaggcctggaacgtgccctcgaggaggccgctaattcaggaggcctgaatctgagcgcgcgaaagctgaaggaattccctcgcacagccgctccgggtcacgatttgtcagacaccgtccaagcagacctctctaaaaatcggctggtcgaggtgccaatggaactctgtcatttcgtctcactcgaaattctcaacctatatcacaattgcattcgggtcatcccagaggccattgtcaatcttcagatgctgacttatctgaatctctctcgaaaccagctctcagccctgcccgcatgcctatgcggcctgcccttaaaggtcctgatcgcctcaaataataaacttggcagtctgccagaagagatagggcagctcaagcagttgatggaactggacgtgagctgcaacgaaataactgccttaccccaacaaataggccagctgaaatctctgcgcgagctgaacgtccgcagaaattatctaaaggtgctaccgcaggagcttgtggacctctctctggtgaagtttgatttttcttgcaataaggtgcttgtcattccaatatgcttccgcgaaatgaagcagctgcaggtgttgctgctcgagaataaccctttgcaatcacccccagctcagatctgcacaaagggtaaggtgcacattttcaagtacctgtcgattcaggcttgtcaaattaagacggccgacagtctgtatctccataccatggagaggccacacctccaccagcacgttgaagatggaaaaaaagattcagattccggcgtcggttcagacaacggtgataagcgcttgtccgcaactgaaccgtccgatgaggacacagtgagcctaaacgtgcctatgtccaatattatggaggaggaacagattatcaaagaagactcttgtcatcgattgagcccagtcaagggcgaattccaccaagagttccagccggaacccagcctgctgggcgattccactaacagcggggaggagcgcgaccagtttactgaccgggctgacgggctgcactccgagtttatgaattataaagctagagctgaggactgcgaagaactgctcagaattgaggaggacgtgcactggcagaccgaaggaatcatctcaagtagcaaggaccaggatatggacatagctatgatagaacagctgagagaggcggtggacctgctgcaggaccctaacggcttatccactgacataacagagaggtccgtcctgaacctatatcctatgggctcagccgaagcgttggaactgcaggatagtgccttaaatggacaaattcagctggagacatccccagtctgtgaagtccaaagtgatttgactctgcagagtaacggaagccaatactcaccgaacgaaatccgcgagaacagcccagccgtgtctccaacaacaaattctacggcaccttttggcttaaagcccaggtctgaccccgcattaatcctgccacctatctctttcaacactctcacccaggcccagacctgggattctagctcatatagcgtgcctagtgaaggagactccgacaatgtgttcctcagaccgcagcggaacctggaatctatagacccccagttcaccattcgcagaaaaatggaacaaatgcgggaggagaaggagctggtggagcagctgcgagagtcaatcgaaatgcgactcaaagtgtcgctacatgaggacctcggggcagcattgatggacggcgtggtcttgtgtcacctggtgaatcatatcagaccacggtcagtggcaagcatccacgtgccaagccccgcagtgcccaagttaagcatggctaaatgccgtaggaacgtggaaaactttctggaagcatgccggaagttaggtgtgcctgaggccgatttgtgttctccgtgcgatatcctgcagctggatttcaggcatatccgaaagacagtcgacactctgcttgccctcggcgagaaagcacctcccccaacatcagcccttagatcacgagatcttatcgggttttgcttagtgcacattctatttatagtactcgtatatattacctatcattggaatgctctgtcggcatag

SEQ ID NO: 62408 - DNA, 2292 bp, Artificial Sequence
  derived and/or modified sequence
atggccacccccggcagcgagccccagcccttcgtgcccgccctgagcgtggccaccctgcaccccctgcaccacccccaccaccaccaccaccaccaccagcaccacggcggcaccggcgcccccggcggcgccggcggcggcggcggcggcagcggcggcttcaacctgcccctgaacagaggcctggagagagccctggaggaggccgccaacagcggcggcctgaacctgagcgccagaaagctgaaggagttccccagaaccgccgcccccggccacgacctgagcgacaccgtgcaggccgacctgagcaagaacagactggtggaggtgcccatggagctgtgccacttcgtgagcctggagatcctgaacctgtaccacaactgcatcagagtgatccccgaggccatcgtgaacctgcagatgctgacctacctgaacctgagcagaaaccagctgagcgccctgcccgcctgcctgtgcggcctgcccctgaaggtgctgatcgccagcaacaacaagctgggcagcctgcccgaggagatcggccagctgaagcagctgatggagctggacgtgagctgcaacgagatcaccgccctgccccagcagatcggccagctgaagagcctgagagagctgaacgtgagaagaaactacctgaaggtgctgccccaggagctggtggacctgagcctggtgaagttcgacttcagctgcaacaaggtgctggtgatccccatctgcttcagagagatgaagcagctgcaggtgctgctgctggagaacaaccccctgcagagcccccccgcccagatctgcaccaagggcaaggtgcacatcttcaagtacctgagcatccaggcctgccagatcaagaccgccgacagcctgtacctgcacaccatggagagaccccacctgcaccagcacgtggaggacggcaagaaggacagcgacagcggcgtgggcagcgacaacggcgacaagagactgagcgccaccgagcccagcgacgaggacaccgtgagcctgaacgtgcccatgagcaacatcatggaggaggagcagatcatcaaggaggacagctgccacagactgagccccgtgaagggcgagttccaccaggagttccagcccgagcccagcctgctgggcgacagcaccaacagcggcgaggagagagaccagttcaccgacagagccgacggcctgcacagcgagttcatgaactacaaggccagagccgaggactgcgaggagctgctgagaatcgaggaggacgtgcactggcagaccgagggcatcatcagcagcagcaaggaccaggacatggacatcgccatgatcgagcagctgagagaggccgtggacctgctgcaggaccccaacggcctgagcaccgacatcaccgagagaagcgtgctgaacctgtaccccatgggcagcgccgaggccctggagctgcaggacagcgccctgaacggccagatccagctggagaccagccccgtgtgcgaggtgcagagcgacctgaccctgcagagcaacggcagccagtacagccccaacgagatcagagagaacagccccgccgtgagccccaccaccaacagcaccgcccccttcggcctgaagcccagaagcgaccccgccctgatcctgccccccatcagcttcaacaccctgacccaggcccagacctgggacagcagcagctacagcgtgcccagcgagggcgacagcgacaacgtgttcctgagaccccagagaaacctggagagcatcgacccccagttcaccatcagaagaaagatggagcagatgagagaggagaaggagctggtggagcagctgagagagagcatcgagatgagactgaaggtgagcctgcacgaggacctgggcgccgccctgatggacggcgtggtgctgtgccacctggtgaaccacatcagacccagaagcgtggccagcatccacgtgcccagccccgccgtgcccaagctgagcatggccaagtgcagaagaaacgtggagaacttcctggaggcctgcagaaagctgggcgtgcccgaggccgacctgtgcagcccctgcgacatcctgcagctggacttcagacacatcagaaagaccgtggacaccctgctggccctgggcgagaaggcccccccccccaccagcgccctgagaagcagagacctgatcggcttctgcctggtgcacatcctgttcatcgtgctggtgtacatcacctaccactggaacgccctgagcgcctag

SEQ ID NO: 62409 - protein, 696 aa, Artificial Sequence
  derived and/or modified sequence
MATPGSEPQPFVPALSVATLHPLHHPHHHHHHHQHHGGTGAPGGAGGGGGGSGGFNLPLNRGLERALEEAANSGGLNLSARKLKEFPRTAAPGHDLSDTVQADLSKNRLVEVPMELCHFVSLEILNLYHNCIRVIPEAIVNLQMLTYLNLSRNQLSALPACLCGLPLKVLIASNNKLGSLPEEIGQLKQLMELDVSCNEITALPQQIGQLKSLRELNVRRNYLKVLPQELVDLSLVKFDFSCNKVLVIPICFREMKQLQVLLLENNPLQSPPAQICTKGKVHIFKYLSIQACQIKTADSLYLHTMERPHLHQHVEDGKKDSDSGVGSDNGDKRLSATEPSDEDTVSLNVPMSNIMEEEQIIKEDSCHRLSPVKGEFHQEFQPEPSLLGDSTNSGEERDQFTDRADGLHSEFMNYKARAEDCEELLRIEEDVHWQTEGIISSSKDQDMDIAMIEQLREAVDLLQDPNGLSTDITERSVLNLYPMGSAEALELQDSALNGQIQLETSPVCEVQSDLTLQSNGSQYSPNEIRENSPAVSPTTNSTAPFGLKPRSVFLRPQRNLESIDPQFTIRRKMEQMREEKELVEQLRESIEMRLKVSLHEDLGAALMDGVVLCHLVNHIRPRSVASIHVPSPAVPKLSMAKCRRNVENFLEACRKLGVPEEKLCLPHHILEEKGLVKVGITIQALLDITVTKALFT

SEQ ID NO: 62410 - DNA, 2091 bp, Artificial Sequence
  derived and/or modified sequence
atggctaccccagggtctgagccccaaccatttgtgccagccctctccgtcgccacactacatcctctgcatcaccctcatcatcatcaccaccaccatcagcaccacggcggaaccggcgcaccggggggcgccggtgggggtggaggaggcagcggcggatttaatttgcccctgaatcgcggactggaacgcgcactggaggaggcagcaaattcaggagggctgaatttgagcgcacggaaactgaaggaatttccacggactgctgccccgggacatgatctaagcgacacagttcaggccgacttatctaaaaaccggctagtggaagtacctatggaattgtgccattttgtttctcttgagattctgaatctgtaccacaactgcatccgcgttatccctgaggccattgtgaacttacaaatgctcacgtatcttaatttatccagaaatcagctgagcgcactgcccgcctgcctatgtggcctgcccctgaaagttttgattgcttctaataacaaactcgggtctctcccagaggagataggacaactgaaacagctgatggagcttgacgtgagttgcaatgagataacagccctccctcagcaaattggtcagctgaagagtttgcgcgaactcaatgttaggcgcaactacctgaaggtgttaccacaggagttagtggatttatccctggtgaagttcgactttagttgtaacaaggtgctggtgatccctatttgctttagggaaatgaagcagctgcaggtgctgcttttggaaaacaacccactgcagtcccccccagcccagatttgtactaagggcaaggtacatatttttaagtatctttccattcaggcttgccagatcaaaactgcggacagtctgtacttgcataccatggagcggccacatctgcatcagcacgtggaggacgggaaaaaggattcggacagcggagtcggcagtgacaacggagataaaaggctttcggccactgaacccagtgatgaggataccgtctctctcaatgtgcccatgtctaacattatggaggaggaacagataataaaggaggactcatgtcaccgcctgagcccagtgaaaggcgagttccaccaggaattccagcccgaaccatccctcttgggggattctactaatagtggcgaggaaagggatcagtttactgaccgtgcagacggacttcactctgagttcatgaactacaaagcccgggcggaggactgcgaagagcttctccgcattgaggaggatgtgcactggcagaccgagggcataatctccagctcgaaggatcaggatatggatatcgcaatgattgaacagctccgcgaggccgtggacttgcttcaggatcctaatggcctgtctactgacattacagaaagaagcgtgcttaatctttatcctatgggatcggccgaagcactcgaactccaggactctgcgttgaatggccagattcaacttgagacttcaccggtctgtgaagtccaatccgatctaaccctgcagtccaatggttctcaatacagcccaaatgagattagagagaattccccggcagtctccccaacaacaaactcaactgctccttttggattgaaacccaggtcagtatttctccggcctcaacggaacctggaaagtattgatccccaattcactatacggcggaaaatggaacagatgcgggaagagaaagaactggtcgagcagcttagggagtccattgaaatgaggctgaaggtatccctccatgaggatttgggagccgcactgatggatggcgttgtactgtgtcatctagtcaatcacatccggccacggtccgtggcttccatccatgtaccgagccccgctgtgccaaagctgtcaatggctaagtgtagaaggaacgtcgaaaattttctagaagcctgccggaagctcggtgtgcccgaggagaagctttgcctgcctcaccacatccttgaagagaaaggccttgtaaaggtgggaattaccatacaggccttactggatatcactgtgacaaaagccctgtttacttag

SEQ ID NO: 62411 - DNA, 2091 bp, Artificial Sequence
  derived and/or modified sequence
atggccaccccaggcagcgagccccagccctttgtgcctgccctgtctgtggccaccctgcaccccctgcaccacccccaccaccaccaccaccaccaccagcaccacggcggcactggagcccctgggggcgccggcggcggcggcggcggcagcggcggcttcaacctgcccctgaacagaggcctggagcgggccctggaggaggccgccaacagcggcggcctgaacctgagcgccaggaagctgaaggagttccccaggacagctgcccctggccatgacctgagtgacacagtgcaggccgacctgagcaagaaccggctggtggaggtgcccatggagctgtgccactttgtgtccctggagatcctgaacctgtaccacaactgcatccgggtcatccctgaggccatcgtgaacctgcagatgctgacctacctgaacctgagcaggaaccagctgagcgccctgcctgcctgcctgtgtggcctgcccctgaaggtgctgattgccagcaacaacaagctgggcagcctgcctgaggagatcggccagctgaagcagctgatggagctggatgtgtcctgcaatgagatcacagccctgccccagcagatcggccagctgaagagcctgcgggagctgaatgtgagaagaaactacctgaaggtgctgccccaggagctggtggacctgagcctggtgaagtttgacttcagctgcaacaaggtgctggtgatccccatctgcttccgggagatgaagcagctgcaggtgctgctgctggagaacaaccccctgcagagccccccagcccagatctgcaccaagggcaaggtgcacatcttcaagtacctgagcatccaggcctgccagatcaagacagctgacagcctgtacctgcacaccatggagcggccccacctgcaccagcacgtggaggatggcaagaaggacagcgacagcggcgtgggcagtgacaatggagacaagaggctgagcgccacagagcccagtgatgaggacacagtgtccctgaatgtgcccatgagcaacatcatggaggaggagcagatcatcaaggaggacagctgccaccggctgagccctgtgaagggggagttccaccaggagttccagcctgagcccagcctgctgggggacagcaccaacagcggggaggagcgggaccagttcacagacagagcagatggcctgcacagcgagttcatgaactacaaggcccgggcagaggactgtgaggagctgctgagaattgaagaagatgtgcactggcagacagagggcatcatcagcagcagcaaggaccaggacatggacatcgccatgattgagcagctgcgggaggccgtggacctgctgcaggaccccaacggcctgagcacagacatcacagagaggtctgtgctgaacctgtaccccatgggcagcgctgaggccctggagctgcaggacagcgccctgaatggccagatccagctggagaccagccctgtgtgtgaggtgcagagcgacctgaccctgcagagcaatggcagccagtacagccccaatgagatccgggagaacagccctgctgtgagccccaccaccaacagcacagcccccttcggcctgaagcccaggtctgtgttcctgcggccccagaggaacctggagagcattgacccccagttcaccatccggaggaagatggagcagatgagggaggagaaggagctggtggagcagctgcgggagagcattgagatgaggctgaaggtgtccctgcacgaggacctgggcgccgccctgatggatggagtggtgctgtgccacctggtgaaccacatccggcccaggtctgtggccagcatccacgtgcccagccctgctgtgcccaagctgtccatggccaagtgcagaagaaatgtggagaacttcctggaggcctgcaggaagctgggcgtgcctgaggagaagctgtgcctgccccaccacatcctggaggagaagggcctggtgaaggtgggcatcaccatccaggccctgctggacatcaccgtgaccaaggccctcttcacctag

SEQ ID NO: 62412 - DNA, 3245 bp, Artificial Sequence
  derived and/or modified sequence
ccgcagtccttagcttcccggggacaggaaaccttcaagaccgagctgccacggccgcctccccgcccgccccccattctacgcgcctgcccacaccctcctcccctccttccagcgcctttcggtggagcactgcggcactcagcccgagctgccgttttcccctcgcggggaacgctgtgacccccccgcaggagcggcggggcggggtgggggggcccgggagaagatggcgacgccgggaagcgaaccccaacctttcgtcccggccctttcggtagctactctgcacccacttcatcatccccaccaccaccaccaccaccatcagcaccacggaggaaccggcgcccccggcggggcgggtggtggcggcggtggcagcgggggcttcaacctgcccttgaaccggggtctggagcgcgcgcttgaggaggcggccaactccggggggctgaacctgagcgccaggaaattgaaggaatttccccgtaccgcagcccccgggcacgacctctcggacacggtgcaggcagacttatctaaaaacagactggttgaagttccaatggaattgtgccattttgtatcactggaaattcttaatctgtatcacaactgtatcagagtcattcctgaggccatcgttaatctgcagatgctgacttacctgaacttgagtcgaaatcagctgtccgccctgcctgcctgcctgtgtggtctgcctctcaaagtcttaatcgcaagtaacaacaaacttggatcattaccagaagagataggtcagctcaaacagttaatggagctggatgtcagctgcaacgagatcacagcgttgccccagcagataggtcagttgaaatctctacgagaactgaatgtcagaagaaattaccttaaagttttaccacaagaactagtagatctttccttggtaaagtttgacttttcctgcaacaaagtgctcgtgattccaatttgttttagagagatgaagcagctgcaagtgttactacttgagaataaccctctgcagtctcctccagcacagatttgcacaaagggcaaagttcacatatttaagtatctgagcatacaagcatgccagattaagacagctgactccctttatctccacaccatggagaggccacatttacaccagcacgtggaagatggcaagaaggattctgattcgggagttggaagtgataatggagataagcgattatctgccaccgagccttctgacgaagacactgttagcctcaatgtgccaatgtcaaacatcatggaagaagaacagatcatcaaggaggactcgtgccatcgccttagccccgttaaaggggaatttcatcaggaatttcaaccggagccttcccttttgggtgacagcaccaactcaggagaagaaagagaccagtttactgatagagcagatggtctccattcggaatttatgaactataaggcaagggcagaagactgtgaagagctgttacggatagaagaggatgtgcactggcaaactgagggcataataagttcatccaaagatcaggacatggatatagcaatgatcgagcagctgagagaagcagtagatttgctgcaagatcccaatggattaagcacagatattacagagagaagtgttttaaacctatatcctatgggatcagcagaagccttagaattacaagattctgcactgaatggtcaaatacagctggagacatctccggtgtgtgaggtgcaaagtgatctaacattacagagtaacgggagccagtattctccaaatgagattagagagaactcccctgcagtctctcctaccacaaacagcacagctccatttggcctgaagcctcgatcagtgtttctaagacctcagagaaatttggaatctatagacccgcagtttacaatccggaggaaaatggagcagatgagagaagagaaagagctggtggaacaacttcgtgagagcattgagatgagattgaaggtcagtctacacgaagacctgggggcagccctcatggatggtgtcgtcctctgccatctggtcaaccacatccgcccacggtcggttgcaagcatccatgtcccatcaccagcggttcccaaacttagcatggccaaatgcagaagaaatgtggaaaactttttggaagcatgccgaaaattaggagtaccagaggaaaagctatgtctcccccaccacatccttgaagaaaaaggcctggtcaaagtgggcattaccattcaagcattactagacatcaccgtaacgaaggctctgttcacatgaaactaccccttctccattgggggctcagactctgctctcatccaggatcctgaactctgctccaggcacctgttcaaccctctctcccacccactgcctgtcacttcactgactccagttacattgaaacaattttcagtctaagggaggattttctacctttcagagctgacctccgactttaagacttgacaggtatttatcttgaaaccagagagggagctggaggaaaaaaaaactgagcagcacatcaatgccttttccaccctccttcatcctttccacactcaccgactgccattaccaaaacgccaagcacaaccgttttgcagcaagacgcattcgttttattaaaaccaaactcgttatgtatttagtggggggaggggggcacaatcaggtttttcaccaccaaatttttcgagaggtttcttgagaccattgccttttaaaaaactattttcgacatacaaaatatttatataaatattatttattagtgagttgttattcatcctttggatgcaaattgtaaattaggaaactattttattactgcttttttgtggttaaacactttattttaatataaatgttgagttattttctatcctctttggtgtgcggtagtttaggtctcagtaatgtttctggtatatatgattccaaaaaaaagcgaaaaacaggtgcttttaggacacaacttttctggggaggcaatattgacactttggtttgtggaacgttggtcttatttatatttctgcattccatccagtttcctacattccagcagccctctgtcccccaatataatgaactgactaaaatcaagagagcaccccaaagttatttgtaaatagctgtgatggaaaaaaaaaagacatattaaacttgaagctaaaatgtgaacaattattttttg

SEQ ID NO: 62413 - DNA, 2091 bp, Artificial Sequence
  derived and/or modified sequence
atggccacccccggcagcgagccccagcccttcgtgcccgccctgtcagttgcaactctgcatcccttacatcaccctcatcatcaccaccaccatcaccagcaccatgggggaacaggcgcgccaggcggggccgggggcggtggaggtggttccggtgggttcaacctgcccttaaatagaggcctggaaagggctctggaggaggcagcgaactcagggggcctcaacctcagcgctaggaagctgaaagaatttcccagaactgccgccccaggtcacgaccttagtgatacagtacaggccgatctaagcaagaacaggctggtggaagtgcctatggaactttgccactttgtgtccctagagatacttaacctgtatcataactgtatcagggtgatcccggaagccatcgtgaaccttcagatgctcacatacctgaatttatctaggaaccagctgtccgcattaccggcctgcttatgtggcttacctctcaaggtcctgattgccagtaataacaagctcggatctctgcctgaggaaattggacaactgaagcaactgatggagcttgatgtcagttgcaatgagattacagccctaccgcagcagatcggtcaactgaaatcactgcgggagttaaacgtcaggcgcaattatctcaaagtactccctcaggagctggtggatttgtcgcttgtgaagttcgacttctcttgtaacaaggtgctggtgatcccgatatgtttcagggagatgaagcagctccaggttttgttgctggagaacaacccgctccaaagtccaccagctcagatttgcacaaaaggcaaagtacatatcttcaagtacctttctatccaggcctgccagatcaagactgccgactccttgtatctgcataccatggagagaccccacctgcatcagcacgtagaggacggcaagaaggactcggatagtggcgttggcagcgacaatggagacaaacgattgtctgcaacagagccatctgacgaagacactgtttcactaaacgtccctatgtccaacatcatggaagaagagcagatcatcaaagaagacagttgccatcgcctctcacccgtgaagggtgagtttcatcaggagttccaaccagaaccctccttactgggcgatagtactaattcaggggaggaacgagatcagttcacagatcgcgctgatggcctgcactccgagtttatgaactataaggctcgagccgaggattgtgaggagcttctcaggatcgaagaggacgtccactggcaaacagagggcatcattagctcttccaaggatcaggatatggatatagccatgatcgaacagcttagagaggccgtcgacttactgcaggatccaaacgggttgtctacagacatcacagagcgttctgtactaaacctgtacccaatggggagcgctgaggccctggagctgcaagattctgcactgaatggtcagatccagttagaaacatcgcccgtgtgcgaggtgcaatctgacctgaccctccagagcaatggttctcaatatagccccaacgagatacgcgagaacagtccagctgtgtcacctactaccaatagtactgctccatttgggcttaagcccaggagcgtgtttttgcgcccacagcggaaccttgagtcaatcgaccctcaatttaccatccgccggaagatggagcagatgagagaggagaaagaactggtggagcagctgagggagagcatcgagatgagactgaaggttagtttacacgaggacctgggggcagcccttatggacggggtggtgctgtgccaccttgtgaaccatattcggcccaggtcagtggccagtatccacgtgccatcccctgctgtgcccaagctgagtatggccaagtgtcgcagaaacgtcgaaaactttctggaggcctgcaggaaacttggcgtgccagaggagaagctgtgcctgcctcaccatattcttgaagagaagggactagtgaaggtaggcattactatccaagcactgctggatatcaccgtaacaaaggcactgttcacatag

SEQ ID NO: 62414 - DNA, 2091 bp, Artificial Sequence
  derived and/or modified sequence
atggccacacctggatccgagccacagccttttgtccctgcactgagcgtggctactctccaccctctgcaccacccccaccatcaccaccaccatcaccaacaccacggaggcacaggcgctccaggcggagcgggaggcggtggcggtggcagcgggggatttaacttgcctctgaacagaggcctggagagggcactggaagaagcggctaatagtgggggtctgaatctgtcagcgagaaagctcaaggagttccctcggactgctgctccaggacacgacctgtcagatactgtgcaggctgacctgtccaaaaacaggttggtggaggtccctatggaactatgtcattttgtgtcacttgaaatcctcaatctttatcacaattgtataagagtgattccagaggccatcgtgaacctacagatgcttacctacctaaatctctctcgaaatcaactgtccgctctgcccgcttgcttatgcgggctacccctcaaagtcctgatcgcgagcaataataagttgggctccttgcccgaggaaattggacagcttaagcagctgatggagctggatgttagctgtaacgagatcacggcactgccgcagcagattgggcagctgaaaagcctgcgagagctgaatgttagacgcaactatttaaaggtgcttccgcaggagctggtggatctaagcctggtcaaatttgatttttcatgcaataaggtactggtgattcccatctgttttcgggaaatgaagcagcttcaggtcctcctgctggagaacaatcccctgcaatcccctcccgctcagatttgcaccaagggaaaagttcacatcttcaaatatttgtcaatccaagcttgtcagattaagacggctgatagtctgtaccttcacaccatggaaagaccacaccttcaccagcacgtcgaggatggaaagaaggactccgactctggagtgggatcagacaatggcgataagagattgtccgcaacggagccctccgacgaagatacggtctccctgaacgtcccaatgagtaatattatggaagaagagcagatcattaaagaagattcctgccatcggttgagccctgtcaagggggagtttcaccaggagtttcaacccgagcccagcctcctcggagattccaccaacagcggagaggagagggatcaattcacggatagggccgatggtctccattctgaattcatgaattataaagctagggccgaagattgtgaggagctactgcggatagaggaagatgtccattggcaaacagagggtataatcagcagctccaaagatcaagacatggatattgccatgatcgaacagcttagggaagctgtggacctcctccaggaccctaacggactgagcacggacatcactgaaagaagcgtgttgaacctgtaccctatgggcagcgccgaggccttagaactccaggattctgctctgaacggccagattcagttggaaacctcccctgtgtgcgaggtgcagtcagacctgacattgcagagcaacgggtcacaatattcccctaacgaaattcgcgaaaactcacccgctgtctcaccgactaccaactctaccgcaccattcggactaaagcccagatccgttttcctaaggccacagaggaacctggagtctatcgatccccaattcacaatcagaagaaaaatggaacagatgcgtgaggagaaggaactggttgagcagctgcgcgagtctattgaaatgcgtttaaaagtgagcctgcacgaagacttaggcgctgctttgatggacggcgtggttttgtgccatttagttaatcacattaggcccagatcggtggcttcaattcatgtcccaagtccagccgtccccaagctgtctatggcaaaatgccgcaggaacgtcgaaaattttctggaagcctgtagaaagctgggggtccccgaagagaagctgtgcctgccccatcacatcctggaggagaaggggctggtgaaggtgggcatcacaatacaggcactcttggacatcacagtgactaaggcgctcttcacttag

SEQ ID NO: 62415 - DNA, 2091 bp, Artificial Sequence
  derived and/or modified sequence
atggccacccccggcagcgagccccagcccttcgtgcccgccctgagcgtggccaccctgcaccccctgcaccacccccaccaccaccaccaccaccaccagcaccacggcggcaccggcgcccccggcggcgccggcggcggcggcggcggcagcggcggcttcaacctgcccctgaacagaggcctggagagagccctggaggaggccgccaacagcggcggcctgaacctgagcgccagaaagctgaaggagttccccagaaccgccgcccccggccacgacctgagcgacaccgtgcaggccgacctgagcaagaacagactggtggaggtgcccatggagctgtgccacttcgtgagcctggagatcctgaacctgtaccacaactgcatcagagtgatccccgaggccatcgtgaacctgcagatgctgacctacctgaacctgagcagaaaccagctgagcgccctgcccgcctgcctgtgcggcctgcccctgaaggtgctgatcgccagcaacaacaagctgggcagcctgcccgaggagatcggccagctgaagcagctgatggagctggacgtgagctgcaacgagatcaccgccctgccccagcagatcggccagctgaagagcctgagagagctgaacgtgagaagaaactacctgaaggtgctgccccaggagctggtggacctgagcctggtgaagttcgacttcagctgcaacaaggtgctggtgatccccatctgcttcagagagatgaagcagctgcaggtgctgctgctggagaacaaccccctgcagagcccccccgcccagatctgcaccaagggcaaggtgcacatcttcaagtacctgagcatccaggcctgccagatcaagaccgccgacagcctgtacctgcacaccatggagagaccccacctgcaccagcacgtggaggacggcaagaaggacagcgacagcggcgtgggcagcgacaacggcgacaagagactgagcgccaccgagcccagcgacgaggacaccgtgagcctgaacgtgcccatgagcaacatcatggaggaggagcagatcatcaaggaggacagctgccacagactgagccccgtgaagggcgagttccaccaggagttccagcccgagcccagcctgctgggcgacagcaccaacagcggcgaggagagagaccagttcaccgacagagccgacggcctgcacagcgagttcatgaactacaaggccagagccgaggactgcgaggagctgctgagaatcgaggaggacgtgcactggcagaccgagggcatcatcagcagcagcaaggaccaggacatggacatcgccatgatcgagcagctgagagaggccgtggacctgctgcaggaccccaacggcctgagcaccgacatcaccgagagaagcgtgctgaacctgtaccccatgggcagcgccgaggccctggagctgcaggacagcgccctgaacggccagatccagctggagaccagccccgtgtgcgaggtgcagagcgacctgaccctgcagagcaacggcagccagtacagccccaacgagatcagagagaacagccccgccgtgagccccaccaccaacagcaccgcccccttcggcctgaagcccagaagcgtgttcctgagaccccagagaaacctggagagcatcgacccccagttcaccatcagaagaaagatggagcagatgagagaggagaaggagctggtggagcagctgagagagagcatcgagatgagactgaaggtgagcctgcacgaggacctgggcgccgccctgatggacggcgtggtgctgtgccacctggtgaaccacatcagacccagaagcgtggccagcatccacgtgcccagccccgccgtgcccaagctgagcatggccaagtgcagaagaaacgtggagaacttcctggaggcctgcagaaagctgggcgtgcccgaggagaagctgtgcctgccccaccacatcctggaggagaagggcctggtgaaggtgggcatcaccatccaggccctgctggacatcaccgtgaccaaggccctgttcacctag

SEQ ID NO: 62416 - DNA, 471 bp, Artificial Sequence
  derived and/or modified sequence
atgagcagcgtgcagagccagcaggagcagctgagccagagcgaccccagccccagccccaacagctgcagcagcttcgagctgatcgacatggacgccggcagcctgtacgagcccgtgagcccccactggttctactgcaagatcatcgacagcaaggagacctggatccccttcaacagcgaggacagccagcagctggaggaggcctacagcagcggcaagggctgcaacggcagagtggtgcccaccgacggcggcagatacgacgtgcacctgggcgagagaatgagatacgccgtgtactgggacgagctggccagcgaggtgagaagatgcacctggttctacaagggcgacaaggacaacaagtacgtgccctacagcgagagcttcagccaggtgctggaggagacctacatgctggccgtgaccctggacgagtggaagaagaagctggagagcccctag

SEQ ID NO: 62417 - DNA, 414 bp, Artificial Sequence
  derived and/or modified sequence
atgagcagcgtgcagagccagcaggagcagctgagccagagcgaccccagccccagccccaacagctgcagcagcttcgagctgatcgacatggacgccggcagcctgtacgagcccgtgagcccccactggttctactgcaagatcatcgacagcaaggagacctggatccccttcaacagcgaggacagccagcagctggaggaggcctacagcagcggcaagggctgcaacggcagagtggtgcccaccgacggcggcagatacgacgtgcacctgggcgagagaatgagatacgccgtgtactgggacgagctggccagcgaggtgagaagatgcacctggttctacaagggcgacaaggacaacaagtacgtgccctacagcgagagcttcagccaggtgctggagtag

SEQ ID NO: 62418 - DNA, 471 bp, Artificial Sequence
  derived and/or modified sequence
atgtcatccgtgcaatcccaacaggagcagctctcacagagcgatccttctccaagtccgaactcctgctcaagctttgagctaatcgacatggatgccggctctctatatgaaccggtttccccccactggttttattgtaaaatcatcgatagcaaagagacctggattcctttcaacagcgaggatagccagcagctcgaggaggcttattcatccggtaaagggtgtaacggccgggtggtccctactgatggtggccgctacgatgttcacctaggggaaagaatgcggtatgcggtttattgggatgaacttgctagcgaagtaaggaggtgcacgtggttctataaaggggacaaagataacaaatatgtgccatacagtgagagtttttctcaggtactggaggaaacttatatgctggccgtcacattggacgagtggaaaaaaaagttagagagcccctag

SEQ ID NO: 62419 - DNA, 414 bp, Artificial Sequence
  derived and/or modified sequence
atgagctcagttcagagccaacaggagcagctctctcagagcgacccctcgcctagcccgaacagttgctcttcttttgagctaattgatatggacgccggctccctgtatgaaccagtgtccccacattggttctactgcaagatcatcgatagcaaagagacgtggattccctttaatagtgaggacagccagcagctcgaagaagcatattcatcagggaaagggtgcaatggaagagtggtacctaccgacggcggccggtacgatgtgcatctcggggagagaatgcgctatgcagtgtactgggacgaattggcgagcgaggtaagacgttgcacatggttctacaagggtgataaggataataaatatgtgccctattcagaaagtttttcacaggtgttggaatag

SEQ ID NO: 62420 - DNA, 471 bp, Artificial Sequence
  derived and/or modified sequence
atgagctctgtgcagagccagcaggagcagctgagccagagcgaccccagccccagccccaacagctgcagcagctttgagctgattgacatggatgctggcagcctgtatgagcctgtgagcccccactggttctactgcaagatcatcgacagcaaggagacctggatccccttcaacagcgaggacagccagcagctggaggaggcctacagcagcggcaagggctgcaatggccgggtggtgcccacagatggcggccgctatgatgtgcacctgggggagaggatgagatatgctgtgtactgggatgagctggccagcgaggtgcggcgctgcacctggttctacaagggggacaaggacaacaagtatgtgccctacagcgagagcttcagccaggtgctggaggagacctacatgctggccgtgaccctggatgagtggaagaagaagctggagagcccctag

SEQ ID NO: 62421 - DNA, 414 bp, Artificial Sequence
  derived and/or modified sequence
atgagctctgtgcagagccagcaggagcagctgagccagagcgaccccagccccagccccaacagctgcagcagctttgagctgattgacatggatgctggcagcctgtatgagcctgtgagcccccactggttctactgcaagatcatcgacagcaaggagacctggatccccttcaacagcgaggacagccagcagctggaggaggcctacagcagcggcaagggctgcaatggccgggtggtgcccacagatggcggccgctatgatgtgcacctgggggagaggatgagatatgctgtgtactgggatgagctggccagcgaggtgcggcgctgcacctggttctacaagggggacaaggacaacaagtatgtgccctacagcgagagcttcagccaggtgctggagtag

SEQ ID NO: 62422 - DNA, 471 bp, Artificial Sequence
  derived and/or modified sequence
atgagcagcgtgcagagccagcaggagcagctgagccagagcgacccttcaccgagccccaacagttgttcttcctttgaactgatcgatatggacgccggttccctctatgaaccagtttcccctcattggttttactgtaagattatcgacagcaaggagacgtggatcccattcaattctgaagacagccagcagctggaggaagcctatagttctgggaagggatgcaatggtcgggtcgtgcctacggatggcggacggtatgatgttcacctcggcgaaaggatgcggtacgccgtttattgggatgaactggcctcggaggtcaggaggtgcacgtggttctacaaaggtgacaaggataacaaatacgtgccatatagcgagtccttctcccaggtgctggaagagacatacatgctcgccgtcactttggacgaatggaaaaagaaactggagagcccatag

SEQ ID NO: 62423 - DNA, 414 bp, Artificial Sequence
  derived and/or modified sequence
atgagcagcgtgcagagccagcaggagcagctgagccagagcgaccccagcccatcgcctaattcctgttcttccttcgaactgattgatatggatgccggcagcttgtatgaacctgtcagccctcactggttctactgcaagatcatagatagcaaagaaacatggatccctttcaacagcgaggatagccaacagctggaggaggcctattcttcaggcaaagggtgtaatgggcgtgtagtgcctactgacggtgggcgttacgacgtacacctgggggaacgcatgcggtatgcagtgtattgggatgagctcgccagcgaagttcggaggtgtacatggttctacaaaggagacaaggacaataaatacgtcccttactccgagtctttctcccaggtgctcgaatag

SEQ ID NO: 62424 - DNA, 471 bp, Artificial Sequence
  derived and/or modified sequence
atgtcttccgtgcaaagtcagcaagagcagctgtctcagtcggatccttccccatcacccaactcttgctctagttttgaactgattgacatggacgctggttcgctgtacgaaccagtgagccctcactggttctattgtaagatcattgacagtaaagaaacatggatcccatttaactcagaagacagccagcagctggaggaagcatacagcagcggtaaagggtgcaatggtcgggttgtgcccaccgacggcggacgttatgatgttcatctcggcgagagaatgcgttatgccgtttactgggacgagctggcaagtgaggtgcggagatgtacatggttttataagggcgacaaagacaacaagtatgtaccctactccgagagtttcagtcaagtcctggaagagacttacatgctcgcagtgactttggacgaatggaagaagaagctggagagcccttag

SEQ ID NO: 62425 - DNA, 414 bp, Artificial Sequence
  derived and/or modified sequence
atgagctccgtgcagtcacaacaggagcaactgtcccagtccgacccttcaccatccccgaactcttgttcgagtttcgaactcatcgatatggatgcgggatccctgtatgaacctgtgagtccacattggttctactgcaagataatcgacagtaaggagacctggattccgtttaattctgaggacagccaacagctcgaggaggcctattcctccggcaaagggtgcaatgggcgtgtggtgccaaccgatgggggtagatacgatgtgcatctgggtgagaggatgcggtacgccgtctactgggatgaactggcaagcgaagtacgcaggtgtacgtggttttataagggagacaaggataataaatatgtcccctactccgagtctttctcccaggtactggagtag

SEQ ID NO: 62426 - DNA, 568 bp, Artificial Sequence
  derived and/or modified sequence
ttcttgctgctgccatgtgaagaaggacgtatttgcttccccttctgccacgatgggaagttttccgaggcctccgccactatgctgaactagagcgaaatgtcatcagtgcagtcacaacaggagcagttgtcccagtcagatccatctccgtcaccaaactcatgtagttcctttgagctaatagacatggatgctggcagcttgtatgaaccagtttctccccattggttttattgtaagataatagattctaaggagacatggattcctttcaactctgaggattcacagcagctggaagaggcatatagctctggaaaaggttgtaatgggagagttgttcctactgatgggggcagatatgatgttcatttgggggagaggatgcggtatgctgtatactgggatgaactggcatcggaagtgagacgatgtacgtggttttacaagggggacaaagacaataagtatgttccctactcggagagcttcagccaagttttagaggaaacttacatgcttgctgtaactttggatgaatggaaaaagaaactggaatctccca

SEQ ID NO: 62427 - DNA, 683 bp, Artificial Sequence
  derived and/or modified sequence
ctctcccccactgttagacctcagcagccagcagcccgccgcccggcgctgcagctccctgcccgcaggagccacgtctcgcgcgactccccccacctctcgcgacacttgccgcccgtgccctgcggccctgcacgccccacccgcggtcgcgcgccgcgctccccgccgcctcaccttttcgcctggcatccgggcccgctactcgcccactgggagcgccgtggcgcctggtgttcggcgcgagcccggcggggctgcagagagcgaaatgtcatcagtgcagtcacaacaggagcagttgtcccagtcagatccatctccgtcaccaaactcatgtagttcctttgagctaatagacatggatgctggcagcttgtatgaaccagtttctccccattggttttattgtaagataatagattctaaggagacatggattcctttcaactctgaggattcacagcagctggaagaggcatatagctctggaaaaggttgtaatgggagagttgttcctactgatgggggcagatatgatgttcatttgggggagaggatgcggtatgctgtatactgggatgaactggcatcggaagtgagacgatgtacgtggttttacaagggggacaaagacaataagtatgttccctactcggagagcttcagccaagttttagagg

SEQ ID NO: 62428 - protein, 295 aa, Artificial Sequence
  derived and/or modified sequence
MSEDPRGPKVPRKAVVEKPARAAEREARALLEKNRSYRLLEDSEESSEETVSRAGSSLQKKRKKRKHLRKKREEEEEEEASEKGKKKTGGSKQQTEKPESEDEWERTERERLQDLEERDAFAERVRQRDKDRTRNVLERSDKKAYEEAQKRLKMAEEDRKAMVPELRKKSRREYLAKREREKLEDLEAELADEEFLFGDVELSRHERQELKYKRRVRDLAREYRAAGEQEKLEATNRYHMPKETRGQPARAVDLVEEESGAPGEEQRRWEEARLGAASLKFGARDAASQEPKYQL

SEQ ID NO: 62429 - DNA, 888 bp, Artificial Sequence
  derived and/or modified sequence
atgtccgaagaccccagaggtcctaaagtgcctagaaaggcagtggtcgagaagcctgctagggccgctgaacgagaagcccgcgcactgttggagaaaaaccgaagttataggctgctggaggatagtgaggagtcatccgaagagaccgtcagccgggcgggatccagcctgcagaaaaagcggaagaaacgcaaacacctgagaaagaaaagggaggaagaggaagaggaagaggcaagcgagaagggaaagaagaagacagggggtagcaaacaacaaacggagaaacctgaatctgaggatgagtgggaacgcactgagagggaacgtctgcaggacctggaggagcgcgacgcctttgccgagcgagtgaggcagagggacaaggaccggacgcgaaacgtgttggaaagaagtgataagaaggcatatgaggaggcccagaagcggcttaagatggcagaggaggaccgaaaagccatggtgccagagctgagaaaaaagtccaggagggagtatctggccaagcgagagcgggagaaactcgaggatcttgaagcagagcttgcggatgaggagtttctcttcggcgacgtggagctttcccggcatgagcggcaggagttaaagtataaacgccgcgtgcgggatttggcacgcgagtaccgcgccgccggggagcaggagaagctggaggcaacaaatagatatcatatgcctaaggaaacaaggggacagccggcacgcgcagtggacctggttgaagaggagtctggagcccctggcgaagagcagaggcggtgggaagaagcacgtctcggcgcagcatcactaaagttcggggcgagagacgccgcaagtcaggagccgaaataccagctgtag

SEQ ID NO: 62430 - DNA, 888 bp, Artificial Sequence
  derived and/or modified sequence
atgtcagaggatccccgggggcccaaggttccaaggaaggctgtggtggaaaaacccgctcgcgcagcagaacgagaggccagagctctcttagaaaaaaacaggagctaccgcttgcttgaggatagcgaggaatcctccgaggaaacagtctcccgggccggtagcagcctgcagaagaagcgcaagaaacgcaaacacctgcggaagaaacgggaggaagaggaagaggaagaagcctctgagaagggcaaaaagaaaaccggtgggtccaagcagcagactgagaaacccgagtccgaggacgagtgggagcgaacagagcgcgagcgactccaggaccttgaggagcgagatgctttcgctgagagagtgcggcagcgcgataaagacagaactaggaacgtgctggagagaagtgacaaaaaagcatacgaggaggcgcaaaagcggctgaaaatggcagaggaagacaggaaggcaatggtccctgaactgaggaaaaaatcccgcagggagtacttggctaagcgggagcgggagaagctggaggatctggaggccgagctggctgacgaggaattcctgttcggcgacgtggaactttcgcgccatgagcgacaggaattaaagtataaacgcagagtccgcgatctcgcgagagaatatcgcgccgcaggtgaacaggagaaactagaggcaactaacagataccacatgcctaaagagacacggggacaacctgccagagccgtcgatctggttgaggaggaaagtggggcccccggtgaggagcaacgccgctgggaagaagcccggttaggtgccgcatcactcaaattcggcgcacgtgacgccgcctcacaggagcccaaatatcagctgtag

SEQ ID NO: 62431 - DNA, 888 bp, Artificial Sequence
  derived and/or modified sequence
atgagcgaagaccctcgcggccccaaggtcccccggaaagcggtggtagagaagcccgctcgggccgcagagagagaggctcgggccttgctagaaaagaaccggtcctatagacttctagaggattccgaggaatcatctgaggagactgtttcccgtgccggctcatccctgcaaaagaagcgtaaaaaaagaaagcacctgaggaagaaacgagaggaagaagaggaagaagaagcctccgagaagggtaagaagaaaaccggcggctcgaagcagcagaccgagaaaccggaaagcgaggacgagtgggaacggacagaaagagaaaggttacaggatctggaggagcgggatgcattcgctgaacgggtgcgacagagagacaaggacaggacgagaaacgtgctggaaagatccgacaaaaaagcatacgaggaggcccagaagaggctaaaaatggcagaggaagaccggaaagccatggtccctgagctgagaaaaaaatctaggagagaatatctggctaaacgagaaagagaaaagcttgaagatctggaagccgaactggccgacgaggagtttctcttcggagatgtggagctctccaggcacgaacggcaagagctgaagtataaacgacgggtacgggatctggcgcgggagtatcgggccgccggagagcaagagaagctagaggccactaacaggtaccacatgcccaaagaaaccaggggccagccagcacgggccgttgacctagttgaagaggagtccggcgcccctggagaggagcagcgacggtgggaggaagctagattaggagccgctagcctcaagttcggagcgcgggacgccgcttctcaagagccaaagtaccagctttag

SEQ ID NO: 62432 - DNA, 888 bp, Artificial Sequence
  derived and/or modified sequence
atgagtgaagacccccgcgggcctaaggttccccgcaaggccgttgtcgagaagccagcccgcgcggcagagcgagaagcccgggccttactggagaagaaccggtcctatcgtttactggaggattccgaagagtcaagcgaggagaccgtgtccagagcgggctcatccctacagaagaaaaggaagaaaagaaagcacttaaggaaaaagcgcgaggaggaggaagaggaagaagcgtcggagaagggcaagaaaaagaccggaggatcaaaacagcagaccgagaaacccgagagcgaggatgaatgggagagaacagagagagagcggttgcaggatttagaggagcgcgacgcctttgccgaaagagtgagacagagggacaaggatcgcactcggaatgtcttggagcggtctgacaagaaagcttatgaggaagcgcagaagcgcctaaaaatggccgaggaagaccggaaagcgatggtgcccgagctaagaaaaaagtccaggcgcgagtatttggcaaaaagggaaagggagaaattggaagacctggaggccgagctggccgacgaagagttcctgttcggagacgtggaactgtctcggcacgaaagacaggagttgaagtacaaaaggcgggtacgtgatctggcaagagagtaccgcgcagctggcgagcaagaaaagctggaagcaacaaatcggtatcacatgcccaaggagacccgtggccaacccgccagggccgtcgacctcgtcgaagaggagtctggcgcccctggtgaagagcagaggcggtgggaggaggccaggctgggcgcagcgagcctcaagttcggcgctagagatgccgcaagtcaggaaccaaagtaccagctgtag

SEQ ID NO: 62433 - DNA, 888 bp, Artificial Sequence
  derived and/or modified sequence
atgtctgaggacccacgcgggccaaaggtaccgaggaaggccgttgtcgagaaaccagctcgcgccgccgagcgagaagcccgggctctacttgagaaaaaccggtcttacagactcctcgaagattcagaagagtcgtctgaagaaaccgtgtccagggccggctcaagcttacaaaagaagagaaaaaaacggaaacacctgcgaaagaagcgtgaggaggaagaggaagaggaggcttcggaaaagggaaaaaagaagaccggcggttcaaagcaacagactgagaagcctgagtccgaggatgaatgggaaaggaccgagcgggagagattgcaggatttagaggaaagggacgcgttcgccgaacgagtccggcagagggacaaggatcggactagaaacgtgctggaacgtagcgataagaaggcgtacgaggaggcccagaaacggcttaaaatggccgaagaggatcgaaaagccatggtcccagagctcagaaagaaaagtcggagggagtatctggccaagcgagaacgcgagaaactggaagatctcgaggcggagctcgcagacgaggagttcctattcggtgatgtagaactgtcccggcatgaacgccaggaacttaagtacaagcgaagggtgagagatctggctcgtgagtatagggcagccggcgagcaggagaagctcgaggctactaatcggtaccatatgcctaaggaaaccagaggccagcctgccagagccgtagacttagtggaggaggagtctggtgcacccggcgaggaacaaaggcggtgggaagaagcacggctgggagctgccagtcttaagttcggggcacgagatgccgccagtcaggaacccaagtaccaactgtag

SEQ ID NO: 62434 - DNA, 888 bp, Artificial Sequence
  derived and/or modified sequence
atgagcgaggatccccgagggcccaaggtaccaagaaaggcggtggtagagaagccggcccgggcagccgaacgggaagctcgcgcactgctagaaaaaaaccgcagctatcggctcctggaggactcagaagagtccagcgaggagactgtgtcaagagccggcagtagtcttcaaaaaaagcgcaagaaacggaagcacctccgcaaaaagagggaggaggaggaagaggaggaggcatcagagaagggaaagaaaaagacggggggaagcaaacagcagacagagaaacctgagtcagaagacgaatgggagaggacagagcgcgagcggcttcaagatctcgaagagcgggatgcgttcgcagagcgcgtcaggcagagggacaaggacaggacacgcaatgtgctggagaggtccgataagaaggcttatgaagaggcacagaagaggttgaagatggctgaagaggatcggaaggctatggtaccagagttacgcaaaaaatcgagacgagagtatctcgccaagcgcgaacgcgaaaaactggaggatctcgaagcggaactagccgacgaagagttcctcttcggcgacgttgaactctctcggcatgaaagacaggaactgaagtacaagagacgggtaagggaccttgctagggagtatcgcgctgctggtgaacaggagaaactggaggctactaaccggtaccacatgcccaaggagacccgcggtcaaccagcccgggccgtcgacctggtggaggaagagagcggtgcccccggagaggaacaacgcagatgggaggaagcgaggctgggagctgcgtccctcaagtttggggctagggacgccgcaagtcaggagcctaagtatcagctgtag

SEQ ID NO: 62435 - DNA, 888 bp, Artificial Sequence
  derived and/or modified sequence
atgtcagaggacccaagaggtccgaaagttcctagaaaggccgtcgtcgaaaagcccgctcgcgcagccgaaagagaggccagagccttgttggagaaaaacaggagttatcgccttttagaggatagcgaggaaagctctgaggagactgtatcccgagcaggctcaagtctgcagaaaaagaggaagaaaaggaagcacctgaggaagaaacgcgaggaagaagaggaggaagaagcttcagaaaagggaaaaaaaaaaaccggagggagcaagcagcagaccgaaaaacctgagtcggaggatgaatgggaacggaccgagagggaacgtctccaggacttagaagagcgcgatgccttcgccgagcgagtgagacagcgggataaggaccggacgagaaacgtgctcgagaggtcagataagaaggcctatgaagaagcgcagaagaggctgaaaatggccgaggaagacagaaaggcaatggtccctgagttgagaaagaaaagccggcgggagtacctggctaagcgggagcgcgagaaattggaggacctcgaggctgagctggctgacgaagagtttttatttggcgatgtcgagttatcacgacatgagcggcaggagcttaagtataaacggcgtgtgagagatctggcccgagagtacagagccgccggcgagcaggaaaaactggaagccaccaaccggtatcatatgccaaaggaaactaggggtcaacccgctagagccgtggatctcgtagaggaggagagcggtgctcctggagaggaacaacggaggtgggaagaagcaagacttggggcggcaagtctcaagttcggtgcacgcgacgccgcttctcaggagcctaagtaccagttgtag

SEQ ID NO: 62436 - DNA, 888 bp, Artificial Sequence
  derived and/or modified sequence
atgtcggaggaccctaggggacccaaggtcccacgcaaggccgtagtggagaagcctgcccgcgcggctgaacgagaggcccgcgcactcctggagaagaatcggtcctatcgccttttggaagatagcgaggaaagttccgaagagaccgtatctcgggccgggagtagtctgcagaaaaaaagaaagaaacgaaaacatcttcgcaagaagcgtgaagaggaagaggaagaggaggccagcgagaagggtaaaaagaagactggaggttcaaaacaacagacagaaaagccagagtctgaggacgagtgggagaggaccgaaagggaacggttgcaggacttggaggaacgggacgctttcgccgaaagagtcagacaaagagataaggaccgcactcggaatgtgctcgagcgatccgacaaaaaggcatatgaggaagcccagaagaggctcaagatggccgaggaagatcgtaaggccatggtgcctgaactccggaagaagtctcgccgcgaatatctggcaaagcgggagcgcgaaaaactggaagacctggaggcagaattggccgatgaggaattcttatttggcgatgttgaactgtctagacatgagcggcaagaattgaagtacaagaggcgggtgcgcgatttggcacgagaatatagggcagctggcgagcaagaaaaactggaggctaccaataggtaccatatgcctaaggagacccgtgggcagcccgctcgggcagtggatctcgtggaggaggaatccggggccccaggggaagaacaacgccgctgggaggaggcccgtctgggcgctgctagcttgaagtttggggccagggacgctgctagccaggaacccaagtaccagctctag

SEQ ID NO: 62437 - DNA, 888 bp, Artificial Sequence
  derived and/or modified sequence
atgtctgaggacccccggggccccaaggtgcccaggaaggctgtggtggagaagccagcccgggctgctgagcgggaggcccgggccctgctggagaagaacagaagctaccgcctgctggaggacagcgaggagagcagcgaggagaccgtgtcccgggccggcagcagcctgcagaagaagaggaagaagaggaagcacctgaggaagaagcgggaggaggaggaggaggaggaggccagcgagaagggcaagaagaagacaggaggcagcaagcagcagacagagaagccagagagtgaagatgagtgggagaggacagagcgggagcggctgcaggacctggaggagagagatgcctttgctgagcgggtgcggcagagggacaaggacaggaccagaaatgtgctggagaggagtgacaagaaggcctatgaggaggcccagaagaggctgaagatggccgaggaggacaggaaggccatggtgcctgagctgaggaagaagagcagaagagagtacctggccaagcgggagcgggagaagctggaggacctggaggccgagctggctgatgaggagttcctgtttggagatgtggagctgagcagacatgagcggcaggagctgaagtacaagagaagagtgcgggacctggcccgggagtacagagctgctggggagcaggagaagctggaggccaccaaccgctaccacatgcccaaggagacccggggccagcctgcccgggctgtggacctggtggaggaggagagcggggcccctggagaggagcagaggcgctgggaggaggcccggctgggcgccgccagcctgaagtttggagccagagatgctgccagccaggagcccaagtaccagctgtag

SEQ ID NO: 62438 - DNA, 888 bp, Artificial Sequence
  derived and/or modified sequence
atgagcgaggacccccggggccccaaggtgccccggaaggccgtggtggagaagcctgctcgagctgccgagcgagaagctagggcccttctggaaaaaaatcgatcttaccgtctgctggaggacagcgaggaaagtagcgaagaaactgtgagtagggccgggtcttccctgcagaaaaagagaaagaagcgaaagcatcttaggaaaaaaagggaggaagaggaagaagaggaggctagtgagaagggaaagaaaaaaactggaggttcaaagcagcaaacagaaaaaccagagtctgaggacgaatgggagcgtactgagagagaacgactgcaggacctggaagaacgagacgcattcgccgagagagttagacagcgcgataaagatcgaacacgtaatgttttggaaagatccgacaaaaaagcatatgaagaagcacaaaagcgcctgaagatggcagaggaggatcggaaagctatggtacccgaactgcgaaagaagagccgccgggaatacttggccaagagagaacgcgagaagctcgaagacctggaggctgagctggctgacgaggagttcctgttcggggatgtcgagctcagcagacatgagagacaagagttaaaatacaaaagaagggtacgcgacttagcccgggaatatcgcgctgcaggagagcaagaaaagttggaagcaacaaatcgctatcatatgcctaaggaaaccaggggtcaaccagctcgggcagttgacctcgttgaggaggaaagtggcgcgcctggcgaggagcagcggcgctgggaagaggcccggctcggagctgccagcctcaaattcggcgcacgagacgcagcgtcccaggaacccaaataccagctgtag

SEQ ID NO: 62439 - DNA, 888 bp, Artificial Sequence
  derived and/or modified sequence
atgagcgaggacccccggggccccaaggtgccccggaaggccgtggttgaaaaacctgctcgggcagcagagcgagaagcacgagctctgcttgaaaaaaatcgatcctaccgtctgttggaagacagcgaggaaagtagtgaagagacagtttccagggcaggatcctctttacaaaaaaagcgcaagaagaggaagcacttgagaaagaagcgcgaggaagaagaagaggaagaggcatccgagaaggggaagaagaagacgggcggcagcaagcagcagaccgaaaaacccgagagcgaagacgagtgggaaagaacagagagagaaagacttcaggacctggaggagagagacgcatttgccgaaagagtccgccagcgagacaaagatcgaaccagaaacgtgctggagaggagtgataaaaaagcttacgaggaagcccaaaagcgcctcaagatggccgaagaagatcgcaaggcgatggtgcctgagttacggaagaaatcccgacgagagtatctggccaaacgggagcgcgagaagctggaggacctggaggccgagttggccgatgaggaattcttgttcggagatgtggaactgtcccggcatgagcgtcaggaactgaagtataaacgccgagtgagggatctagctcgcgagtaccgagctgcaggggaacaggagaagttggaggcgacaaatcggtaccacatgccaaaggagactcgaggacagcccgcgcgggctgtggatttagtggaagaggaaagcggggctcctggagaagagcagaggaggtgggaggaagccagactcggcgccgcatccctcaaattcggggcgagggatgcggcttcccaggagccgaaatatcagctctag

SEQ ID NO: 62440 - DNA, 888 bp, Artificial Sequence
  derived and/or modified sequence
atgagcgaggacccccggggccccaaggtgccccggaaggccgtggtagagaagccggcccgggctgccgagagagaagccagggccctccttgagaagaatcgcagttaccgtctattggaagactccgaagagtcaagtgaagagactgtctctcgggctggctcttcgctgcaaaagaagagaaagaagaggaagcacctccggaagaaacgggaggaggaagaggaggaagaggctagcgaaaaaggtaaaaagaagacgggcggttctaaacagcaaacggaaaagcctgaaagtgaagatgaatgggagcgcacagaaagggagcgcctgcaggacctcgaggagcgagacgcttttgccgagcgtgtgaggcagcgtgacaaagatcggacccggaacgtgctcgaaaggtccgacaaaaaagcttatgaagaagcccagaagcgacttaagatggcggaagaggataggaaagcgatggtccccgagttaaggaagaaatctcgacgcgagtacttggctaaaagggagcgggagaaactggaggacctggaggctgagcttgccgacgaagaatttctctttggcgacgtggaattgtctaggcatgagaggcaggaacttaagtacaagcgtcgggtccgcgatctggccagggaatacagagctgccggagagcaagaaaaactggaagccacaaaccgctatcatatgcccaaagaaactagagggcagccagctcgcgcggtagatctggtcgaggaagaatccggggcacccggggaggagcagcgccgctgggaagaggctcggctgggggctgcctctctgaaatttggtgcacgagatgctgcatcgcaggagccaaagtatcagctgtag

SEQ ID NO: 62441 - DNA, 888 bp, Artificial Sequence
  derived and/or modified sequence
atgagcgaggacccccggggccccaaggtgccccggaaggccgtggtggaaaagcccgctcgtgctgccgagagagaagcccgggccctgcttgagaagaaccggagctataggctcctcgaggatagcgaggagagttccgaagaaacggtgagcagggccggatcttcgctccagaaaaagaggaagaagcgcaagcatctgcgaaagaagcgggaagaggaggaggaagaggaggctagcgagaagggaaagaaaaaaaccggtgggtcaaagcagcagacagagaagccggagagcgaagatgagtgggagagaaccgaacgggaacggctgcaggacctggaagagagggacgcctttgccgagcgagtccgccagagagataaggacagaacccggaatgtgctggagagatctgacaagaaagcctacgaggaagcccaaaagaggctaaaaatggctgaggaggaccgcaaagcaatggttcctgagttgcggaaaaagtcgcgcagagagtacctcgctaaacgggagagagagaaattagaggatctagaggccgagctggcagatgaggagtttttatttggcgatgttgaactctctaggcacgagcgccaagaactgaaatacaagcgccgcgttcgtgacctggctcgcgaatatagagcagctggtgaacaagagaagctggaggccacaaatcgatatcacatgcctaaggagactcggggccagcccgccagagctgtcgacttggtagaggaagagtctggtgcaccaggagaggaacaaaggcggtgggaggaagctaggcttggggcagcttcactgaaattcggggcaagggatgcggcttcccaggagcccaaataccaattatag

SEQ ID NO: 62442 - DNA, 888 bp, Artificial Sequence
  derived and/or modified sequence
atgagcgaggacccccggggccccaaggtgccccggaaggccgtggtggaaaagcctgcacgcgctgctgaacgcgaagcgcgggccctgctggaaaagaataggagctaccgcctattagaggactctgaggagagctcagaagaaaccgtatcccgtgccggctccagtctgcagaagaaacgcaaaaagaggaagcacttgcgcaaaaaaagagaagaagaagaggaagaggaggccagtgagaaaggtaaaaaaaaaaccggcgggtctaagcagcagactgagaaacctgaaagcgaggacgagtgggaacgtacagagcgcgagagactccaggatctggaggagcgcgacgccttcgccgaacgggttagacagcgggataaagaccgcactcgtaatgttctggagagatctgacaaaaaagcctatgaagaagcccagaaaaggcttaagatggcagaggaagacaggaaggccatggtccccgaactgagaaagaaatccagacgcgagtatctggcaaaacgagaacgagagaagctggaggatctggaggccgagctggcagatgaggagtttctgttcggggatgtcgagttgtcaaggcatgagaggcaggagctgaagtacaagcgcagggtgcgagacctggccagagagtacagagccgccggcgagcaagagaagctggaggctacgaacaggtaccacatgcccaaggagacccgcggccagccagcgagagctgtcgaccttgttgaggaagagtcgggtgcgcctggagaagagcaacgaagatgggaagaggcccggctcggcgcggccagtttgaagtttggggcacgtgatgccgcatcgcaggagcccaaatatcaattgtag

SEQ ID NO: 62443 - DNA, 888 bp, Artificial Sequence
  derived and/or modified sequence
atgagcgaggacccccggggccccaaggtgccccggaaggccgtggtggaaaagcctgcgcgggccgcagagagggaagcccgggctctcctggagaagaaccggtcttaccgtctgctggaggattccgaggaatcttcagaagagacagtgagcagggccgggagcagcttgcagaagaaaaggaagaaaaggaaacacctcaggaagaagcgcgaagaagaggaagaggaggaggcctctgaaaagggaaagaaaaaaacaggtggaagcaagcagcagacagagaagccggagagtgaggacgaatgggaacgtaccgaaagagagagactgcaggatctggaagaaagggatgcttttgctgagcgagtcaggcagcgagataaggaccgtaccaggaacgttctggaaaggagtgataagaaggcatacgaagaggcacagaagaggttgaagatggcggaggaagaccgcaaagccatggttcctgagctaaggaagaagagccgacgcgagtatctcgcaaaacgggagagggagaaactcgaagatctggaggccgaactcgccgacgaggaattcctgttcggggatgtggaacttagccgtcacgagcgacaagaattgaagtacaagcgtcgagtccgggatctggcacgtgaataccgcgccgcaggcgagcaagagaaattggaggctaccaatagatatcacatgcctaaggaaacccgaggccagcctgcacgagcggtggacttggtggaagaagagtccggagctcccggagaggagcagcgcagatgggaggaggcgcggttgggcgctgcctccctcaagtttggagcccgcgacgccgcttctcaagaaccaaaataccaactctag

SEQ ID NO: 62444 - DNA, 888 bp, Artificial Sequence
  derived and/or modified sequence
atgagcgaggacccccggggccccaaggtgccccggaaggccgtggtagagaaaccagctagggccgccgagagggaggccagggctctcctcgagaagaacaggtcctaccgactactagaggatagtgaggaatcatctgaagagactgtgagtagagccggaagcagtctccagaagaagcggaagaagcgaaaacacctccgcaagaaacgggaggaggaggaggaagaggaagcttctgaaaaggggaagaaaaagaccggggggtcgaagcagcagaccgagaagcctgaaagtgaagacgagtgggagcggacagagagggagcggctacaggacctggaggagcgggatgcctttgccgagagagtgcggcagcgggacaaggaccggacaagaaatgtgctggaaagatcggataagaaggcttatgaggaggctcagaaaagactcaaaatggctgaggaggacagaaaggcaatggttccagaactaaggaagaagtcccgcagagaatacctggccaagcgagagagagagaagctcgaggatctggaagctgagttagccgatgaggaatttttgtttggagacgtagaactgtccaggcacgaacgccaggagcttaaatacaagcgcagagtcagagacctggccagggagtatcgggccgctggtgagcaagaaaagctggaggccactaaccggtaccatatgcctaaggaaacacgagggcagcccgcacgcgccgtggatctcgtagaagaagaaagtggtgccccaggagaagagcagagaaggtgggaggaagcccggctgggcgccgcatccctgaagttcggggctagagacgccgcttcccaggaacccaagtatcagttatag

SEQ ID NO: 62445 - DNA, 888 bp, Artificial Sequence
  derived and/or modified sequence
atgagcgaggacccccggggccccaaggtgccccggaaggccgtggtggaaaagccagccagagccgccgaacgggaagcccgggctctgcttgaaaagaataggtcatatcggctgctggaagattctgaggaatctagtgaggaaacagtgtcaagggcaggcagtagcctgcaaaaaaaaagaaagaaaaggaagcatctgcgtaagaagagagaggaggaggaggaagaggaggccagcgaaaaaggcaagaagaaaaccgggggatccaagcagcagactgaaaaacctgaaagtgaggatgagtgggagagaactgagagagaaaggcttcaggatctggaggagagggacgcctttgcagaaagagttcgtcagagagataaggatagaactaggaacgtgcttgagaggtcagataagaaggcctatgaggaggcccagaaacggcttaagatggcagaagaggatcggaaggcaatggtacctgaactgaggaaaaagagcagaagagaatatctggccaagagggaacgtgaaaaactagaagatctcgaggcagagctggcagacgaggaattcctgttcggggacgttgagctatccagacatgagcgacaggagcttaaatacaagcgaagggtgagggacctcgctagggagtaccgcgccgccggcgagcaagaaaagcttgaagcaaccaaccgatatcacatgcccaaggagacacgcgggcagcctgccagagcagttgatctcgtagaggaagaatccggtgctccaggagaggagcagaggcggtgggaggaagccaggctgggtgcagcttccttgaagttcggggcccgtgacgccgcatcacaggagcccaaatatcagctgtag

SEQ ID NO: 62446 - DNA, 888 bp, Artificial Sequence
  derived and/or modified sequence
atgtctgaagatccgaggggccctaaagtgccgagaaaagcggtggtggagaaaccagcaagggccgcagaacgggaagcaagggcacttttagaaaaaaaccgttcgtacagactccttgaggacagtgaggagtcctccgaagaaacggtgtcaagggccggatcctctctgcagaaaaagaggaagaaaaggaagcatctgcggaagaagcgggaagaagaggaagaggaggaggcatctgagaaaggaaaaaaaaagacgggcggtagcaagcaacaaaccgagaaacctgaatccgaagacgaatgggagcgcactgaacgcgagcgcctgcaggacctcgaggagcgcgatgcctttgccgaacgagtgaggcagcgggacaaggacagaaccaggaatgtgctcgaaagatctgacaagaaggcgtatgaggaggcccagaagaggctgaagatggcagaggaggacaggaaagctatggttcccgagctgagaaaaaagtcgaggcgcgagtatttggccaaacgtgaacgggaaaagctggaagacctggaagcggaactcgcggacgaggagttcttgtttggcgatgtggagctctcaagacatgagagacaggagctgaagtataaacgtagggtgagggacttagcacgcgagtatagagccgcaggcgagcaggagaaattggaagctactaacagatatcacatgcctaaggagacacgaggtcagcccgctagggctgtggacctagtggaggaggaaagtggtgccccaggcgaagaacaacgcaggtgggaggaggccaggttaggtgccgctagcctgaaattcggcgctcgggacgccgcatcacaagagcctaagtatcagctgtag

SEQ ID NO: 62447 - DNA, 888 bp, Artificial Sequence
  derived and/or modified sequence
atgagtgaagaccctcgcggtccaaaggtgcctaggaaggctgtggtggagaagcctgcccgagccgctgaaagagaagccagggcacttctggaaaagaacagatcctaccgcctcctagaggacagtgaagagagttcagaggaaacagtcagccgggcagggtcatctctgcaaaagaagcggaagaagcgaaagcatctgaggaagaagcgcgaggaagaagaggaagaggaggccagcgaaaaagggaagaaaaagaccggcggatccaagcagcagaccgagaagcccgaatccgaggacgaatgggaacggaccgaacgtgaaaggctacaggacctagaggagcgagatgcttttgcagagcgcgtgcgccagcgggataaagatcgaacaaggaatgttctggagcgctctgacaaaaaggcgtacgaggaggcccaaaagagactgaagatggcggaagaagataggaaagctatggtacctgagcttcgcaagaaaagccgccgagagtacttagctaaacgagagcgcgagaagctcgaagacctggaggcagaactggcagatgaggaatttttgttcggggacgtagagcttagcaggcatgaacgtcaggagcttaagtataaacgccgagtgagggatctcgctcgcgagtatagggccgcaggagaacaggagaagctggaggccaccaatcgatatcacatgcctaaggagacgcgtggccaacccgctagggctgtcgacctagtcgaagaagagtccggagctcccggtgaagaacagaggaggtgggaagaagcccgtctgggagcagcctccctaaagtttggcgctagggatgctgccagtcaggaacctaaatatcagctgtag

SEQ ID NO: 62448 - DNA, 888 bp, Artificial Sequence
  derived and/or modified sequence
atgagcgaggacccacgaggaccaaaggttcccagaaaggcagtagtcgagaagcctgcgcgagctgccgaacgggaggccagagcactgctggaaaagaaccgatcctatagactgctggaggactctgaagagtcaagcgaggaaactgttagccgcgctggcagttccttgcagaagaagcgcaaaaagcgaaaacacttacggaaaaagcgggaggaggaagaagaggaagaagcgagcgagaaagggaagaagaaaactggcggttccaaacagcaaacagagaaacctgagtcagaagatgagtgggagcgtacggagcgagagaggctgcaggatcttgaagaacgggacgcttttgccgagcgggtaagacagcgagataaagaccggacgagaaatgtcttagaaagaagcgataaaaaggcttacgaggaggctcagaagagattgaaaatggctgaggaggacagaaaggcgatggtgccggagctccggaagaaaagccgccgagagtacctggccaagcgtgagcgggagaagcttgaggacctcgaggccgagctggccgacgaggaattcctctttggcgatgtggaattgtccagacacgaacgtcaggaactgaagtataaaagaagggtgcgggaccttgccagggagtacagggccgcaggagaacaagagaagctggaggccacaaatagatatcacatgcccaaggaaacaagaggacagccggcacgggcagtggatctcgttgaggaggaatcgggcgctccaggggaagagcaacgtcggtgggaagaggcacggctgggagcagcgagcctaaagttcggcgcacgggatgccgctagccaggaacctaagtatcagctgtag

SEQ ID NO: 62449 - DNA, 888 bp, Artificial Sequence
  derived and/or modified sequence
atgtctgaggatcccaggggaccgaaagtacccagaaaagcagtagttgaaaaacctgcccgtgctgccgaacgagaggcccgtgccctgctggagaaaaatcgctcataccgcctccttgaagattcagaggaaagttccgaggagacagtgtccagagccggtagcagtctgcaaaaaaaacgaaaaaaaagaaaacacctccgaaaaaaacgggaggaagaggaggaagaggaagcctcagaaaagggcaaaaagaaaaccggcggttccaaacagcaaactgaaaagcccgagtctgaagacgagtgggagcggacggaacgggagcgactgcaggaccttgaagagagagatgcctttgcggaacgggtgcggcagagggacaaagatcggacgcgaaacgtactggagcgctctgacaagaaggcttacgaagaagcccaaaagcgcctgaaaatggccgaggaggatcggaaggctatggtgcccgaactgcgaaagaagagtcgaagggagtacctcgcaaaacgcgagcgcgagaagctcgaagacctggaagccgaactggcggacgaggagtttctatttggagacgtggaactgagtcggcacgagcggcaagagttaaagtataaaaggcgagtgagagacttggctcgcgaatacagagccgcaggagagcaagaaaagttggaggccaccaacagataccacatgcctaaagaaacacggggtcaaccagcaagagcagtggatttagtggaagaagagagtggtgccccaggcgaggagcagcgaaggtgggaagaagccaggttgggggctgcttcattgaagttcggagcacgcgacgccgcttcccaggagccaaaataccagctatag

SEQ ID NO: 62450 - DNA, 888 bp, Artificial Sequence
  derived and/or modified sequence
atgtcagaggatcccagaggacctaaggtccctcggaaagccgtggtggaaaagccggcaagggccgctgagagagaagccagggctcttctggaaaaaaaccggagctaccgtcttcttgaagattccgaggaatccagcgaggaaactgtgtcccgagctggaagttccttgcagaaaaaacggaagaaacgaaaacaccttcgtaagaagcgagaagaggaagaggaagaggaggcatccgaaaaaggcaaaaagaaaacaggtggctcaaagcagcaaaccgagaagcctgagtctgaagatgagtgggagcggaccgagagagagagactacaggatttggaggaaagagacgccttcgccgaacgggtccgccaacgggacaaggaccgcacacggaatgttctcgaacggtccgacaaaaaagcctacgaggaagcccagaagaggctgaagatggccgaggaggataggaaggcgatggtgcctgagctgaggaagaaatcaaggcgagaatacctagctaaaagggaacgcgagaaactggaagacttggaggccgagctcgccgacgaggaattcctctttggtgacgtcgaactgagccgccacgaacgacaggaactgaagtacaagcgccgtgtacgggatttagcaagagaatacagagctgccggtgaacaggaaaaattggaagcaactaaccgatatcatatgccgaaggaaacaaggggacagcccgctagagccgtggatctggtcgaggaagagtccggcgcacctggtgaggaacagcgtcgctgggaagaggccagacttggggctgctagcctaaagtttggtgcccgagacgctgcatcacaggaacctaagtaccagctgtag

SEQ ID NO: 62451 - DNA, 888 bp, Artificial Sequence
  derived and/or modified sequence
atgagcgaagaccccagaggtcctaaagttcctaggaaagctgtcgtggaaaagccggctagagcagctgaaagggaggctcgtgctctgctcgaaaagaaccgatcgtatagactgctggaggactctgaggaatcttccgaggaaacggtgagtcgcgcagggtctagcctgcagaagaagaggaaaaagagaaagcatttacgaaagaagagagaggaagaagaggaagaggaagccagtgagaaggggaagaaaaaaaccggaggctctaaacaacagaccgagaagcctgagtctgaggatgagtgggagcgaacagagagagagagactccaagatctcgaggagcgggacgctttcgccgaacgcgtcaggcagcgagataaagatcgaacacgtaacgtcctggagcggagcgacaaaaaggcctacgaggaagcacagaagagacttaaaatggcagaggaggaccgcaaggccatggtccccgagctgcgcaaaaaatcacgcagggagtatctcgcaaaaagagagcgggaaaaactggaagatcttgaagccgaactagccgacgaggaatttcttttcggcgacgtggaattaagccgacatgagagacaggagctgaaatataaacgtagagtgcgcgatctagctcgggagtatagagctgctggcgaacaagagaagttagaagcgaccaatcgatatcacatgccaaaagaaaccagaggacagccggcaagggccgtggatctggtggaggaagaaagtggggcacccggagaggaacagcggagatgggaagaagctcgactaggggcagccagccttaaattcggggctcgggacgctgcttcccaggagccaaaatatcagctgtag

SEQ ID NO: 62452 - DNA, 888 bp, Artificial Sequence
  derived and/or modified sequence
atgtccgaagatcctcgcggacccaaagtgcctcgaaaagcagtcgtcgagaaacctgccagggcagcggagagagaggccagggctctcctggagaaaaaccgctcttataggttactggaggatagcgaggaaagcagcgaggagaccgtgtcccgagcgggatcttcactccagaagaaacgtaaaaagagaaagcatctgcggaagaagcgagaggaggaggaagaagaggaggcaagtgaaaaggggaagaagaaaaccggcggatctaaacaacagactgagaaaccagagagcgaggatgagtgggagagaacagagcgagaaaggttgcaggacctcgaagaacgagatgcctttgcagagagggtgaggcagagggacaaagatcggacgaggaatgtgctcgaacggtctgacaagaaggcttatgaagaagctcaaaagcggctcaagatggctgaggaggaccgcaaagctatggttccagagctccgcaagaagtctagacgtgaatacctggcaaaaagggagcgggagaaactggaggatctagaggccgaactggctgacgaggagtttctgttcggagatgtggaactcagtcggcatgaacgtcaagagttaaagtacaagaggagagttcgggatctggcacgtgagtaccgggctgctggagagcaagagaaactggaagcaaccaatcggtaccacatgccgaaggagacccgcggacagccggcaagagctgtggacctggtggaggaagaatcaggagcccctggagaggagcagcgcaggtgggaggaggccaggctcggtgctgccagtctgaaatttggcgcaagagatgcagcatctcaggagccaaagtaccagctttag

SEQ ID NO: 62453 - DNA, 888 bp, Artificial Sequence
  derived and/or modified sequence
atgtccgaggaccctcgagggccaaaagtgccaagaaaagcagtcgtagaaaagcccgctagagcggctgaaagggaagctagggccttattggagaagaatcgttcctaccgtcttctcgaagatagcgaagaatcttccgaggagaccgtgagtcgggctggctctagtctccaaaagaagcgtaagaagaggaagcacctgaggaaaaaacgagaagaggaagaagaagaggaggccagcgaaaaagggaaaaagaagacggggggatctaaacagcagactgagaagcctgaaagcgaggacgagtgggagaggacagagagagagcgcctgcaggacctggaagagagggacgcattcgcagagagggtcaggcaaagagataaagaccgaacgcgaaacgttctggagaggagtgacaagaaggcctacgaggaggcacagaagagactgaagatggcagaggaggaccgaaaagcgatggtcccagaacttcggaaaaagtcacggcgtgagtatttagcgaaacgggagcgggaaaaactcgaggaccttgaagccgagctggccgatgaagagttcctgtttggggacgtcgaactctccagacacgaacggcaggaactcaaatacaagaggcgcgtgagagaccttgctagagaataccgagccgcaggggaacaagagaaactcgaagctacgaatcggtaccatatgccgaaagagacccggggacagcccgctcgcgcagttgacctggttgaagaggagagtggagcgccaggtgaggaacagaggcgctgggaggaagctcgactgggtgcagctagtctcaagtttggcgctcgcgacgccgcatctcaagagcccaaataccagctctag

SEQ ID NO: 62454 - DNA, 888 bp, Artificial Sequence
  derived and/or modified sequence
atgagcgaggaccccagaggccccaaggtgcccagaaaggccgtggtggagaagcccgccagagccgccgagagagaggccagagccctgctggagaagaacagaagctacagactgctggaggacagcgaggagagcagcgaggagaccgtgagcagagccggcagcagcctgcagaagaagagaaagaagagaaagcacctgagaaagaagagagaggaggaggaggaggaggaggccagcgagaagggcaagaagaagaccggcggcagcaagcagcagaccgagaagcccgagagcgaggacgagtgggagagaaccgagagagagagactgcaggacctggaggagagagacgccttcgccgagagagtgagacagagagacaaggacagaaccagaaacgtgctggagagaagcgacaagaaggcctacgaggaggcccagaagagactgaagatggccgaggaggacagaaaggccatggtgcccgagctgagaaagaagagcagaagagagtacctggccaagagagagagagagaagctggaggacctggaggccgagctggccgacgaggagttcctgttcggcgacgtggagctgagcagacacgagagacaggagctgaagtacaagagaagagtgagagacctggccagagagtacagagccgccggcgagcaggagaagctggaggccaccaacagataccacatgcccaaggagaccagaggccagcccgccagagccgtggacctggtggaggaggagagcggcgcccccggcgaggagcagagaagatgggaggaggccagactgggcgccgccagcctgaagttcggcgccagagacgccgccagccaggagcccaagtaccagctgtag

SEQ ID NO: 62455 - DNA, 892 bp, Artificial Sequence
  derived and/or modified sequence
tttgggatgtcggaagatcctagaggtcccaaggtaccacgaaaggcagtggtagaaaagccagctcgggcagcagagcgagaggcccgggccctgctggagaagaaccgatcttataggttactggaagacagtgaagagagcagtgaggagactgtgagtagggctggaagcagcctccagaagaaacgtaaaaagcggaaacacctcaggaagaagcgtgaggaagaagaggaggaagaggcttctgagaaagggaagaagaaaacaggggggagtaaacagcagacagagaagccagagtcggaagatgagtgggaacggacagagcgtgaacgccttcaggacctggaggagcgtgatgcctttgctgagcgggttcgacagcgggacaaggatcggactcgaaatgtcctggaacggtcagacaagaaggcttatgaagaggctcagaagcgcctcaagatggccgaggaagaccggaaggccatggtccctgagctgcggaagaaatctcgccgagagtacctggctaagcgggagcgagagaagcttgaggacctggaggcggagctggctgatgaggagttcctttttggggacgtggagctgagccggcacgagcggcaggagctcaaatataagcggcgagtgcgggatctcgcccgggagtaccgggcagctggggagcaggagaagctggaggccaccaatcgctaccacatgcccaaggaaacccgaggacagccagcccgagctgtggatctagtggaggaggaatcaggagcccctggggaggagcagcggcgctgggaggaggcgcggcttggggcagcgtccctgaagtttggggcccgagatgctgcctctcaggagcccaagtatcaactgg

SEQ ID NO: 62456 - protein, 431 aa, Artificial Sequence
  derived and/or modified sequence
MGRTYIVEETVGQYLSNINLQGKAFVSGLLIGQCSSQKDYVILATRTPPKEEQSENLKHPKAKLDNLDEEWATEHACQVSRMLPGGLLVLGVFIITTLELANDFQNALRRLMFAVEKSINRKRLWNFTEEEVSERVTLHICASTKKIFCRTYDIHDPKSSARPADWKYQSGLSSSWLSLECTVHINIHIPLSATSVSYTLEKNTKNGLTRWAKEIENGVYLINGQVKDEDCDLLEGQLLNSDHRSTATVQICSGSVNLKGAVKCRAYIHSSKPKVKDAVQAVKRDILNTVADRCEMLFEDLLLNEIPEKKDSEKEFHVLPYRVFVPLPGSTVMLCDYKFDDESAEEIRDHFMEMLDHTIQIEDLEIAEETNTACMSSSMNSQASLDNTDDEQPKQPIKTTMLLKIQQNIGVIAAFTVAVLAAGISFHYFSD

SEQ ID NO: 62457 - DNA, 3823 bp, Artificial Sequence
  derived and/or modified sequence
cgtcatcaatctgcgccacctgactcccaagtccctggctttggagtgggaagtgaggtgtgggaagtaggtcgctttctgatgaattcagtggcagtgaattgagaccggagggaatctggcccctagaggctggtacttgggcccgaaacccccatctccggcggagagaccgtccgaggtaattgtctgccacgagtgcacattctgaaaacaggagattttagttcctaaaaatgggaagaacctacattgtagaagagactgttggccagtatctttcaaacataaatctccaaggaaaggcttttgtctctggccttttaataggacagtgttcgtcacaaaaggattatgtgattcttgccactagaacgccacccaaagaggagcaaagtgagaacctcaaacatcccaaagctaagttggataacttggatgaagaatgggccacagaacatgcctgccaggtatccagaatgctaccagggggacttttagttcttggagtatttattattactactttagaactggcaaatgattttcaaaatgccctgcgtagactaatgtttgctgtggaaaagtctataaatagaaagagattgtggaatttcacagaggaggaagtctcagaacgagtgacacttcacatttgtgcttctacaaaaaaaatattttgtcgaacttatgatatccatgatccaaagagttcagcaagaccagcagattggaagtatcaaagtggattatcatcctcatggctttctttagagtgtacagttcacattaatattcacatcccactttctgctacttctgtcagctatactctggagaaaaatacaaagaatggacttacacgctgggccaaggaaatagaaaatggtgtttatttgattaatggacaagttaaagatgaagattgtgacctattagaaggacagctcctgaattcagaccacagatccacagccacagtccagatatgtagcggttctgtaaaccttaagggtgctgtgaaatgcagagcttatatccacagcagtaaacccaaagttaaagatgctgtgcaggcagtaaagagggatatattgaacacagttgctgatcgttgtgaaatgctatttgaggatctgcttttgaatgaaattccagaaaaaaaagattctgaaaaagagttccacgtcctcccttatcgagtctttgttccccttcctggatccactgtaatgttgtgtgattataaatttgacgatgagtcagctgaagaaatcagggaccattttatggagatgttggatcacacaattcaaatagaagatttggaaattgcagaggaaacaaacacagcttgtatgagttcttctatgaatagtcaagcttcattggacaacacagatgatgaacaaccaaaacaaccaattaaaactacaatgttattgaaaattcagcaaaacataggtgtgattgcagcatttacagttgcagtccttgctgcgggtatctcctttcattacttcagtgattagggtgaggcacaaagagtttcttgatcatccagagaacattgacagacaattatgaataataaagatgttaacaatccatctgtatttaaaacactagcagccagatctgctgccatgatgcctatttggtgtgtttctgattaaaatgaaatcacaagctgccttgtttagcctgctttacattgtaggtggcccgcatttccagaaataacgttatgcatctagatggaagctgcatgtaacaaatcattattatctatttttaaaagcttcaaaatgatgggatatgatcatagattttagtcttactaatctgaatcacatattaatcaggacattaaaaactttaacagaggcatgatggctcacacgtataatcctaatgctttgagaggctgaggtaggagcatcacctggggctgggagggagttggagaccagcctggatgacataatgagattctgtctctactggaaaaaaaaaaaattagctggacatggtggcaatcagctctagtcccaactacttggaggctgaagcaggaagatcacgtgagcccaggagtttgaggctgcagcgagctatgatcacatcactgtactccagcctgggtgacaaaatgagacattgtctctaaaatacataagtaaatttaaaaaaaaaagaataataatttgaacagtgaatgttgatgtaacatcttaataatagagcaccagaaaaatttctaccaaatgagacaacaactttaggataagttcatcctctaggagctttctaatgtgcactcagttcctgtatactgtgtgttttgttctgatcaaggggtagggaacctttccagagaagtcccattagtaagaaatgacataaaatacgtgctttctcaggttactgtataactgttataatatatttaatatataaaattaagacttttgcttccagcaagtatgttagactagatattataaaacaactagatcctgaataaaatctgcttttaataggttcactggaagtaggagaattttcaagaaccatacttcgacatttcctctgccacaaaaaatgaacgcattttaagttaggagtcatgaatactgtattgaccatacaagtggattatggttgtctggatggcagataccaatagcaacattgtcatatgcagtttgcctcaaatcagaaacaagaagacatcggaatctgagatgctgccctagagaggacagttaaagaaggttcagtggtcctcagtttgcagtgctctagctcctggcagaagcaagagggaaacattcctaatttagttccaagattcctacagattattatcaagtagtagtattttatgactagagatcacaggcacaagttgaaacaaactaacatgacaagaaagctatagaaaaaataaacattgaactcagttcttcaaggtttcatcaccaacataaggaatgaagttggaaccacaggcagatctgaaaaagaaccaaatagagctcctaaaaatgagaaatatttattgaaataagaaaaaagccctcagacatgttgaatattttattagactcagctgaagagacaagtgaactaaactataagctggatctaaagaaattacccagtgagcagtgaggagaaacaaggagctagaaaacattggaaagttaagagagttcgagggaagaattataaagactaggagtcctagaaagagaaaatttagagaataaaggagaggcagtacttgaaagataacacaattttacaaatttgttggaaaaacatgaattcataaattcaggaagcacaatatataccaaacatatatttaaataaaatccaggcctagactcaaggtattgtaaatgacaagataccaaatacaagattttaaaagcaaccatggggagaaaaagatcagtgaaagcaagacagtcaaatacttagtaggcttcctaacagcaacaatgtacccaaaagagggtagaattctgagaaaaactattagcttagaatttgcaacaagcgaaactgaaacaaacagatgctcagatgaaaaacagatgttatcctcagcacaaattcagtaaagagactacaaaaggatgatcttcaagaagggaaatgattctaaaaggattatctgaaattgaaaaactagtaagcaaataaatgataaacataagtaaatttaaactgttgtttgtataaaacaattataatgaagtgtttataagaaattgtaaacaaatgtaaaactaaataaacattgttatgc

SEQ ID NO: 62458 - DNA, 1296 bp, Artificial Sequence
  derived and/or modified sequence
atgggcagaacctacatcgtggaggagaccgtgggccagtacctgagcaacatcaacctgcagggcaaggccttcgtgagcggcctgctgatcggccagtgcagcagccagaaggactacgtgatcctggccaccagaaccccccccaaggaggagcagagcgagaacctgaagcaccccaaggccaagctggacaacctggacgaggagtgggccaccgagcacgcctgccaggtgagcagaatgctgcccggcggcctgctggtgctgggcgtgttcatcatcaccaccctggagctggccaacgacttccagaacgccctgagaagactgatgttcgccgtggagaagagcatcaacagaaagagactgtggaacttcaccgaggaggaggtgagcgagagagtgaccctgcacatctgcgccagcaccaagaagatcttctgcagaacctacgacatccacgaccccaagagcagcgccagacccgccgactggaagtaccagagcggcctgagcagcagctggctgagcctggagtgcaccgtgcacatcaacatccacatccccctgagcgccaccagcgtgagctacaccctggagaagaacaccaagaacggcctgaccagatgggccaaggagatcgagaacggcgtgtacctgatcaacggccaggtgaaggacgaggactgcgacctgctggagggccagctgctgaacagcgaccacagaagcaccgccaccgtgcagatctgcagcggcagcgtgaacctgaagggcgccgtgaagtgcagagcctacatccacagcagcaagcccaaggtgaaggacgccgtgcaggccgtgaagagagacatcctgaacaccgtggccgacagatgcgagatgctgttcgaggacctgctgctgaacgagatccccgagaagaaggacagcgagaaggagttccacgtgctgccctacagagtgttcgtgcccctgcccggcagcaccgtgatgctgtgcgactacaagttcgacgacgagagcgccgaggagatcagagaccacttcatggagatgctggaccacaccatccagatcgaggacctggagatcgccgaggagaccaacaccgcctgcatgagcagcagcatgaacagccaggccagcctggacaacaccgacgacgagcagcccaagcagcccatcaagaccaccatgctgctgaagatccagcagaacatcggcgtgatcgccgccttcaccgtggccgtgctggccgccggcatcagcttccactacttcagcgactag

SEQ ID NO: 62459 - DNA, 1296 bp, Artificial Sequence
  derived and/or modified sequence
atgggccgcacgtatatcgtcgaagagactgttggccagtatctttcgaatatcaatctgcaaggaaaagcatttgttagtggattactcataggacagtgctcttcacaaaaagactacgtgattttggccacacgaactccccccaaagaagaacagtctgagaatctaaagcaccccaaagccaagctcgataacctggatgaggagtgggcaactgaacacgcatgtcaggtgagccgaatgttgcccggcggtctgctagttctgggcgtttttatcatcactacactggaacttgcgaatgactttcagaacgccttgcggcggctaatgttcgccgtcgagaaaagtattaatcggaaaaggttgtggaatttcactgaggaagaggtgtcagaacgggtgaccttgcacatctgtgctagcaccaagaaaatcttctgccggacctatgacattcatgatcctaagtcgagtgccaggcctgctgattggaaataccaatccgggctgagcagttcctggttatcactggaatgcaccgtccatataaacattcatataccgctctctgctacaagtgtgtcctacacactggaaaaaaacacaaagaacggccttaccaggtgggcgaaggaaatcgaaaatggagtgtatctgattaacggacaggtgaaagacgaagactgtgacttacttgaggggcaactgctcaacagcgatcacagaagtaccgccactgtccagatctgttctgggtctgtgaacttgaagggggcagtcaagtgcagagcctatattcatagcagcaagccgaaagtgaaagacgccgtacaggctgtcaaacgcgacattctgaacaccgtagctgaccgatgtgaaatgctattcgaggatctcctccttaatgagatccctgagaagaaggacagcgagaaagaattccacgtactgccctacagagtgttcgtgcctttgcccgggtctacagtgatgctctgcgactataaattcgatgacgagagtgcggaggagatcagagatcacttcatggaaatgctggaccataccattcaaatcgaagacttggaaattgctgaagagacaaacaccgcctgcatgtcaagttctatgaattcccaggctagcctcgataacacagatgatgaacagcctaagcagccaattaagaccacaatgctgctaaagatacaacaaaatatcggcgtcattgcagctttcactgtcgccgtgctcgcggctggtatctcatttcactacttttcggattag

SEQ ID NO: 62460 - DNA, 1296 bp, Artificial Sequence
  derived and/or modified sequence
atgggccgcacctacatcgtggaggagaccgtgggccagtacctgagcaacatcaacctgcagggcaaggcctttgtgtctggcctgctgattggccagtgcagcagccagaaggactatgtgatcctggccaccaggaccccacccaaggaggagcagagcgagaacctgaagcaccccaaggccaagctggacaacctggatgaggagtgggccacagaacatgcctgccaggtgtccaggatgctgcccggcggcctgctggtgctgggcgtcttcatcatcaccaccctggagctggccaatgacttccagaatgccctgcggcggctgatgtttgctgtggagaagagcatcaacaggaagaggctgtggaacttcacagaggaggaggtgtctgagcgggtgaccctgcacatctgtgccagcaccaagaagatcttctgcaggacctatgacatccatgaccccaagagcagcgcccggcctgctgactggaagtaccagagcggcctgagcagctcctggctgagcctggagtgcaccgtgcacatcaacatccacatccccctgagcgccacctctgtgtcctacaccctggagaagaacaccaagaatggcctgacccgctgggccaaggagattgaaaatggagtgtacctgatcaatggccaggtgaaggatgaggactgtgacctgctggagggccagctgctgaacagcgaccacaggagcacagccaccgtgcagatctgcagcggctctgtgaacctgaagggagctgtgaagtgccgggcctacatccacagcagcaagcccaaggtgaaggatgctgtgcaggccgtgaagagggacatcctgaacacagtggccgacagatgtgagatgctgtttgaggacctgctgctgaatgagatccctgagaagaaggacagcgagaaggagttccacgtgctgccctacagagtgtttgtgcccctgcccggcagcacagtgatgctgtgtgactacaagtttgatgatgaatctgctgaggagatccgggaccacttcatggagatgctggaccacaccatccagatcgaggacctggagattgctgaggagaccaacacagcctgcatgagcagctccatgaacagccaggccagcctggacaacacagatgatgagcagcccaagcagcccatcaagaccaccatgctgctgaagatccagcagaacattggagtgattgctgccttcaccgtggccgtgctggccgccggcatctccttccactacttcagtgactag

SEQ ID NO: 62461 - DNA, 1296 bp, Artificial Sequence
  derived and/or modified sequence
atgggccggacctacatcgtggaggagaccgtgggccagtacctgtcgaacatcaatctccagggtaaggcttttgtgtccggactgctcatcggtcagtgtagcagccagaaggactacgttattcttgccacaagaactcctcccaaggaggaacagtcggagaacctcaagcatcccaaggccaagttagataacctggacgaagagtgggcaactgaacatgcttgtcaggttagtaggatgctacctggggggctccttgtgctcggcgtgttcattattaccacattagaactggcaaacgattttcagaatgctctgaggcggctcatgtttgctgtcgagaaatcaatcaacagaaagcgtctgtggaacttcactgaagaggaggtcagcgaaagggttacgttacacatctgtgccagtacaaagaaaatattctgccgcacctatgacattcacgatccaaaatcctctgcgcggcctgccgattggaagtaccaatcgggtctctccagcagttggttatccctcgagtgcacagtccacattaatatacatatacctcttagcgctactagcgttagctatacgctggagaaaaacacaaagaatgggttgaccagatgggccaaagagattgaaaacggggtgtatctcataaacggacaggtgaaagatgaggattgcgacttgctggaaggtcagctcctcaattctgatcatcgcagcactgccacagttcagatctgctctggtagcgtgaatctgaagggtgccgtcaaatgccgcgcgtacatccattccagtaagccgaaggtaaaggatgcggtgcaggccgtcaaacgtgacatactgaataccgttgcggatcggtgcgagatgctcttcgaagacctcctcctcaacgagatccctgagaagaaggactcagaaaaagagttccatgtcctgccatacagagtctttgtaccattgcccggctcaaccgtcatgttgtgtgattacaaatttgatgatgaatctgctgaggaaattagagaccatttcatggaaatgctggaccatacgattcaaatcgaagatctggaaatagccgaagagactaacactgcatgtatgtccagctccatgaactcacaggcctccctcgataacactgatgatgagcagccgaagcagcctattaagaccactatgctcctgaagatccagcagaatatcggagtgattgccgcttttacagtggccgtgttggcagccggcatcagcttccactattttagtgactag

SEQ ID NO: 62462 - DNA, 1296 bp, Artificial Sequence
  derived and/or modified sequence
atgggcaggacctacattgtcgaggagacggtgggccagtacctgagtaacattaatctccagggaaaagcttttgttagcggtttgctgatcggacagtgcagttcacagaaagattatgtgatcctagccactcggacaccgccaaaggaggaacagtcagaaaatctgaagcatcccaaggccaagttggataacctggatgaggagtgggcaaccgaacacgcttgtcaagtttcccgtatgcttccaggtggcctgcttgtccttggcgtgtttattatcactactttggaattggccaacgactttcagaacgccttgcgtcggttgatgtttgctgtagagaagtccattaatcgtaagcgcctgtggaatttcaccgaggaggaagtaagcgagagagtcaccctgcacatttgcgctagcacaaaaaagatattctgcagaacctacgatatccatgatcctaaaagtagcgccaggccagccgattggaaataccagagtgggctctcttcttcatggctctcccttgaatgtacagtgcacatcaatattcacataccgctgtcagcgacttccgtctcgtacacattagaaaagaataccaagaacggcctgacccgatgggcaaaggagatcgagaacggtgtgtatctaattaatggccaggtaaaagacgaggactgcgaccttctcgagggccagctgttgaactcagaccacagatccaccgctacggtacagatatgttctgggagtgttaatctgaaaggggcagtgaaatgcagggcctatatccacagctcgaagcccaaagtcaaggacgccgtgcaggccgtcaagagggacattctgaataccgtggccgatcgatgtgagatgctcttcgaggacctgcttctgaatgagattccggaaaagaaggattccgaaaaggaattccacgtgctgccttacagagtgttcgttccccttccgggatctactgtcatgctttgcgattataagttcgacgatgaatccgcagaagagatccgtgatcactttatggagatgctggatcacacaatccaaattgaggacctggaaatcgctgaggagactaacactgcttgcatgtcaagctcaatgaattcacaagcatccctggacaatacggacgatgagcagcccaaacagcccatcaagacgactatgctccttaaaatccagcagaacataggtgtgatcgccgcttttacagtcgcagtgttagccgctggcatatcctttcactatttttcagactag

SEQ ID NO: 62463 - protein, 422 aa, Artificial Sequence
  derived and/or modified sequence
MGRTYIVEETVGQYLSNINLQGKAFVSGLLIGQCSSQKDYVILATRTPPKEEQSENLKHPKAKLDNLDEEWATEHACQLMFAVEKSINRKRLWNFTEEEVSERVTLHICASTKKIFCRTYDIHDPKSSARPADWKYQSGLSSSWLSLECTVHINIHIPLSATSVSYTLEKNTKNGLTRWAKEIENGVYLINGQVKDEDCDLLEGQKKSSRGNTQATSHSFDVRVLTQLLLNSDHRSTATVQICSGSVNLKGAVKCRAYIHSSKPKVKDAVQAVKRDILNTVADRCEMLFEDLLLNEIPEKKDSEKEFHVLPYRVFVPLPGSTVMLCDYKFDDESAEEIRDHFMEMLDHTIQIEDLEIAEETNTACMSSSMNSQASLDNTDDEQPKQPIKTTMLLKIQQNIGVIAAFTVAVLAAGISFHYFSD

SEQ ID NO: 62464 - DNA, 3796 bp, Artificial Sequence
  derived and/or modified sequence
cgtcatcaatctgcgccacctgactcccaagtccctggctttggagtgggaagtgaggtgtgggaagtaggtcgctttctgatgaattcagtggcagtgaattgagaccggagggaatctggcccctagaggctggtacttgggcccgaaacccccatctccggcggagagaccgtccgaggtaattgtctgccacgagtgcacattctgaaaacaggagattttagttcctaaaaatgggaagaacctacattgtagaagagactgttggccagtatctttcaaacataaatctccaaggaaaggcttttgtctctggccttttaataggacagtgttcgtcacaaaaggattatgtgattcttgccactagaacgccacccaaagaggagcaaagtgagaacctcaaacatcccaaagctaagttggataacttggatgaagaatgggccacagaacatgcctgccagctaatgtttgctgtggaaaagtctataaatagaaagagattgtggaatttcacagaggaggaagtctcagaacgagtgacacttcacatttgtgcttctacaaaaaaaatattttgtcgaacttatgatatccatgatccaaagagttcagcaagaccagcagattggaagtatcaaagtggattatcatcctcatggctttctttagagtgtacagttcacattaatattcacatcccactttctgctacttctgtcagctatactctggagaaaaatacaaagaatggacttacacgctgggccaaggaaatagaaaatggtgtttatttgattaatggacaagttaaagatgaagattgtgacctattagaaggacagaaaaaatcttctagaggaaatactcaagcaactagtcattcttttgatgtcagagtgctaacgcagttgctcctgaattcagaccacagatccacagccacagtccagatatgtagcggttctgtaaaccttaagggtgctgtgaaatgcagagcttatatccacagcagtaaacccaaagttaaagatgctgtgcaggcagtaaagagggatatattgaacacagttgctgatcgttgtgaaatgctatttgaggatctgcttttgaatgaaattccagaaaaaaaagattctgaaaaagagttccacgtcctcccttatcgagtctttgttccccttcctggatccactgtaatgttgtgtgattataaatttgacgatgagtcagctgaagaaatcagggaccattttatggagatgttggatcacacaattcaaatagaagatttggaaattgcagaggaaacaaacacagcttgtatgagttcttctatgaatagtcaagcttcattggacaacacagatgatgaacaaccaaaacaaccaattaaaactacaatgttattgaaaattcagcaaaacataggtgtgattgcagcatttacagttgcagtccttgctgcgggtatctcctttcattacttcagtgattagggtgaggcacaaagagtttcttgatcatccagagaacattgacagacaattatgaataataaagatgttaacaatccatctgtatttaaaacactagcagccagatctgctgccatgatgcctatttggtgtgtttctgattaaaatgaaatcacaagctgccttgtttagcctgctttacattgtaggtggcccgcatttccagaaataacgttatgcatctagatggaagctgcatgtaacaaatcattattatctatttttaaaagcttcaaaatgatgggatatgatcatagattttagtcttactaatctgaatcacatattaatcaggacattaaaaactttaacagaggcatgatggctcacacgtataatcctaatgctttgagaggctgaggtaggagcatcacctggggctgggagggagttggagaccagcctggatgacataatgagattctgtctctactggaaaaaaaaaaaattagctggacatggtggcaatcagctctagtcccaactacttggaggctgaagcaggaagatcacgtgagcccaggagtttgaggctgcagcgagctatgatcacatcactgtactccagcctgggtgacaaaatgagacattgtctctaaaatacataagtaaatttaaaaaaaaaagaataataatttgaacagtgaatgttgatgtaacatcttaataatagagcaccagaaaaatttctaccaaatgagacaacaactttaggataagttcatcctctaggagctttctaatgtgcactcagttcctgtatactgtgtgttttgttctgatcaaggggtagggaacctttccagagaagtcccattagtaagaaatgacataaaatacgtgctttctcaggttactgtataactgttataatatatttaatatataaaattaagacttttgcttccagcaagtatgttagactagatattataaaacaactagatcctgaataaaatctgcttttaataggttcactggaagtaggagaattttcaagaaccatacttcgacatttcctctgccacaaaaaatgaacgcattttaagttaggagtcatgaatactgtattgaccatacaagtggattatggttgtctggatggcagataccaatagcaacattgtcatatgcagtttgcctcaaatcagaaacaagaagacatcggaatctgagatgctgccctagagaggacagttaaagaaggttcagtggtcctcagtttgcagtgctctagctcctggcagaagcaagagggaaacattcctaatttagttccaagattcctacagattattatcaagtagtagtattttatgactagagatcacaggcacaagttgaaacaaactaacatgacaagaaagctatagaaaaaataaacattgaactcagttcttcaaggtttcatcaccaacataaggaatgaagttggaaccacaggcagatctgaaaaagaaccaaatagagctcctaaaaatgagaaatatttattgaaataagaaaaaagccctcagacatgttgaatattttattagactcagctgaagagacaagtgaactaaactataagctggatctaaagaaattacccagtgagcagtgaggagaaacaaggagctagaaaacattggaaagttaagagagttcgagggaagaattataaagactaggagtcctagaaagagaaaatttagagaataaaggagaggcagtacttgaaagataacacaattttacaaatttgttggaaaaacatgaattcataaattcaggaagcacaatatataccaaacatatatttaaataaaatccaggcctagactcaaggtattgtaaatgacaagataccaaatacaagattttaaaagcaaccatggggagaaaaagatcagtgaaagcaagacagtcaaatacttagtaggcttcctaacagcaacaatgtacccaaaagagggtagaattctgagaaaaactattagcttagaatttgcaacaagcgaaactgaaacaaacagatgctcagatgaaaaacagatgttatcctcagcacaaattcagtaaagagactacaaaaggatgatcttcaagaagggaaatgattctaaaaggattatctgaaattgaaaaactagtaagcaaataaatgataaacataagtaaatttaaactgttgtttgtataaaacaattataatgaagtgtttataagaaattgtaaacaaatgtaaaactaaataaacattgttatgc

SEQ ID NO: 62465 - DNA, 1269 bp, Artificial Sequence
  derived and/or modified sequence
atgggcagaacctacatcgtggaggagaccgtgggccagtacctgagcaacatcaacctgcagggcaaggccttcgtgagcggcctgctgatcggccagtgcagcagccagaaggactacgtgatcctggccaccagaaccccccccaaggaggagcagagcgagaacctgaagcaccccaaggccaagctggacaacctggacgaggagtgggccaccgagcacgcctgccagctgatgttcgccgtggagaagagcatcaacagaaagagactgtggaacttcaccgaggaggaggtgagcgagagagtgaccctgcacatctgcgccagcaccaagaagatcttctgcagaacctacgacatccacgaccccaagagcagcgccagacccgccgactggaagtaccagagcggcctgagcagcagctggctgagcctggagtgcaccgtgcacatcaacatccacatccccctgagcgccaccagcgtgagctacaccctggagaagaacaccaagaacggcctgaccagatgggccaaggagatcgagaacggcgtgtacctgatcaacggccaggtgaaggacgaggactgcgacctgctggagggccagaagaagagcagcagaggcaacacccaggccaccagccacagcttcgacgtgagagtgctgacccagctgctgctgaacagcgaccacagaagcaccgccaccgtgcagatctgcagcggcagcgtgaacctgaagggcgccgtgaagtgcagagcctacatccacagcagcaagcccaaggtgaaggacgccgtgcaggccgtgaagagagacatcctgaacaccgtggccgacagatgcgagatgctgttcgaggacctgctgctgaacgagatccccgagaagaaggacagcgagaaggagttccacgtgctgccctacagagtgttcgtgcccctgcccggcagcaccgtgatgctgtgcgactacaagttcgacgacgagagcgccgaggagatcagagaccacttcatggagatgctggaccacaccatccagatcgaggacctggagatcgccgaggagaccaacaccgcctgcatgagcagcagcatgaacagccaggccagcctggacaacaccgacgacgagcagcccaagcagcccatcaagaccaccatgctgctgaagatccagcagaacatcggcgtgatcgccgccttcaccgtggccgtgctggccgccggcatcagcttccactacttcagcgactag

SEQ ID NO: 62466 - DNA, 1269 bp, Artificial Sequence
  derived and/or modified sequence
atggggaggacatatatcgtggaggaaaccgtgggacaatatctaagcaatatcaacttacagggaaaggcctttgtttccgggttgctgattgggcaatgctctagtcagaaagactacgtcatattggcaacaaggaccccccctaaggaggagcagagcgaaaatcttaagcatcctaaagcgaagctggacaatttggacgaagagtgggccaccgaacatgcatgccagctaatgtttgccgtggaaaagagcattaatcgcaaaaggctgtggaacttcactgaggaggaagtgtccgagcgggtgaccctgcacatttgtgccagtaccaagaaaatattttgtaggacatatgatatacacgaccctaagagttccgctagacctgcagactggaagtaccagtctggcttaagtagtagctggctgagcctggagtgcacagtgcacatcaatattcatatccctctgtcggcaacaagtgtgagttatacattggaaaagaataccaaaaacggcttgacacgatgggctaaagaaatagaaaacggggtctacctcataaacggacaagtgaaagatgaggactgtgacctgctggaagggcagaagaagagcagtcgcgggaatacccaggccactagccacagcttcgacgtacgagtcttaacacaactcctgctgaactcagatcatcgcagtacagccacagtgcaaatctgcagcggaagcgtcaacctcaagggcgcagtgaagtgcagggcttacattcacagctctaaaccaaaggttaaagatgcagtgcaggctgtgaagagggacattctgaacactgttgcagatagatgcgaaatgctgtttgaagatctactccttaatgagatccccgagaagaaggattcggaaaaagagtttcacgttctgccatacagagtttttgtccctctaccaggctcaacagtaatgctgtgcgactacaagttcgatgatgaatcagcagaggagattagggaccattttatggagatgctggatcacacgatacaaatcgaggatctcgagatcgctgaagaaactaacacagcgtgtatgtcatcttccatgaactctcaagccagcctggataatactgacgatgaacagcccaagcagccaattaagacaacaatgcttttgaagatccagcagaacatcggcgtaatcgctgcgtttacagtagcagtcttggccgcgggcatctctttccactatttttctgactag

SEQ ID NO: 62467 - DNA, 1269 bp, Artificial Sequence
  derived and/or modified sequence
atgggccgcacctacatcgtggaggagaccgtgggccagtacctgagcaacatcaacctgcagggcaaggcctttgtgtctggcctgctgattggccagtgcagcagccagaaggactatgtgatcctggccaccaggaccccacccaaggaggagcagagcgagaacctgaagcaccccaaggccaagctggacaacctggatgaggagtgggccacagaacatgcctgccagctgatgtttgctgtggagaagagcatcaacaggaagaggctgtggaacttcacagaggaggaggtgtctgagcgggtgaccctgcacatctgtgccagcaccaagaagatcttctgcaggacctatgacatccatgaccccaagagcagcgcccggcctgctgactggaagtaccagagcggcctgagcagctcctggctgagcctggagtgcaccgtgcacatcaacatccacatccccctgagcgccacctctgtgtcctacaccctggagaagaacaccaagaatggcctgacccgctgggccaaggagattgaaaatggagtgtacctgatcaatggccaggtgaaggatgaggactgtgacctgctggagggccagaagaagagcagccggggcaacacccaggccaccagccacagctttgatgtgcgggtgctgacccagctgctgctgaacagcgaccacaggagcacagccaccgtgcagatctgcagcggctctgtgaacctgaagggagctgtgaagtgccgggcctacatccacagcagcaagcccaaggtgaaggatgctgtgcaggccgtgaagagggacatcctgaacacagtggccgacagatgtgagatgctgtttgaggacctgctgctgaatgagatccctgagaagaaggacagcgagaaggagttccacgtgctgccctacagagtgtttgtgcccctgcccggcagcacagtgatgctgtgtgactacaagtttgatgatgagagcgctgaggagatccgggaccacttcatggagatgctggaccacaccatccagatcgaggacctggagattgctgaggagaccaacacagcctgcatgagcagctccatgaacagccaggccagcctggacaacacagatgatgagcagcccaagcagcccatcaagaccaccatgctgctgaagatccagcagaacatcggcgtgattgctgccttcaccgtggccgtgctggccgccggcatctccttccactacttcagtgactag

SEQ ID NO: 62468 - DNA, 1269 bp, Artificial Sequence
  derived and/or modified sequence
atgggccggacctacatcgtggaggagaccgtgggccagtacctgtcaaatattaacctgcaagggaaagccttcgtctctggtcttctgataggacagtgctcatctcagaaggactacgtcatcctggctacaaggaccccacccaaagaggaacagtctgagaacctcaagcacccaaaggctaaactcgacaatctggacgaggagtgggccacagaacacgcgtgccagttgatgttcgcagttgaaaaatccattaaccgtaagagactatggaattttaccgaagaagaggtgtcagagcgagtgactctgcatatctgcgctagcacgaagaagatcttctgtagaacctacgacatacatgaccctaagagctctgctcgccccgccgattggaaatatcagtctggcctgtccagcagttggttaagtcttgaatgtacggttcacatcaatatccatataccgcttagtgcgacatctgtttcatacacccttgagaagaatacaaagaacgggctgaccaggtgggctaaggaaatagagaacggggtttatttaatcaacggacaagttaaggatgaagactgtgacctgttggaaggccagaaaaagagttcccgtggaaacacacaagccacatcccatagtttcgatgttcgagtcctgacccagctgctgctgaactccgaccacaggagcacggccaccgtgcagatctgttccggttccgtgaatctcaaaggcgcagtgaaatgtagggcatacatacacagctctaagcccaaggttaaggatgccgttcaggcggtcaagagagacatcctgaacacagttgcggatagatgcgaaatgctctttgaagacctactcctgaacgagatccctgaaaagaaggacagcgaaaaggaatttcacgtcctgccctaccgagtgtttgtgcctctgccgggatccactgtgatgctgtgcgattacaagttcgatgacgaatctgcggaagaaatcagagatcatttcatggagatgttggaccatactattcagatagaagatctcgagatcgccgaggaaaccaataccgcgtgtatgtccagtagcatgaacagtcaggccagccttgacaataccgacgatgagcaaccaaagcagcccataaagactactatgcttctcaaaattcaacagaacattggggtgatcgcagcgtttaccgtggctgttcttgcagctggcatatcattccactatttttctgactag

SEQ ID NO: 62469 - DNA, 1269 bp, Artificial Sequence
  derived and/or modified sequence
atgggtcggacatacattgtggaagagacagtaggccagtacctttctaacataaatctgcagggcaaagcctttgtgagcggcctgctgattggtcagtgtagctcccagaaggattacgtgattctagcgacaaggacacctcccaaagaggagcagtctgagaacttgaagcatcccaaagccaagctggacaatctggatgaggaatgggccactgaacacgcatgtcaactgatgttcgctgtggagaagtctataaatcggaagagactctggaacttcacagaggaggaagtgtcagaacgggtgacgcttcacatttgcgcttctaccaaaaaaatcttttgccgcacttacgacattcacgatccgaagagctcagccaggccagccgattggaaatatcagtcgggccttagctcttcttggttatccttagaatgtaccgtccacataaatattcacattcccctgtctgctacttctgtttcctacacgttggaaaagaacacaaaaaacggccttaccaggtgggcaaaggagatcgagaatggggtatacctgatcaatggacaggttaaagatgaggattgtgacctgctggaagggcagaagaagtcatctcgcggaaacacccaggctacatcacatagtttcgacgtgagggttttgacacagttgcttttaaattccgaccacagatctaccgcaactgttcagatctgttctgggtccgttaatctcaaaggtgctgttaaatgcagagcctacatacactctagtaaaccgaaggtgaaagatgccgtccaggcggttaaacgcgacattctgaatactgtagctgatagatgtgagatgctcttcgaggacctgctacttaacgagattccggagaaaaaggactctgagaaggaattccatgtcttgccatatcgagtgtttgtcccacttccaggctcaacggtcatgctgtgtgattacaagttcgacgatgagtccgcggaggagatcagagaccattttatggaaatgcttgatcacaccatccaaatcgaggatctggagattgcggaggagactaataccgcctgcatgagtagcagtatgaactcccaggccagtctggacaatactgacgacgagcagccaaagcaaccgattaaaactacaatgctcctgaagatccagcagaacatcggagttatcgccgctttcacagtcgcggtgttggccgctggcataagcttccattatttcagtgactag

SEQ ID NO: 62470 - DNA, 2649 bp, Artificial Sequence
  derived and/or modified sequence
atgacactcattggagagaacggtcatagcactgataccctgaccggttccggattccgcgtagcagacaaacccgaggagaagagcctgtgttttagattggtgtcccctgagcatcagtgtcaacaccctctgaccactagactcactcgccagctctgctgttgttccgtggggaaggcctggggcgcgaggtgccagcgctgccccactgacgggaccgcggcttttaaggaaatatgcccagcaggtaaaggctaccatattctaaccagtcatcaaacattgactattcaaggagagagcgatttcagcctgttcctccatccggatggcccccctaagcctcagcaactgcccgagtctcctagccaggcgcctcctcccgaagataccgaggaagagcgaggggtcacaacggactcccctgtgtcagaggagcggagcgtccagcagtctcaccctacggctacgactacacctgctcgtccgtaccctgaactgatttcccgaccctctccaccaacgatgagatggtttctgcccgacctgccgccatcccggtcagccgttgaaatagcccccacacaggtgactgaaactgacgaatgtaggttaaaccagaacatatgcggtcacggagagtgtgtgccaggacctcccgattactcttgtcactgcaatcctgggtataggtcgcaccctcagcaccgctattgtgtggatgtgaacgaatgtgaggcagaaccttgcggacctggccggggaatctgcatgaacactgggggatcctacaactgtcactgcaatcgggggtacagactgcatgtcggtgctggcggtcgtagctgtgtcgatctgaatgagtgcgctaaacctcacttgtgcggcgacggtggtttttgtatcaactttcctggccattataagtgcaactgctaccccgggtaccgactgaaggcctcgagaccaccagtttgtgaagacattgacgagtgccgggatccttcctcatgtcccgatggcaagtgtgaaaataaacccggcagtttcaagtgcatcgcttgtcagccaggctacagaagtcaagggggtggagcctgccgtgacgtgaacgagtgcgccgagggcagcccatgcagtccagggtggtgtgaaaacttacctgggagctttagatgcacttgcgcccaaggctacgcccctgcccctgatggtcggtcatgcttggatgtggacgagtgcgaggccggggacgtatgtgacaacggtatttgctcaaacacgccagggtccttccaatgccagtgtttatccggctatcatctgtcaagagatcgaagccattgtgaggatatcgacgagtgtgactttccagccgcatgcatcggcggcgactgcatcaataccaatgggtcctatagatgtttgtgtccacagggtcatagactggtgggaggtcggaaatgccaggacatcgatgagtgcagtcaggacccatcgctgtgcctccctcacggggcctgtaaaaatctccaagggtcttacgtctgtgtgtgcgatgagggctttacgccaacccaggatcagcatggctgtgaggaagtggaacagcctcatcataaaaaagaatgctacttgaattttgacgacaccgtattctgtgattctgtccttgcaactaatgtaactcaacaggaatgctgttgtagcctaggcgctggatggggagaccactgtgaaatttacccctgccctgtgtacagctcagccgaatttcacagcctttgccctgacggcaagggatacactcaggataataatatcgtgaattatggcatccccgcacatagagacattgacgaatgtatgctgtttggctcagagatttgcaaggaggggaagtgtgttaatactcagcctggatacgagtgctactgcaagcaagggttctattatgacgggaacctgctggagtgcgtggacgtggacgagtgtttagacgaatctaattgccggaacggtgtctgcgaaaacactcgaggaggatatcgctgcgcatgtacccctccggccgaatactcaccggcccagcgacaatgtctgtctccggaggagatggagcgggctcccgagcggagagacgtttgctggtctcaaaggggggaagacggtatgtgtgcaggacccctggcagggcctgcactgacatttgacgattgttgttgtagacaaggtcgagggtggggggcgcagtgccgaccttgcccgcctcggggcgccggctcgcactgtccgacaagccaaagtgagagtaactccttctgggacacatcgcccctgttgctgggtaagccccctcgcgatgaagattcatcggaggaagattccgacgagtgtagatgcgtgagtggccggtgtgtgcctaggcctggcggcgccgtgtgtgaatgccctggtgggtttcagctggatgcatcccgggcgcgttgtgttgacattgatgagtgtagagagctgaatcagcgcggtctgctgtgcaagtccgagagatgtgttaatacaagcgggtcattcagatgcgtgtgcaaagcagggttcgctcgctccaggccacacggagcatgtgtgccccagcgccgccggtag

SEQ ID NO: 62471 - DNA, 2750 bp, Artificial Sequence
  derived and/or modified sequence
ctttgcgccggtgatctgcaagcggacctgtctcaagggccagtgtcgggacagttgtcagcagggctccaacatgacgctcatcggagagaacggccacagcacagacacgctcacgggctccggcttccgcgtggcagacaaaccggaggagaagagcctgtgtttccgcctggtgagccctgagcaccagtgccagcacccactgaccacccgcctgacccgccagctctgctgctgcagtgtcggcaaggcctggggcgcgcggtgtcagcgctgcccaacagatggcaccgctgcgttcaaggagatctgcccagctgggaagggataccacattctcacctcccaccagacgctcaccattcagggcgagagtgacttttcccttttcctgcaccctgacgggccacccaagccccagcagcttccggagagccctagccaggctccaccacctgaggacacagaggaagagagaggggtgaccacggactcaccggtgagtgaggagaggtcagtgcagcagagccacccaactgccaccacgactcctgcccggccctaccccgagctgatctcccgtccctcgcccccgaccatgcgctggttcctgccggacttgcctccttcccgcagcgccgtagagatcgctcccactcaggtcacagagactgatgagtgccgactgaaccagaacatctgtggccacggagagtgcgtgccgggcccccctgactactcctgccactgcaaccccggctaccggtcacatccccagcaccgctactgcgtggatgtgaacgagtgcgaggcagagccctgtggcccggggaggggcatctgcatgaacaccggcggctcctacaattgccactgcaaccgcggctaccgcctgcacgtgggcgccggggggcgctcgtgcgtggacctgaacgaatgcgccaagccccacctgtgcggcgacggcggcttctgcatcaactttcccggtcactacaagtgcaactgctaccccggctaccggctcaaagcctcccggcctcctgtgtgcgaagacatcgacgagtgccgggacccaagctcttgcccggatggcaaatgcgagaacaagcccgggagcttcaagtgcatcgcctgtcagcctggctaccgcagccaggggggcggggcctgtcgcgacgtgaacgagtgcgccgagggcagcccctgctcgcctggctggtgcgagaacctcccgggctccttccgctgcacctgtgcccagggctacgcgcccgcgcccgacggccgcagttgcttggatgtggacgagtgtgaggctggggacgtgtgtgacaatggcatctgcagcaacacgccaggatctttccagtgtcagtgcctctctggctaccatctgtccagggaccggagccactgcgaggacattgatgagtgtgacttccctgcagcctgcattgggggtgactgcatcaataccaatggctcctacagatgtctttgcccccaggggcatcggctggtgggtggcaggaaatgccaagacatagatgagtgcagccaggacccgagcctgtgccttccccatggggcctgcaagaaccttcagggctcctatgtgtgtgtctgcgatgagggcttcactcccacccaggaccagcacggttgtgaggaggtggagcagccccaccacaagaaggagtgctacctgaacttcgatgacacagtgttctgcgacagcgtattggccaccaacgtgacccagcaggagtgctgctgctctctgggggccggctggggcgaccactgcgaaatctacccctgcccagtctacagctcagccgagttccacagcctctgcccagacggaaagggctacacccaggacaacaacatcgtcaactacggcatcccagcccaccgtgacatcgacgagtgcatgttgttcgggtcggagatttgcaaggagggcaagtgcgtgaacacgcagcctggctacgagtgctactgcaagcagggcttctactacgacgggaacctgctggaatgcgtggacgtggacgagtgcctggacgagtccaactgccggaacggagtgtgtgagaacacgcgcggcggctaccgctgtgcctgcacgccccctgccgagtacagtcccgcgcagcgccagtgcctgagcccggaagagatggagcgtgccccggagcggcgcgacgtgtgctggagccagcgcggagaggacggcatgtgcgctggccccctggccgggcctgccctcaccttcgacgactgctgctgccgccagggccgcggctggggcgcccaatgccgaccgtgcccgccgcgcggcgcggggtcccattgcccgacatcgcagagcgagagcaattccttctgggacacaagccccctgctgttggggaagcccccaagagatgaggacagttcagaggaggattcagacgagtgtcgctgcgtgagtggccgctgcgtgccgcggccgggcggcgccgtgtgcgagtgtcccggcggcttccagctcgacgcctcccgcgcccgctgcgtggatatcgacgagtgccgagagctgaaccagcgcgggctgctgtgcaagagcgagcgctgcgtgaacaccagcggctccttccgctgcgtctgcaaagccggcttcgcgcgcagccgcccgcacggggcctgcgttccccagcgccgccgctgacgccgccgacgccgccctcggcccagac

SEQ ID NO: 62472 - DNA, 2649 bp, Artificial Sequence
  derived and/or modified sequence
atgaccctcatcggggagaatggccacagcacagacaccctgactggaagtggcttccgggtggccgacaagccagaggagaagagcctgtgcttccggctggtgtccccagagcaccagtgccagcaccccctgaccacccggctgacccggcagctgtgctgctgcagcgtgggcaaggcctggggcgcccgctgccagcgctgccccacagatggaacagctgccttcaaggagatctgcccagctgggaagggctaccacatcctgaccagccaccagaccctgaccatccagggcgagagtgacttcagcctcttcctgcacccagatggcccccccaagccccagcagctgcctgagagccccagccaggcccctcctcctgaggacacagaggaggagcggggcgtgaccacagacagccctgtgtctgaggagaggtctgtgcagcagagccaccccacagccaccaccaccccagcccggccctacccagagctgatcagccggcccagcccccccaccatgcgctggttcctgcctgacctgccccccagccgctctgctgtggagatcgcccccacccaggtgacagaaacagatgaatgtcggctgaaccagaacatctgtggccatggagaatgtgtgcccggccccccagactacagctgccactgcaaccctggctaccgcagccacccccagcaccgctactgtgtggatgtgaatgaatgtgaggccgagccctgtggccctggccggggcatctgcatgaacacaggaggcagctacaactgccactgcaacagaggctaccgcctgcacgtgggcgccggcggccgcagctgtgtggacctgaatgaatgtgccaagccccacctgtgtggagatggcggcttctgcatcaacttccctggccactacaagtgcaactgctacccaggctaccgcctgaaggccagccggccccctgtgtgtgaggacattgatgagtgccgggaccccagcagctgcccagatggaaaatgtgagaacaagccaggcagcttcaagtgcatcgcctgccagcccggctaccgcagccagggcggcggggcctgcagagatgtgaatgaatgtgccgagggcagcccctgcagccctggctggtgtgagaacctgcccggcagcttccgctgcacctgtgcccagggctacgccccagccccagatggccgcagctgcctggatgtggatgaatgtgaggccggagatgtgtgtgacaatggcatctgcagcaacaccccaggcagcttccagtgccagtgcctgagcggctaccacctgagccgggacaggagccactgtgaagatattgatgaatgtgacttccctgctgcctgcattggaggagactgcatcaacaccaacggcagctaccgctgcctgtgcccccagggccaccggctggtgggcggcaggaagtgccaggacattgatgaatgttcccaggaccccagcctgtgcctgccccacggggcctgcaagaacctgcagggcagctatgtgtgtgtgtgtgatgagggcttcacccccacccaggaccagcacggctgtgaggaggtggagcagccccaccacaagaaggagtgctacctgaactttgatgacaccgtcttctgtgacagcgtgctggccaccaacgtgacccagcaggagtgctgctgcagcctgggcgccggctggggagaccactgtgagatctacccctgccctgtgtacagcagcgctgagttccacagcctgtgcccagatggcaagggctacacccaggacaacaacatcgtgaactacggcatcccagcccaccgggacattgatgagtgcatgctgtttggcagcgagatctgcaaggagggcaaatgtgtgaacacccagcccggctatgagtgctactgcaagcagggcttctactatgatggcaacctgctggagtgtgtggatgtggatgaatgtctggatgagagcaactgcagaaatggagtgtgtgagaacacccggggcggctaccgctgtgcctgcaccccacctgctgagtacagccctgcccagaggcagtgcctgagccctgaggagatggagcgggcccctgagaggagagatgtgtgctggagccagagaggagaagatggcatgtgtgccggccccctggccggccctgccctgacctttgatgactgctgctgccggcagggccggggctggggcgcccagtgccggccctgccccccaagaggagctggcagccactgccccaccagccagagcgagagcaacagcttctgggacaccagccccctgctgctgggcaagcccccaagagatgaggacagcagtgaagaagattctgatgaatgtcgctgtgtgtctggccgctgtgtgcccaggcctggaggagctgtgtgtgaatgtcctgggggcttccagctggatgccagccgggcccgctgtgtggacattgatgagtgccgggagctgaaccagaggggcctgctgtgcaagtctgagcgctgtgtgaacaccagcggcagcttccgctgtgtgtgcaaggccggctttgcccggagccggccccatggagcctgtgtgccccagaggagaagatag

SEQ ID NO: 62473 - DNA, 2649 bp, Artificial Sequence
  derived and/or modified sequence
atgaccctgatcggcgagaacggccacagcaccgacaccctgaccgggagcggcttccgggtggctgataagccagaagagaagagtctgtgtttccgactcgtgtcccccgagcatcagtgccagcaccctcttactacgcgacttacgcgccagctgtgttgctgcagcgttggtaaagcctggggtgccagatgccaaagatgtcctactgatgggacagctgcctttaaggaaatctgtcccgccggtaaaggctatcacatcctcacaagccaccagacattgactattcagggggagtcagatttctcattatttttgcaccctgatggacctcccaagccccagcagttgcccgagagcccctctcaggctccacctcccgaggacacagaagaggagagaggcgtgacaacagattctccagttagtgaagagcggagtgttcagcagagccatccgacagcgactacaaccccagctagaccttatcctgagctgatctcgagaccaagtccccccactatgcgatggttcctccctgatctgccccccagcagatcagcggtcgagatcgcaccaacccaggtcactgagactgacgaatgccgtctgaaccagaacatatgcggacacggggagtgcgttcccggtccccccgattactcttgccattgcaaccccgggtaccgctcccacccacaacatcgttattgcgtagacgtcaacgagtgtgaggctgaaccctgcggccctggtcgtgggatctgcatgaataccggcgggtcatacaattgccactgcaaccggggctacagactgcatgttggtgccggaggccgttcctgtgttgacctgaatgagtgtgccaagccccatctgtgcggagatggcgggttttgtattaatttccctggccactacaagtgtaactgttaccctgggtataggctaaaggcttcaaggcccccagtgtgtgaagacattgatgaatgtcgcgacccttcctcctgtcctgatggaaagtgtgagaacaagcctggtagcttcaaatgcattgcctgccagccgggctaccgcagccagggcggtggtgcatgtagagacgtaaacgagtgtgcagagggcagcccatgcagccccggatggtgcgagaatctccctggttccttcagatgtacatgtgcacaaggatacgctcccgccccagatgggaggtcatgtctggacgtggatgagtgtgaggccggagacgtgtgcgacaacggaatttgctccaacacacctggctcattccaatgccagtgtctatcaggctatcacctatcacgggacaggtcccattgcgaagatattgacgagtgtgatttcccagccgcttgcatcggcggggactgcataaacactaatggctcatatcgttgcctgtgtccccaagggcatcgactcgtgggtggcaggaaatgtcaagacatcgacgagtgttctcaggatccctccctgtgtctaccacatggtgcctgtaagaaccttcagggctcatacgtgtgcgtgtgcgacgaagggttcactcctacacaggatcagcacggctgcgaggaggtagagcagccccatcataaaaaggagtgttacctcaacttcgatgataccgtgttttgcgacagtgtgttggctaccaacgtcacgcaacaggagtgctgttgttctctgggagcgggttggggagaccactgcgaaatctacccttgtcccgtctattcttccgcagagtttcactctttgtgtccagacggcaaaggctacacccaagataacaacatcgtcaattacgggatccctgcacaccgtgatatcgacgaatgtatgctctttgggtccgagatctgtaaagagggcaagtgcgttaatacacaacccgggtacgaatgttactgtaagcagggcttctattacgatggaaatctgctagagtgcgtggatgtggacgaatgcttagatgagagtaactgtaggaatggcgtttgcgagaatacacggggaggctaccgctgtgcctgtactccacccgccgagtattccccagcacagaggcagtgtctctcacctgaggaaatggagcgagctcctgaacggagagacgtgtgttggagccagaggggggaagacggcatgtgtgcaggacctctcgctggcccagccctcacctttgacgactgctgttgcaggcagggacgcggttggggagctcaatgtcggccgtgtccccctcgtggcgccggctcccactgtcctacttcacagtccgaatcaaactctttttgggacacctctccactgctgcttggaaaacccccccgggacgaggactcttctgaagaagactcagatgaatgccgatgtgtgagtggaaggtgtgtgccgaggccaggtggagccgtgtgtgagtgtccaggggggtttcagctcgacgcctcgagagcccgctgtgtggacatagatgaatgccgcgagctcaaccagcgcggcttgttgtgtaaatccgagaggtgtgttaataccagtggttcctttcggtgcgtgtgcaaagctgggttcgccagatcccgcccccacggggcctgtgtgccacagcgacgccgctag

SEQ ID NO: 62474 - DNA, 2649 bp, Artificial Sequence
  derived and/or modified sequence
atgaccctgattggcgagaacggacactctaccgacaccctgacaggatccggattccgggtcgcggataaacccgaggagaaatctctgtgctttagactcgtcagtccggaacatcagtgtcagcaccctctcacgaccagactgacacgccagctatgctgctgctcagttgggaaggcctggggtgcacggtgtcagcgctgtccaacagacggtaccgccgctttcaaggaaatatgtcccgctgggaagggttatcatattctcaccagccaccaaactcttaccattcagggtgaatcagattttagcctcttcttgcatcctgacggccctcccaagcctcaacagctcccagagtccccatcccaggcccctcctccagaagacactgaggaagagcggggtgtgaccactgattcccctgtgagcgaggaacggtctgtgcagcagtcccaccctacggcaaccacgactcccgcacggccttatcctgagctgatctccagaccatctcccccaactatgcggtggttcttaccagacctgccaccctccaggtccgccgtcgaaatcgccccaacacaggtcactgagaccgatgagtgccggctcaatcagaacatttgcggccacggagaatgtgttcctgggcctcccgactacagctgccattgtaacccaggatatcggtctcacccccagcacagatattgtgtggatgtgaatgagtgcgaggcagaaccctgtggccctgggagaggtatctgtatgaatactgggggtagctacaattgtcattgcaatcgaggttaccgcctgcacgtcggcgcaggtggcagatcatgcgttgacctgaacgagtgcgcgaaaccccatctgtgcggagatgggggtttttgcattaactttccgggacattataaatgcaattgctatcctgggtatcgactaaaggcaagccgccctcccgtatgtgaagacatcgacgaatgccgtgatcctagttcatgccccgacggcaagtgtgagaacaagcctggaagcttcaaatgcattgcctgccagccgggttatcgctcccaggggggtggggcttgccgggacgtcaatgagtgtgccgagggctccccttgctctcccggatggtgcgaaaacctcccaggctcatttcgttgtacctgtgcccaaggatatgcccctgccccagacggcagatcctgccttgatgtggacgagtgtgaagctggagacgtatgcgacaacgggatttgcagtaacaccccaggcagcttccaatgccagtgcctttctggctatcatctttccagggatcgctcacattgcgaagatatcgatgagtgcgacttcccggcagcttgcatcgggggtgactgcatcaacaccaacggatcctatcggtgcttgtgccctcaaggccataggttggttggaggcagaaaatgtcaggatattgatgaatgcagccaggacccctctctgtgtctgcctcatggagcttgtaaaaatttgcagggctcttacgtgtgcgtgtgtgacgagggatttacacctacccaggaccagcatggctgtgaagaggtggagcaaccccaccataaaaaagaatgttacctcaatttcgacgacacagtcttctgtgattctgtgctggctacaaatgtcacccagcaggagtgttgctgctctctcggcgctggatggggagaccactgcgagatatacccttgcccagtatactctagtgctgagtttcatagcctgtgccctgacggcaaaggctacacccaggacaataacatagtgaattacggtatcccggctcaccgggacatcgatgaatgcatgcttttcggctccgagatttgcaaggagggtaaatgcgtgaacacgcagcctggctatgaatgctactgcaaacaaggattctactacgatggcaatcttcttgagtgtgtcgacgtggatgagtgtcttgacgagagcaactgtaggaatggcgtctgtgagaacactcgcggtggttaccgctgcgcctgcactccacctgccgagtatagcccagcgcagagacagtgtctctctcctgaggagatggagcgtgcgcctgaaaggcgcgacgtgtgctggtctcagagaggcgaagacggcatgtgtgccggtcccctagcaggaccagcccttacttttgacgactgttgctgcagacaaggcagaggatggggcgcacagtgcagaccctgcccccctcgtggtgcgggttctcattgtcctaccagccaaagtgaaagcaatagtttttgggacactagccctctcctgctgggaaagcctcccagagacgaggatagttccgaagaggatagcgacgaatgccggtgtgtctcaggaagatgtgtgcccaggcccggtggcgctgtgtgcgaatgcccaggaggtttccagctggatgcttccagagctcggtgcgttgatattgatgagtgcagagagttgaaccagagggggcttctttgcaagagcgaaaggtgtgtgaacacttcgggttcgttcagatgtgtatgcaaagctggattcgcgaggagtcgacctcacggagcatgcgtcccccaaagacgaagatag

SEQ ID NO: 62475 - DNA, 2649 bp, Artificial Sequence
  derived and/or modified sequence
atgaccctcattggtgagaatgggcacagcactgacacgctcaccggaagcggtttccgcgtggcagacaaacctgaggaaaagagcctgtgcttcagactcgtgtctcccgaacatcagtgtcagcatcccttaactacaagactgacgcgacaactctgctgctgttctgtggggaaagcatggggagcgaggtgccagcggtgtcctaccgacggcacagccgcattcaaggagatctgtcctgctggaaaaggctaccacattcttacctcgcaccagaccctcaccattcagggggagagtgactttagcctctttttgcatcccgacggaccgcctaagccacaacaactgccagaatcacccagccaggctcctccgccggaagacaccgaggaggagcgaggagtcacaacggatagccctgtatctgaggaaaggtccgtccagcaaagccacccaacagccactacgaccccagccagaccttacccagaactgatcagtaggcctagcccacccactatgcgatggttcctccctgatctccccccctccagatccgctgtggagatcgctcccactcaggtgactgaaaccgacgagtgccgtcttaatcagaacatctgtggccatggcgagtgcgttcccggccctcccgactacagctgccactgcaatcctggataccggtcacacccccagcaccgctattgtgtagatgtcaacgagtgcgaagctgagccctgcggtcccggcaggggcatttgtatgaataccggcgggtcctacaactgtcattgcaaccgcgggtaccgactgcacgttggtgctggcggacggtcttgtgtggatctgaatgaatgtgccaaacctcacctctgcggagacggtggattttgcattaatttccctggccactacaaatgcaactgttaccccggctatcggctgaaagcaagccgacctccggtatgtgaagacatcgatgagtgtagagacccaagcagctgccccgatggaaaatgcgaaaacaagcctgggagttttaaatgcatcgcctgtcagcccggttaccgaagccagggagggggcgcttgccgcgacgtgaatgagtgcgccgagggatcaccttgctcccccggttggtgcgagaacctacctgggtccttcaggtgcacctgtgcccagggctatgcgcctgcacccgacgggaggagctgcctcgatgttgacgaatgcgaagccggagatgtttgcgacaacgggatatgctccaatacaccgggttcctttcaatgccagtgtttatctggatatcatttatcccgggaccgatcccactgcgaggacatcgacgagtgtgatttccccgcggcctgtattggcggtgactgcattaataccaatggatcctatcgctgtttgtgccctcaaggacaccggttagtgggaggtcgcaaatgccaggatatagatgaatgctcacaggatccatccctatgcctgccacatggtgcttgtaagaatctacaggggagctatgtttgcgtctgcgatgaaggcttcaccccaacacaggatcaacacgggtgcgaagaagtggaacagcctcatcataaaaaggagtgctacctaaatttcgacgataccgttttctgtgactcggtactggctacaaatgtgactcaacaagagtgctgttgtagtctgggcgctgggtggggagaccactgcgaaatctatccctgtcctgtttattcatccgccgaattccacagcctctgtcccgatgggaagggctacacccaggataacaatatcgtaaactacggcatcccagcccacagggatatcgacgaatgcatgctcttcggatctgagatatgcaaagagggaaagtgcgtgaatacccagcctggctacgaatgttattgcaaacaggggttttactatgatgggaacttgctcgaatgtgtagacgtggatgaatgtctggatgaaagtaactgtagaaacggagtgtgcgagaatacacggggaggctacaggtgtgcttgcaccccgccagccgaatatagtccagcacagaggcaatgtctgtcacccgaagagatggagagagcaccagagagacgggacgtgtgctggtcacagcgcggagaagacgggatgtgcgccggacctctggccggtcctgccctcacatttgatgactgctgttgtcgccagggccgtggatggggagcgcagtgccggccttgccctccgaggggcgccgggagccattgcccaacgtcccaaagcgagtctaactctttctgggacacatcccccctgctgctcggcaaacccccccgggacgaggactccagtgaggaagactctgacgagtgtagatgcgtgtccggcagatgcgtccccagaccgggcggtgcggtatgcgaatgcccaggaggattccagttagacgcttcacgagcccgttgtgtggatatcgatgagtgcagggagctgaaccagagaggattgctgtgtaaatcggagaggtgtgtaaatacttctggaagcttcagatgcgtgtgtaaagctggatttgcacgatctcggccacacggtgcttgtgtaccacaaagaagacgttag

SEQ ID NO: 62476 - DNA, 2649 bp, Artificial Sequence
  derived and/or modified sequence
atgaccctcataggagagaatggacactctactgacactctgacagggagcggcttccgggttgccgacaagccggaggaaaaatcactctgtttcagactcgtgtcccccgagcaccaatgccagcacccactaactaccagattgaccagacagttgtgttgctgctcagttggcaaagcatggggcgcaagatgccaaaggtgtcctactgatggaaccgctgcttttaaagagatatgtcctgcaggaaaaggctaccacatcctcacctcccaccaaacgctcactattcagggggagtcagatttttctttgtttctccaccctgatggccctccaaaaccccagcagctgcctgagtctccgtctcaagctccccctcccgaagacacagaggaggaaagaggagtgactactgattcacccgtatccgaagaacgcagcgttcagcagtctcatcccaccgccacaactactcccgcacgcccatacccagagctcatctccaggccctccccccctactatgaggtggtttttaccagacctgccaccctcaagaagcgcagttgaaattgcacctacgcaggtaacagagacggacgagtgtcgacttaatcagaacatctgcggccatggagagtgtgttcccggacccccagattacagctgtcattgtaacccaggttatcgttcacaccctcagcatcgatattgtgtagacgtgaatgaatgtgaagcagaaccttgtggccccggaagaggaatctgtatgaacaccggaggctcctataattgtcattgtaaccgcggctacaggttacacgtaggtgccggcggacgctcctgtgtagaccttaatgagtgtgccaagcctcacctgtgtggcgacggagggttctgtatcaatttccccggccattacaagtgtaactgctaccccgggtatagattgaaggcctcacgtccacccgtctgcgaagatatagatgagtgtcgcgacccatccagctgccccgatggcaagtgtgagaataaacccggctcctttaaatgcatcgcgtgccaacccgggtatcgctcccaaggggggggggcatgtcgcgacgtgaacgaatgcgcagaaggatctccatgtagccccggctggtgtgaaaaccttccaggttcctttcgttgtacctgtgcacaaggatatgccccagccccagacgggagatcatgcttggatgtggacgaatgtgaggcaggcgacgtatgtgataacgggatttgttcaaatactccagggagctttcaatgtcagtgcctttctgggtaccacttgtcccgcgatcggagccactgtgaagatatcgacgaatgcgactttcccgcagcatgcatcggaggagattgtattaacactaacgggagttacagatgtttatgccctcagggacacagactggtgggtgggcgtaaatgccaggacatcgatgagtgtagccaggatccatctctctgtttacctcacggggcatgcaagaatcttcaaggatcttatgtttgtgtttgcgatgagggtttcacaccaacacaggaccaacacgggtgcgaggaggttgaacagccacaccataaaaaagaatgctatctgaacttcgacgacactgtattctgtgactctgtgctcgccactaacgttactcagcaagaatgttgttgttccctcggagccggatggggcgaccactgtgaaatctacccgtgtccggtatactcttctgccgagttccattccttgtgtcccgatggcaagggctacacccaggataacaatatcgtaaactacggcatcccagcccacagggatatcgacgaatgcatgctcttcggatctgagatatgcaaagagggaaagtgcgtgaatacccagcctggctacgaatgttattgcaaacaggggttttactatgatgggaacttgctcgaatgtgtagacgtggatgaatgtctggatgaaagtaactgtagaaacggagtgtgcgagaatacacggggaggctacaggtgtgcttgcaccccgccagccgaatatagtccagcacagaggcaatgcctgagccctgaggagatggaacgagcacctgagagacgtgatgtgtgctggtcacagagaggagaggatggcatgtgcgccgggcccctcgctggcccggccctgacatttgacgactgctgctgccgacagggtaggggatggggtgctcagtgccgcccttgcccaccccggggtgcgggctctcattgtcctacctcccagagtgaaagtaactctttctgggacacgtcgccactactgttggggaagccaccgcgtgacgaggatagctcagaagaagacagcgacgagtgcagatgcgtgtccggcagatgcgtccccagaccgggcggtgcggtatgcgaatgcccaggaggattccagttagacgcttcacgagcccgttgtgtggatatcgatgagtgcagggagctgaaccagagaggattgctgtgtaaatcggagaggtgtgtaaatacttctggaagcttcagatgcgtgtgtaaagctggatttgcacgatctcggccacacggtgcttgtgtaccacaaagaagacgttag

SEQ ID NO: 62477 - DNA, 2649 bp, Artificial Sequence
  derived and/or modified sequence
atgaccctgatcggcgagaacggccacagcaccgacaccctgaccggcagcggcttcagagtggccgacaagcccgaggagaagagcctgtgcttcagactggtgagccccgagcaccagtgccagcaccccctgaccaccagactgaccagacagctgtgctgctgcagcgtgggcaaggcctggggcgccagatgccagagatgccccaccgacggcaccgccgccttcaaggagatctgccccgccggcaagggctaccacatcctgaccagccaccagaccctgaccatccagggcgagagcgacttcagcctgttcctgcaccccgacggcccccccaagccccagcagctgcccgagagccccagccaggcccccccccccgaggacaccgaggaggagagaggcgtgaccaccgacagccccgtgagcgaggagagaagcgtgcagcagagccaccccaccgccaccaccacccccgccagaccctaccccgagctgatcagcagacccagcccccccaccatgagatggttcctgcccgacctgccccccagcagaagcgccgtggagatcgcccccacccaggtgaccgagaccgacgagtgcagactgaaccagaacatctgcggccacggcgagtgcgtgcccggcccccccgactacagctgccactgcaaccccggctacagaagccacccccagcacagatactgcgtggacgtgaacgagtgcgaggccgagccctgcggccccggcagaggcatctgcatgaacaccggcggcagctacaactgccactgcaacagaggctacagactgcacgtgggcgccggcggcagaagctgcgtggacctgaacgagtgcgccaagccccacctgtgcggcgacggcggcttctgcatcaacttccccggccactacaagtgcaactgctaccccggctacagactgaaggccagcagaccccccgtgtgcgaggacatcgacgagtgcagagaccccagcagctgccccgacggcaagtgcgagaacaagcccggcagcttcaagtgcatcgcctgccagcccggctacagaagccagggcggcggcgcctgcagagacgtgaacgagtgcgccgagggcagcccctgcagccccggctggtgcgagaacctgcccggcagcttcagatgcacctgcgcccagggctacgcccccgcccccgacggcagaagctgcctggacgtggacgagtgcgaggccggcgacgtgtgcgacaacggcatctgcagcaacacccccggcagcttccagtgccagtgcctgagcggctaccacctgagcagagacagaagccactgcgaggacatcgacgagtgcgacttccccgccgcctgcatcggcggcgactgcatcaacaccaacggcagctacagatgcctgtgcccccagggccacagactggtgggcggcagaaagtgccaggacatcgacgagtgcagccaggaccccagcctgtgcctgccccacggcgcctgcaagaacctgcagggcagctacgtgtgcgtgtgcgacgagggcttcacccccacccaggaccagcacggctgcgaggaggtggagcagccccaccacaagaaggagtgctacctgaacttcgacgacaccgtgttctgcgacagcgtgctggccaccaacgtgacccagcaggagtgctgctgcagcctgggcgccggctggggcgaccactgcgagatctacccctgccccgtgtacagcagcgccgagttccacagcctgtgccccgacggcaagggctacacccaggacaacaacatcgtgaactacggcatccccgcccacagagacatcgacgagtgcatgctgttcggcagcgagatctgcaaggagggcaagtgcgtgaacacccagcccggctacgagtgctactgcaagcagggcttctactacgacggcaacctgctggagtgcgtggacgtggacgagtgcctggacgagagcaactgcagaaacggcgtgtgcgagaacaccagaggcggctacagatgcgcctgcaccccccccgccgagtacagccccgcccagagacagtgcctgagccccgaggagatggagagagcccccgagagaagagacgtgtgctggagccagagaggcgaggacggcatgtgcgccggccccctggccggccccgccctgaccttcgacgactgctgctgcagacagggcagaggctggggcgcccagtgcagaccctgcccccccagaggcgccggcagccactgccccaccagccagagcgagagcaacagcttctgggacaccagccccctgctgctgggcaagccccccagagacgaggacagcagcgaggaggacagcgacgagtgcagatgcgtgagcggcagatgcgtgcccagacccggcggcgccgtgtgcgagtgccccggcggcttccagctggacgccagcagagccagatgcgtggacatcgacgagtgcagagagctgaaccagagaggcctgctgtgcaagagcgagagatgcgtgaacaccagcggcagcttcagatgcgtgtgcaaggccggcttcgccagaagcagaccccacggcgcctgcgtgccccagagaagaagatag

SEQ ID NO: 62478 - protein, 280 aa, Artificial Sequence
  derived and/or modified sequence
MAMQMQLEANADTSVEEESFGPQPISRLEQCGINANDVKKLEEAGFHTVEAVAYAPKKELINIKGISEAKADKILAEAAKLVPMGFTTATEFHQRRSEIIQITTGSKELDKLLQGGIETGSITEMFGEFRTGKTQICHTLAVTCQLPIDRGGGEGKAMYIDTEGTFRPERLLAVAERYGLSGSDVLDNVAYARAFNTDHQTQLLYQASAMMVESRYALLIVDSATALYRTDYSGRGELSARQMHLARFLRMLLRLADEIVSEERKRGNQNLQNLRLSLSS

SEQ ID NO: 62479 - protein, 151 aa, Artificial Sequence
  derived and/or modified sequence
MAMQMQLEANADTSVEEESFGPQPISRLEQCGINANDVKKLEEAGFHTVEAVAYAPKKELINIKGISEAKADKILAEAAKLVPMGFTTATEFHQRRSEIIQITTGSKELDKLLQGGIETGSITEMFGEFRTGKTQICHTLAVTCQVWSLWQ

SEQ ID NO: 62480 - protein, 75 aa, Artificial Sequence
  derived and/or modified sequence
MAMQMQLEANADTSVEEESFGPQPISRLEQCGINANDVKKLEEAGFHTVEAVAYAPKKELINIKGISEAKADKIL

SEQ ID NO: 62481 - protein, 172 aa, Artificial Sequence
  derived and/or modified sequence
MAMQMQLEANADTSVEEESFGPQPISRLEQCGINANDVKKLEEAGFHTVEAVAYAPKKELINIKGISEAKADKILAEAAKLVPMGFTTATEFHQRRSEIIQITTGSKELDKLLQGGIETGSITEMFGEFRTGKTQICHTLAVTCQLPIDRGGGEGKAMYIDTEGTFRPERLL

SEQ ID NO: 62482 - DNA, 843 bp, Artificial Sequence
  derived and/or modified sequence
atggccatgcagatgcagctggaggccaacgccgacaccagcgtggaggaggagagcttcggcccccagcccatcagcagactggagcagtgcggcatcaacgccaacgacgtgaagaagctggaggaggccggcttccacaccgtggaggccgtggcctacgcccccaagaaggagctgatcaacatcaagggcatcagcgaggccaaggccgacaagatcctggccgaggccgccaagctggtgcccatgggcttcaccaccgccaccgagttccaccagagaagaagcgagatcatccagatcaccaccggcagcaaggagctggacaagctgctgcagggcggcatcgagaccggcagcatcaccgagatgttcggcgagttcagaaccggcaagacccagatctgccacaccctggccgtgacctgccagctgcccatcgacagaggcggcggcgagggcaaggccatgtacatcgacaccgagggcaccttcagacccgagagactgctggccgtggccgagagatacggcctgagcggcagcgacgtgctggacaacgtggcctacgccagagccttcaacaccgaccaccagacccagctgctgtaccaggccagcgccatgatggtggagagcagatacgccctgctgatcgtggacagcgccaccgccctgtacagaaccgactacagcggcagaggcgagctgagcgccagacagatgcacctggccagattcctgagaatgctgctgagactggccgacgagatcgtgagcgaggagagaaagagaggcaaccagaacctgcagaacctgagactgagcctgagcagctag

SEQ ID NO: 62483 - DNA, 456 bp, Artificial Sequence
  derived and/or modified sequence
atggccatgcagatgcagctggaggccaacgccgacaccagcgtggaggaggagagcttcggcccccagcccatcagcagactggagcagtgcggcatcaacgccaacgacgtgaagaagctggaggaggccggcttccacaccgtggaggccgtggcctacgcccccaagaaggagctgatcaacatcaagggcatcagcgaggccaaggccgacaagatcctggccgaggccgccaagctggtgcccatgggcttcaccaccgccaccgagttccaccagagaagaagcgagatcatccagatcaccaccggcagcaaggagctggacaagctgctgcagggcggcatcgagaccggcagcatcaccgagatgttcggcgagttcagaaccggcaagacccagatctgccacaccctggccgtgacctgccaggtgtggagcctgtggcagtag

SEQ ID NO: 62484 - DNA, 228 bp, Artificial Sequence
  derived and/or modified sequence
atggccatgcagatgcagctggaggccaacgccgacaccagcgtggaggaggagagcttcggcccccagcccatcagcagactggagcagtgcggcatcaacgccaacgacgtgaagaagctggaggaggccggcttccacaccgtggaggccgtggcctacgcccccaagaaggagctgatcaacatcaagggcatcagcgaggccaaggccgacaagatcctgtag

SEQ ID NO: 62485 - DNA, 519 bp, Artificial Sequence
  derived and/or modified sequence
atggccatgcagatgcagctggaggccaacgccgacaccagcgtggaggaggagagcttcggcccccagcccatcagcagactggagcagtgcggcatcaacgccaacgacgtgaagaagctggaggaggccggcttccacaccgtggaggccgtggcctacgcccccaagaaggagctgatcaacatcaagggcatcagcgaggccaaggccgacaagatcctggccgaggccgccaagctggtgcccatgggcttcaccaccgccaccgagttccaccagagaagaagcgagatcatccagatcaccaccggcagcaaggagctggacaagctgctgcagggcggcatcgagaccggcagcatcaccgagatgttcggcgagttcagaaccggcaagacccagatctgccacaccctggccgtgacctgccagctgcccatcgacagaggcggcggcgagggcaaggccatgtacatcgacaccgagggcaccttcagacccgagagactgctgtag

SEQ ID NO: 62486 - DNA, 303 bp, Artificial Sequence
  derived and/or modified sequence
atggccatgcagatgcagctggaggccaacgccgacaccagcgtggaggaggagagcttcggcccccagcccatcagcagactggagcagtgcggcatcaacgccaacgacgtgaagaagctggaggaggccggcttccacaccgtggaggccgtggcctacgcccccaagaaggagctgatcaacatcaagggcatcagcgaggccaaggccgacaagatcctggtggagctgagactggacctgagccagaagtgcctggagaacagcgagctgggcagacccagaagcgtgatcagatag

SEQ ID NO: 62487 - DNA, 843 bp, Artificial Sequence
  derived and/or modified sequence
atggctatgcagatgcagttagaggctaatgcggacacatcagtcgaagaagagagttttggcccccagccaatctcccgcttggaacaatgtggcatcaacgccaatgacgtgaagaaacttgaagaggccggctttcacaccgtggaagcagtggcgtacgcacccaagaaggagctaattaatattaaaggcatcagtgaggctaaggctgataagattcttgcagaggcggcgaagctagtccccatggggttcacaactgccactgagtttcaccagagacgaagcgagattattcaaatcactactggctctaaagagttggataaactgttgcagggggggatagagacaggaagcatcacagagatgtttggtgaattcaggacagggaaaacccagatttgccacactctagcagtgacctgccagctccctatcgacaggggagggggggagggtaaggcgatgtatatcgacacggaaggcacattccggcccgaacgcctcttagcggtggccgaacggtatgggctgtccgggtctgacgtcctggacaacgtggcttatgccagggcctttaatacggatcaccagacacagctcctttatcaggcgagtgcaatgatggttgaatctagatatgcccttctgatcgtggatagcgccactgcattatatagaacagactactccgggcgaggggagctgtctgctcgacagatgcatttggctcggtttttaaggatgctgctgcgactcgctgacgaaatcgttagcgaagaacgtaaaagaggaaaccagaacctccaaaaccttagactctctctgagttcatag

SEQ ID NO: 62488 - DNA, 456 bp, Artificial Sequence
  derived and/or modified sequence
atggcaatgcagatgcagctggaggcgaatgccgatacctcagtcgaagaggaatcttttggcccccagccgattagcagattagaacagtgcggcattaacgccaacgatgtgaagaaactcgaggaagccggtttccacactgtggaagctgtggcttacgccccgaaaaaagaactcattaatataaaaggcatttctgaagcgaaggccgataagattttagctgaagcggccaaacttgtgccaatggggtttacaactgccacagagttccaccagaggcggagcgagatcattcagatcacaaccggctcaaaggagctggataaacttctgcaggggggtatcgaaacaggcagtattaccgaaatgttcggtgagtttaggaccggcaagactcaaatctgccacacgctggcggtcacatgccaggtgtggtccctgtggcaatag

SEQ ID NO: 62489 - DNA, 228 bp, Artificial Sequence
  derived and/or modified sequence
atggctatgcagatgcagctggaggcaaacgctgacaccagcgtcgaggaggagagctttggcccacaacctattagtagattggaacagtgtggtattaatgccaatgacgtaaagaagctagaggaagcgggctttcatacagtggaagccgtggcgtatgcccctaagaaggaactgataaatattaagggcatatccgaggcgaaggcagataaaattctttag

SEQ ID NO: 62490 - DNA, 519 bp, Artificial Sequence
  derived and/or modified sequence
atggccatgcagatgcaattagaagccaacgccgacactagcgtagaagaagaaagctttggcccgcaacccatttctcgcctggaacaatgtggcatcaatgccaatgacgtgaaaaaactggaggaggccggttttcacacggttgaggctgtcgcttatgctccaaaaaaagaactaatcaatattaagggcatctccgaggcaaaggcggacaagatcctcgccgaggctgctaagctcgtacccatgggcttcaccaccgcaacggagttccatcagcgccggagcgaaatcatccagatcacgacaggatccaaggagctcgataagctgttgcagggaggtatcgaaactgggagcatcaccgagatgtttggtgaattccgtacagggaaaacgcaaatatgccacactctcgcggttacttgtcagttgcctattgatagaggtggcggcgaagggaaggccatgtacatagacacagagggaacatttagacccgagaggttgctctag

SEQ ID NO: 62491 - DNA, 303 bp, Artificial Sequence
  derived and/or modified sequence
atggcaatgcagatgcagctcgaggcgaacgccgacacttcagtggaggaagagagttttggcccccagccaatctctcggcttgaacagtgtggcatcaatgcgaatgacgtcaaaaaattggaagaggctgggttccacacagttgaggctgtggcatacgccccgaagaaagagttaattaatatcaaggggatcagcgaggctaaagcagacaaaatccttgtagagctccgccttgacctgtctcagaaatgcctcgaaaattccgagctagggaggccccgtagcgttatcaggtag

SEQ ID NO: 62492 - DNA, 843 bp, Artificial Sequence
  derived and/or modified sequence
atggccatgcagatgcagctggaggccaatgctgacacctctgtggaggaggagagctttggcccccagcccatcagccggctggagcagtgtggcatcaatgccaatgatgtgaagaagctggaggaggccggcttccacacagtggaggccgtggcctatgcccccaagaaggagctgatcaacatcaagggcatcagcgaggccaaggctgacaagatcctggccgaggccgccaagctggtgcccatgggcttcaccacagccacagagttccaccagaggagaagtgagatcatccagatcaccaccggcagcaaggagctggacaagctgctgcagggcggcattgaaacaggcagcatcacagagatgtttggagagttcagaacaggcaagacccagatctgccacaccctggccgtgacctgccagctgcccatcgacagaggaggaggagagggcaaggccatgtacatcgacacagagggcaccttccggcctgagcggctgctggccgtggccgagagatatggcctgagcggcagtgatgtgctggacaacgtggcctatgcccgggccttcaacacagaccaccagacccagctgctgtaccaggccagcgccatgatggtggagagccgctatgccctgctgattgtggacagcgccacagccctgtacagaacagactacagcggccgcggggagctgagcgcccggcagatgcacctggcccgcttcctgaggatgctgctgcggctggctgatgaaattgtgtctgaggagaggaagaggggcaaccagaacctgcagaacctgcggctgagcctgagcagctag

SEQ ID NO: 62493 - DNA, 456 bp, Artificial Sequence
  derived and/or modified sequence
atggccatgcagatgcagctggaggccaatgctgacacctctgtggaggaggagagctttggcccccagcccatcagccggctggagcagtgtggcatcaatgccaatgatgtgaagaagctggaggaggccggcttccacacagtggaggccgtggcctatgcccccaagaaggagctgatcaacatcaagggcatcagcgaggccaaggctgacaagatcctggccgaggccgccaagctggtgcccatgggcttcaccacagccacagagttccaccagaggagaagtgagatcatccagatcaccaccggcagcaaggagctggacaagctgctgcagggcggcattgaaacaggcagcatcacagagatgtttggagagttcagaacaggcaagacccagatctgccacaccctggccgtgacctgccaggtgtggagcctgtggcagtag

SEQ ID NO: 62494 - DNA, 228 bp, Artificial Sequence
  derived and/or modified sequence
atggccatgcagatgcagctggaggccaatgctgacacctctgtggaggaggagagctttggcccccagcccatcagccggctggagcagtgtggcatcaatgccaatgatgtgaagaagctggaggaggccggcttccacacagtggaggccgtggcctatgcccccaagaaggagctgatcaacatcaagggcatcagcgaggccaaggctgacaagatcctgtag

SEQ ID NO: 62495 - DNA, 519 bp, Artificial Sequence
  derived and/or modified sequence
atggccatgcagatgcagctggaggccaatgctgacacctctgtggaggaggagagctttggcccccagcccatcagccggctggagcagtgtggcatcaatgccaatgatgtgaagaagctggaggaggccggcttccacacagtggaggccgtggcctatgcccccaagaaggagctgatcaacatcaagggcatcagcgaggccaaggctgacaagatcctggccgaggccgccaagctggtgcccatgggcttcaccacagccacagagttccaccagaggagaagtgagatcatccagatcaccaccggcagcaaggagctggacaagctgctgcagggcggcattgaaacaggcagcatcacagagatgtttggagagttcagaacaggcaagacccagatctgccacaccctggccgtgacctgccagctgcccatcgacagaggaggaggagagggcaaggccatgtacatcgacacagagggcaccttccggcctgagcggctgctgtag

SEQ ID NO: 62496 - DNA, 303 bp, Artificial Sequence
  derived and/or modified sequence
atggccatgcagatgcagctggaggccaatgctgacacctctgtggaggaggagagctttggcccccagcccatcagccggctggagcagtgtggcatcaatgccaatgatgtgaagaagctggaggaggccggcttccacacagtggaggccgtggcctatgcccccaagaaggagctgatcaacatcaagggcatcagcgaggccaaggctgacaagatcctggtggagctgcggctggacctgagccagaagtgcctggagaacagcgagctgggccggcccaggagcgtcatcagatag

SEQ ID NO: 62497 - DNA, 843 bp, Artificial Sequence
  derived and/or modified sequence
atggccatgcagatgcagctggaggccaacgccgacaccagcgtggaggaggaaagttttggcccacagccgatctctcggcttgagcagtgtggcatcaacgccaacgacgtaaagaagctggaagaagcaggctttcacacagtggaagccgtcgcttatgccccaaagaaagaactcattaacattaagggcatttccgaggccaaggcagacaagatcttggccgaagccgctaaacttgttccaatgggtttcactacagctacagaattccaccagcgccgttccgagatcatccaaattactacaggaagcaaagagttggataagctgttacagggtggtattgagacaggcagtatcactgagatgtttggagaattcagaactgggaagactcagatctgtcacaccctcgcagtgacctgccagttgccaattgatagaggcggaggtgaaggaaaagctatgtatatcgatacggagggcacttttcgccccgaaaggctgctggccgtggccgaaaggtatggcttatccggttccgacgtcctggacaacgtcgcctacgcacgggcttttaacaccgaccatcaaactcagctattgtaccaggcgtcagccatgatggttgagagtcgctatgctttactgatcgtggactctgctacagcactgtaccgcacggactactccggccgcggagaactgagcgccaggcaaatgcacctggcaaggtttctgagaatgttactccgactcgccgatgagattgtgagtgaagaaagaaagagggggaaccagaacctgcagaatctgaggttgtctttgagctcatag

SEQ ID NO: 62498 - DNA, 456 bp, Artificial Sequence
  derived and/or modified sequence
atggccatgcagatgcagctggaggccaacgccgacaccagcgtggaagaggagtcattcgggcctcagcctatctctcggcttgaacagtgtgggataaatgccaacgatgtaaaaaagttggaagaggctggatttcacacagtggaggcagttgcttatgcccccaaaaaggagctgatcaacatcaagggcatctctgaagcgaaggccgacaaaatcctcgccgaagccgcaaagctggtgcctatgggctttactaccgctactgagttccaccagaggcggagcgaaataatacagatcaccactggctctaaggagttggataagctgctgcagggcggcattgaaactggatccataacagagatgtttggcgaattcaggacaggcaagacgcaaatctgccacaccttggcggtgacctgtcaagtctggagtctctggcagtag

SEQ ID NO: 62499 - DNA, 228 bp, Artificial Sequence
  derived and/or modified sequence
atggccatgcagatgcagctggaggccaacgccgacaccagcgtggaggaagagagctttggcccacagcccatttctaggcttgaacagtgtgggattaacgccaatgatgttaaaaaactcgaggaggccgggttccacaccgttgaggctgtcgcttatgctcccaagaaggaacttattaatatcaagggaattagtgaggcaaaggccgataagattctgtag

SEQ ID NO: 62500 - DNA, 519 bp, Artificial Sequence
  derived and/or modified sequence
atggccatgcagatgcagctggaggccaacgccgacaccagcgtggaggaggaatcgtttggtcctcagcccatttcacgcttggagcagtgtgggataaatgcgaatgatgttaagaaactcgaagaggcgggtttccatacagtcgaggccgtggcatacgcaccgaagaaggagctgatcaacatcaaagggatctctgaggccaaggcagataaaattttggctgaggctgccaaactggttcccatgggttttactactgcgaccgagtttcaccaacgcaggtcagaaatcatccagattaccaccggatcaaaggaactagacaaactgctgcagggtggtatcgaaaccgggagcatcaccgaaatgttcggggagttcaggaccggaaagacacagatctgccacaccctggccgtaacctgccagttgcccatcgatcgcggtggaggagaggggaaggcaatgtatatagacacagaaggcaccttccgacctgagcgcttgttgtag

SEQ ID NO: 62501 - DNA, 303 bp, Artificial Sequence
  derived and/or modified sequence
atggccatgcagatgcagctggaggccaacgccgacaccagcgtggaggaggagtcattcggtccccagcccatctctcgcttggaacaatgtggcataaacgctaacgatgtgaagaaactggaggaggcgggattccacacagtggaagcagtggcctacgccccgaaaaaggagctgataaatattaagggtattagcgaggcgaaggccgacaaaatactggtcgaactccggctggacctttctcagaagtgcctcgaaaattccgaacttggaaggcctaggtctgtgatccgctag

SEQ ID NO: 62502 - DNA, 843 bp, Artificial Sequence
  derived and/or modified sequence
atggccatgcagatgcagctggaggcaaatgctgatacctctgtggaagaggagtcttttggacctcagccaatctcacgtctggagcagtgcgggataaacgccaacgatgtaaagaagctcgaggaggcagggtttcatacagttgaggcggtcgcatacgctcctaaaaaggaactgataaacattaaaggaatttcagaggcaaaggccgacaaaattctggctgaggcagctaagcttgtccctatggggttcacgaccgcaacagagttccaccagcgccgatctgaaatcattcagattactactggttccaaagaactggataagctcttgcagggtggtattgagaccggcagcattacagagatgttcggcgagtttcgtactgggaaaacccagatctgtcacaccctggcggtgacttgtcagttacctattgaccggggtgggggagaggggaaggcaatgtacatcgatacagaaggtacctttagacccgagcgcttattagctgttgccgagagatacggactttccggaagcgacgtcctggataatgtggcctatgctcgagcttttaatacagaccaccaaacgcaattactctaccaggcctcagcaatgatggtggagtcgagatacgcactattgatcgtcgacagcgcaaccgcactgtataggaccgactacagcggacgcggagagctgagcgcacgacagatgcatttagctcgatttctgaggatgctgctgaggctcgctgacgaaatcgtgagtgaagaaaggaaaagaggcaaccagaacctgcaaaatctccgcctgtcgctgtcctcgtag

SEQ ID NO: 62503 - DNA, 456 bp, Artificial Sequence
  derived and/or modified sequence
atggcgatgcaaatgcagctggaagccaacgctgatacgagtgtggaagaagagtccttcggacctcagccgatcagtcgcctcgaacaatgtgggatcaacgccaacgatgttaagaaattggaagaagctggtttccatactgttgaggccgtggcctatgcaccaaaaaaagagctaataaacattaaagggatttctgaggccaaggctgataaaatcctcgccgaagccgcaaagctggtgccaatgggcttcacaaccgctactgagttccaccaacggcgttcagaaatcatccagatcactaccggcagcaaagagctggataagcttctacagggcggaattgaaaccggttccattaccgagatgttcggtgaattccgcaccggaaagacccagatctgccacactctggcggttacctgtcaggtgtggagcctgtggcagtag

SEQ ID NO: 62504 - DNA, 228 bp, Artificial Sequence
  derived and/or modified sequence
atggccatgcaaatgcagttagaggctaatgctgacacctcggtggaggaggaatcctttgggccacaaccaataagtcggctggagcagtgtgggatcaatgcaaatgacgttaagaaattggaggaggccggtttccatacagtggaggctgtggcatacgcccctaagaaagaattgattaatatcaagggtatcagcgaggccaaagctgacaaaattctgtag

SEQ ID NO: 62505 - DNA, 519 bp, Artificial Sequence
  derived and/or modified sequence
atggcgatgcagatgcagctagaggccaacgccgatacttctgtcgaggaggaatccttcggacctcagcccattagtcgactggagcaatgtggaatcaatgccaatgatgtgaaaaaactggaggaggcaggatttcatactgtcgaggcggtggcctacgcacctaagaaggaactgatcaatatcaaaggtatttccgaggccaaagccgacaaaattcttgctgaggccgctaagttggttcctatgggatttactacagccacggagtttcatcagcggagatccgagattatccagatcaccaccggatccaaagagctcgataaactgctccagggaggaatcgaaacaggatcaatcactgagatgttcggcgaatttaggacgggaaaaacccagatttgccacactctcgcagttacctgccagctgccaatcgacaggggtgggggagagggcaaggccatgtacatcgacactgaaggtacatttagacctgaacggctgttgtag

SEQ ID NO: 62506 - DNA, 303 bp, Artificial Sequence
  derived and/or modified sequence
atggccatgcaaatgcaactcgaggccaatgccgacacctcggtggaggaggagtcattcggccctcagcccattagtcgcctggagcagtgcggtatcaacgcgaacgacgtgaagaagctcgaagaagccggatttcacaccgtggaggcggtggcgtacgctcccaagaaagaactcatcaatataaagggaatcagtgaagccaaggcagataaaattctggtcgagttgaggttggacctgtcacagaaatgcctggagaatagcgaattgggacggcctcgttctgtcatccgctag

SEQ ID NO: 62507 - DNA, 1611 bp, Artificial Sequence
  derived and/or modified sequence
gttacgtcgacgcgggcgtgaccctgggcgagagggtttggcgggaattctgaaagccgctggcggaccgcgcgcagcggccagagaccgagccctaaggagagtgcggcgcttcccgaggcgtgcagctgggaactgcaactcatctgggttgtgcgcagaaggctggggcaagcgagtagagaagtggagcgtaagccaggggcgttgggggccgtgcgggtcgggcgcgtgccacgcccgcggggtgaagtcggagcgcggggcctgctggagagaggagcgctgcggaccgagtaatggcaatgcagatgcagcttgaagcaaatgcagatacttcagtggaagaagaaagctttggcccacaacccatttcacggttagagcagtgtggcataaatgccaacgatgtgaagaaattggaagaagctggattccatactgtggaggctgttgcctatgcgccaaagaaggagctaataaatattaagggaattagtgaagccaaagctgataaaattctggctgaggcagctaaattagttccaatgggtttcaccactgcaactgaattccaccaaaggcggtcagagatcatacagattactactggctccaaagagcttgacaaactacttcaaggtggaattgagactggatctatcacagaaatgtttggagaattccgaactgggaagacccagatctgtcatacgctagctgtcacctgccagcttcccattgaccggggtggaggtgaaggaaaggccatgtacattgacactgagggtacctttaggccagaacggctgctggcagtggctgagaggtatggtctctctggcagtgatgtcctggataatgtagcatatgctcgagcgttcaacacagaccaccagacccagctcctttatcaagcatcagccatgatggtagaatctaggtatgcactgcttattgtagacagtgccaccgccctttacagaacagactactcgggtcgaggtgagctttcagccaggcagatgcacttggccaggtttctgcggatgcttctgcgactcgctgatgagattgtatctgaggaaaggaagaggggaaaccagaatctgcaaaatctacgactctccctgtcttcctgaagctgaagctatgttcgccattaatgcagatggagtgggagatgccaaagactgaatcattgggtttttcctctgttaaaaaccttaagtgctgcagcctaatgagagtgcactgctccctggggttctctacaggcctcttcctgttgtgactgccaggataaagcttccgggaaaacagctattatatcagcttttctgatggtataaacaggagacaggtcagtagtcacaaactgatctaaaatgtttattccttctgtagtgtattaatctctgtgtgttttctttggttttggaggaggggtatgaagtatctttgacatggtgccttaggaatgacttgggtttaacaagctgtctactggacaatcttatgtttccaagagaactaaagctggagagacctgacccttctctcacttctaaattaatggtaaaataaaatgcctcagctatgtagcaaagg

SEQ ID NO: 62508 - DNA, 625 bp, Artificial Sequence
  derived and/or modified sequence
gcggctcgtcctcgcccacctgcgtcctggccggtccagtgctcagcggcagttggggcctccgcgcgcagtgtgaaacccggacgtggcagggcgtgtccgcgcccgaccgaccctcagctgctggggcgaaaacacaagtggacctcagtctttagaactaggggagaaacattagagcctttataggcaacacctattttatgggttcgagcgagaagtccgagatcagagcggtgtagccacagctgtttaatatcacagccagggcttccggattcctgatctgtctttccattacaccgtgcttagaaagtaccaatctccgattgccaaaacagtgttttcatcatctaatgcggaaaaccattcacatgatgcctagagaatgatctgaataatggcaatgcagatgcagcttgaagcaaatgcagatacttcagtggaagaagaaagctttggcccacaacccatttcacggttagagcagtgtggcataaatgccaacgatgtgaagaaattggaagaagctggattccatactgtggaggctgttgcctatgcgccaaagaaggagctaataaatattaagggaattagtgaagccaaagctgataaaattctg

SEQ ID NO: 62509 - DNA, 566 bp, Artificial Sequence
  derived and/or modified sequence
cttgggagtcgtggtcttcgatctggtaaacagaagacggcaactcgtaatggcaatgcagatgcagcttgaagcaaatgcagatacttcagtggaagaagaaagctttggcccacaacccatttcacggttagagcagtgtggcataaatgccaacgatgtgaagaaattggaagaagctggattccatactgtggaggctgttgcctatgcgccaaagaaggagctaataaatattaagggaattagtgaagccaaagctgataaaattctggctgaggcagctaaattagttccaatgggtttcaccactgcaactgaattccaccaaaggcggtcagagatcatacagattactactggctccaaagagcttgacaaactacttcaaggtggaattgagactggatctatcacagaaatgtttggagaattccgaactgggaagacccagatctgtcatacgctagctgtcacctgccagcttcccattgaccggggtggaggtgaaggaaaggccatgtacattgacactgagggtacctttaggccagaacggctgctgg

SEQ ID NO: 62510 - protein, 3065 aa, Artificial Sequence
  derived and/or modified sequence
MEEKQQIILANQDGGTVAGAAPTFFVILKQPGNGKTDQGILVTNQDACALASSVSSPVKSKGKICLPADCTVGGITVTLDNNSMWNEFYHRSTEMILTKQGRRMFPYCRYWITGLDSNLKYILVMDISPVDNHRYKWNGRWWEPSGKAEPHVLGRVFIHPESPSTGHYWMHQPVSFYKLKLTNNTLDQEGHIILHSMHRYLPRLHLVPAEKAVEVIQLNGPGVHTFTFPQTEFFAVTAYQNIQITQLKIDYNPFAKGFRDDGLNNKPQRDGKQKNSSDQEGNNISSSSGHRVRLTEGQGSEIQPGDLDPLSRGHETSGKGLEKTSLNIKRDFLGFMDTDSALSEVPQLKQEISECLIASSFEDDSRVASPLDQNGSFNVVIKEEPLDDYDYELGECPEGVTVKQEETDEETDVYSNSDDDPILEKQLKRHNKVDNPEADHLSSKWLPSSPSGVAKAKMFKLDTGKMPVVYLEPCAVTRSTVKISELPDNMLSTSRKDKSSMLAELEYLPTYIENSNETAFCLGKESENGLRKHSPDLRVVQKYPLLKEPQWKYPDISDSISTERILDDSKDSVGDSLSGKEDLGRKRTTMLKIATAAKVVNANQNASPNVPGKRGRPRKLKLCKAGRPPKNTGKSLISTKNTPVSPGSTFPDVKPDLEDVDGVLFVSFESKEALDIHAVDGTTEESSSLQASTTNDSGYRARISQLEKELIEDLKTLRHKQVIHPGLQEVGLKLNSVDPTMSIDLKYLGVQLPLAPATSFPFWNLTGTNPASPDAGFPFVSRTGKTNDFTKIKGWRGKFHSASASRNEGGNSESSLKNRSAFCSDKLDEYLENEGKLMETSMGFSSNAPTSPVVYQLPTKSTSYVRTLDSVLKKQSTISPSTSYSLKPHSVPPVSRKAKSQNRQATFSGRTKSSYKSILPYPVSPKQKYSHVILGDKVTKNSSGIISENQANNFVVPTLDENIFPKQISLRQAQQQQQQQQGSRPPGLSKSQVKLMDLEDCALWEGKPRTYITEERADVSLTTLLTAQASLKTKPIHTIIRKRAPPCNNDFCRLGCVCSSLALEKRQPAHCRRPDCMFGCTCLKRKVVLVKGGSKTKHFQRKAAHRDPVFYDTLGEEAREEEEGIREEEEQLKEKKKRKKLEYTICETEPEQPVRHYPLWVKVEGEVDPEPVYIPTPSVIEPMKPLLLPQPEVLSPTVKGKLLTGIKSPRSYTPKPNPVIREEDKDPVYLYFESMMTCARVRVYERKKEDQRQPSSSSSPSPSFQQQTSCHSSPENHNNAKEPDSEQQPLKQLTCDLEDDSDKLQEKSWKSSCNEGESSSTSYMHQRSPGGPTKLIEIISDCNWEEDRNKILSILSQHINSNMPQSLKVGSFIIELASQRKSRGEKNPPVYSSRVKISMPSCQDQDDMAEKSGSETPDGPLSPGKMEDISPVQTDALDSVRERLHGGKGLPFYAGLSPAGKLVAYKRKPSSSTSGLIQVASNAKVAASRKPRTLLPSTSNSKMASSSGTATNRPGKNLKAFVPAKRPIAARPSPGGVFTQFVMSKVGALQQKIPGVSTPQTLAGTQKFSIRPSPVMVVTPVVSSEPVQVCSPVTAAVTTTTPQVFLENTTAVTPMTAISDVETKETTYSSGATTTGVVEVSETNTSTSVTSTQSTATVNLTKTTGITTPVASVAFPKSLVASPSTITLPVASTASTSLVVVTAAASSSMVTTPTSSLGSVPIILSGINGSPPVSQRPENAAQIPVATPQVSPNTVKRAGPRLLLIPVQQGSPTLRPVSNTQLQGHRMVLQPVRSPSGMNLFRHPNGQIVQLLPLHQLRGSNTQPNLQPVMFRNPGSVMGIRLPAPSKPSETPPSSTSSSAFSVMNPVIQAVGSSSAVNVITQAPSLLSSGASFVSQAGTLTLRISPPEPQSFASKTGSETKITYSSGGQPVGTASLIPLQSGSFALLQLPGQKPVPSSILQHVASLQMKRESQNPDQKDETNSIKREQETKKVLQSEGEAVDPEANVIKQNSGAATSEETLNDSLEDRGDHLDEECLPEEGCATVKPSEHSCITGSHTDQDYKDVNEEYGARNRKSSKEKVAVLEVRTISEKASNKTVQNLSKVQHQKLGDVKVEQQKGFDNPEENSSEFPVTFKEESKFELSGSKVMEQQSNLQPEAKEKECGDSLEKDRERWRKHLKGPLTRKCVGASQECKKEADEQLIKETKTCQENSDVFQQEQGISDLLGKSGITEDARVLKTECDSWSRISNPSAFSIVPRRAAKSSRGNGHFQGHLLLPGEQIQPKQEKKGGRSSADFTVLDLEEDDEDDNEKTDDSIDEIVDVVSDYQSEEVDDVEKNNCVEYIEDDEEHVDIETVEELSEEINVAHLKTTAAHTQSFKQPSCTHISADEKAAERSRKAPPIPLKLKPDYWSDKLQKEAEAFAYYRRTHTANERRRRGEMRDLFEKLKITLGLLHSSKVSKSLILTRAFSEIQGLTDQADKLIGQKNLLTRKRNILIRKVSSLSGKTEEVVLKKLEYIYAKQQALEAQKRKKKMGSDEFDISPRISKQQEGSSASSVDLGQMFINNRRGKPLILSRKKDQATENTSPLNTPHTSANLVMTPQGQLLTLKGPLFSGPVVAVSPDLLESDLKPQVAGSAVALPENDDLFMMPRIVNVTSLATEGGLVDMGGSKYPHEVPDSKPSDHLKDTVRNEDNSLEDKGRISSRGNRDGRVTLGPTQVFLANKDSGYPQIVDVSNMQKAQEFLPKKISGDMRGIQYKWKESESRGERVKSKDSSFHKLKMKDLKDSSIEMELRKVTSAIEEAALDSSELLTNMEDEDDTDETLTSLLNEIAFLNQQLNDDSVGLAELPSSMDTEFPGDARRAFISKVPPGSRATFQVEHLGTGLKELPDVQGESDSISPLLLHLEDDDFSENEKQLAEPASEPDVLKIVIDSEIKDSLLSNKKAIDGGKNTSGLPAEPESVSSPPTLHMKTGLENSNSTDTLWRPMPKLAPLGLKVANPSSDADGQSLKVMPCLAPIAAKVGSVGHKMNLTGNDQEGRESKVMPTLAPVVAKLGNSGASPSSAGK

SEQ ID NO: 62511 - protein, 3026 aa, Artificial Sequence
  derived and/or modified sequence
MEEKQQIILANQDGGTVAGAAPTFFVILKQPGNGKTDQGILVTNQDACALASSVSSPVKSKGKICLPADCTVGGITVTLDNNSMWNEFYHRSTEMILTKQGRRMFPYCRYWITGLDSNLKYILVMDISPVDNHRYKWNGRWWEPSGKAEPHVLGRVFIHPESPSTGHYWMHQPVSFYKLKLTNNTLDQEGHIILHSMHRYLPRLHLVPAEKAVEVIQLNGPGVHTFTFPQTEFFAVTAYQNIQITQLKIDYNPFAKGFRDDGLNNKPQRDGKQKNSSDQEGNNISSSSGHRVRLTEGQGSEIQPGDLDPLSRGHETSGKGLEKTSLNIKRDFLGFMDTDSALSEVPQLKQEISECLIASSFEDDSRVASPLDQNGSFNVVIKEEPLDDYDYELGECPEGVTVKQEETDEETDVYSNSDDDPILEKQLKRHNKVDNPEADHLSSKWLPSSPSGVAKAKMFKLDTGKMPVVYLEPCAVTRSTVKISELPDNMLSTSRKDKSSMLAELEYLPTYIENSNETAFCLGKESENGLRKHSPDLRVVQKYPLLKEPQWKYPDISDSISTERILDDSKDSVGDSLSGKEDLGRKRTTMLKIATAAKVVNANQNASPNVPGKRGRPRKLKLCKAGRPPKNTGKSLISTKNTPVSPGSTFPDVKPDLEDVDGVLFVSFESKEALDIHAVDGTTEESSSLQASTTNDSGYRARISQLEKELIEDLKTLRHKQVIHPGLQEVGLKLNSVDPTMSIDLKYLGVQLPLAPATSFPFWNLTGTNPASPDAGFPFVSRTGKTNDFTKIKGWRGKFHSASASRNEGGNSESSLKNRSAFCSDKLDEYLENEGKLMETSMGFSSNAPTSPVVYQLPTKSTSYVRTLDSVLKKQSTISPSTSYSLKPHSVPPVSRKAKSQNRQATFSGRTKSSYKSILPYPVSPKQKYSHVILGDKVTKNSSGIISENQANNFVVPTLDENIFPKQISLRQAQQQQQQQQGSRPPGLSKSQVKLMDLEDCALWEGKPRTYITEERADVSLTTLLTAQASLKTKPIHTIIRKRAPPCNNDFCRLGCVCSSLALEKRQPAHCRRPDCMFGCTCLKRKVVLVKGGSKTKHFQRKAAHRDPVFYDTLGEEAREEEEGIREEEEQLKEKKKRKKLEYTICETEPEQPVRHYPLWVKVEGEVDPEPVYIPTPSVIEPMKPLLLPQPEVLSPTVKGKLLTGIKSPRSYTPKPNPVIREEDKDPVYLYFESMMTCARVRVYERKKEDQRQPSSSSSPSPSFQQQTSCHSSPENHNNAKEPDSEQQPLKQLTCDLEDDSDKLQEKSWKSSCNEGESSSTSYMHQRSPGGPTKLIEIISDCNWEEDRNKILSILSQHINSNMPQSLKVGSFIIELASQRKSRGEKNPPVYSSRVKISMPSCQDQDDMAEKSGSETPDGPLSPGKMEDISPVQTDALDSVRERLHGGKGLPFYAGLSPAGKLVAYKRKPSSSTSGLIQVASNAKVAASRKPRTLLPSTSNSKMASSSGTATNRPGKNLKAFVPAKRPIAARPSPGGVFTQFVMSKVGALQQKIPGVSTPQTLAGTQKFSIRPSPVMVVTPVVSSEPVQVCSPVTAAVTTTTPQVFLENTTAVTPMTAISDVETKETTYSSGATTTGVVEVSETNTSTSVTSTQSTATVNLTKTTGITTPVASVAFPKSLVASPSTITLPVASTASTSLVVVTAAASSSMVTTPTSSLGSVPIILSGINGSPPVSQRPENAAQIPVATPQVSPNTVKRAGPRLLHPNGQIVQLLPLHQLRGSNTQPNLQPVMFRNPGSVMGIRLPAPSKPSETPPSSTSSSAFSVMNPVIQAVGSSSAVNVITQAPSLLSSGASFVSQAGTLTLRISPPEPQSFASKTGSETKITYSSGGQPVGTASLIPLQSGSFALLQLPGQKPVPSSILQHVASLQMKRESQNPDQKDETNSIKREQETKKVLQSEGEAVDPEANVIKQNSGAATSEETLNDSLEDRGDHLDEECLPEEGCATVKPSEHSCITGSHTDQDYKDVNEEYGARNRKSSKEKVAVLEVRTISEKASNKTVQNLSKVQHQKLGDVKVEQQKGFDNPEENSSEFPVTFKEESKFELSGSKVMEQQSNLQPEAKEKECGDSLEKDRERWRKHLKGPLTRKCVGASQECKKEADEQLIKETKTCQENSDVFQQEQGISDLLGKSGITEDARVLKTECDSWSRISNPSAFSIVPRRAAKSSRGNGHFQGHLLLPGEQIQPKQEKKGGRSSADFTVLDLEEDDEDDNEKTDDSIDEIVDVVSDYQSEEVDDVEKNNCVEYIEDDEEHVDIETVEELSEEINVAHLKTTAAHTQSFKQPSCTHISADEKAAERSRKAPPIPLKLKPDYWSDKLQKEAEAFAYYRRTHTANERRRRGEMRDLFEKLKITLGLLHSSKVSKSLILTRAFSEIQGLTDQADKLIGQKNLLTRKRNILIRKVSSLSGKTEEVVLKKLEYIYAKQQALEAQKRKKKMGSDEFDISPRISKQQEGSSASSVDLGQMFINNRRGKPLILSRKKDQATENTSPLNTPHTSANLVMTPQGQLLTLKGPLFSGPVVAVSPDLLESDLKPQVAGSAVALPENDDLFMMPRIVNVTSLATEGGLVDMGGSKYPHEVPDSKPSDHLKDTVRNEDNSLEDKGRISSRGNRDGRVTLGPTQVFLANKDSGYPQIVDVSNMQKAQEFLPKKISGDMRGIQYKWKESESRGERVKSKDSSFHKLKMKDLKDSSIEMELRKVTSAIEEAALDSSELLTNMEDEDDTDETLTSLLNEIAFLNQQLNDDSVGLAELPSSMDTEFPGDARRAFISKVPPGSRATFQVEHLGTGLKELPDVQGESDSISPLLLHLEDDDFSENEKQLAEPASEPDVLKIVIDSEIKDSLLSNKKAIDGGKNTSGLPAEPESVSSPPTLHMKTGLENSNSTDTLWRPMPKLAPLGLKVANPSSDADGQSLKVMPCLAPIAAKVGSVGHKMNLTGNDQEGRESKVMPTLAPVVAKLGNSGASPSSAGK

SEQ ID NO: 62512 - DNA, 4617 bp, Artificial Sequence
  derived and/or modified sequence
aaagaagcagaagcgtttgcttattatcgccggacacacactgccaatgagcggcggcggcgtggtgaaatgagggatctctttgagaaattaaagatcacattgggattacttcattcttccaaggtttccaaaagtctcattcttactcgagccttcagtgaaattcagggactaacagatcaggcagacaaattgataggacagaaaaatctcctgactcgaaaacggaatattctgatacggaaagtatcgtctctttcaggtaagacagaagaagtggtcctgaagaagctagagtatatttatgcaaaacagcaagcactagaggcacaaaaaagaaaaaagaagatgggatcagatgagtttgacatatctcccagaattagcaaacagcaggaaggatcttctgcatcatctgtagatcttggacagatgtttataaataacaggagggggaaacctttgattctttccagaaaaaaagaccaggccacagaaaatacctcacccttgaacactccacacacctctgccaaccttgtgatgactccgcaagggcaattgctcaccctaaaaggtcccctattctcaggaccagtggtagctgtttctcctgatctcttagaatctgatcttaagcctcaagttgccggtagtgctgtggctctaccagaaaatgacgacttatttatgatgccacgaattgttaatgtgacatcattggccacagagggaggtttggtagatatgggtggcagcaaatatcctcatgaagttcctgatagcaagccatctgaccatctgaaagacaccgtcaggaatgaagataattccttagaggataagggtagaatctcttccagaggaaacagagatggcagagtgacgttgggtccaacgcaggtttttctggcaaacaaagattctggttatccacaaatagttgacgtttccaatatgcagaaagcacaagagttcttacctaaaaagatttctggtgatatgagagggattcagtataaatggaaagagagtgaatcaagaggggagagagtgaagtcaaaggattcttcatttcataaattaaagatgaaagatctcaaggactcaagcatagagatggaactgaggaaagtaacatcagctatagaggaagcagctcttgattccagtgaactgctgactaacatggaagatgaggatgatactgatgagacactgacttcactgctcaatgaaattgcctttcttaatcaacaactaaatgatgactctgttggcctggctgaactacccagctctatggatacagagttcccaggggatgctcggcgggcttttattagtaaggttcctcctggaagcagagcaactttccaggttgagcacttgggaactggtttgaaagagttgcctgatgttcaaggggagagtgactctatcagtcccctcctcttgcacttggaagacgatgacttttctgagaatgaaaaacaacttgcagaaccagcctctgagccagatgtccttaagattgttattgactctgaaataaaggattccctcctttccaacaagaaagctattgatggagggaagaatacttctggcctccctgcagagcccgaaagtgtgtcctcaccccccaccctacacatgaagactggcttggagaacagcaacagcacagacactttgtggaggcctatgccaaagttggcccctctaggtttaaaagtagctaatccttccagtgatgcagatggtcagagtctcaaggtgatgccttgtttggcacctatagctgccaaagttgggtcagttggacacaaaatgaacttaacagggaatgaccaggaaggccgggaaagcaaggtgatgcctacattggcacctgttgtggctaaattgggcaactcgggggcctcaccaagttctgcagggaaatgaacttacttgtccttaagcagaagccaggctgtgaggggaaatagatctcacctcctttctctgcaggcatctgtttgtttgtgtcttagaacttggatccttgacttcaatgatgcagtggataatgatgggagaaagggggtagggtgctgaccctggtataagaagtactctgaaattctgatcatgttaaaatgtgttacctcacttgtggtgctgggtcccctcatcctctctaagaagatgtgatccattactgaacatgaggtgcccctcttacccaaggaatttataacatgactctggctccacagtggtttctagttcttcccccacaagcgaaagagctgtttgcaactttggagttgctgtagactgaactgtagcttgtagctgttgaattaagtccaaaatctaaggaatgcgatggacttgtgcaaagggatccagaagagacactttttagttgatgtttcaagaatagggagagagaggatgggtaccatggaataccaaagtgaaggactttgtgtcattcagtaaaattttcttttttcatatcctaagtagctcccattccctcaccttttcaatcagaattaacaaattcaagccttcagtaaagtagggatgcttttaacttttattattaattattttgagatcttaaaaaaatagtagttctcccttattatttttgtgggcattgaaaagctcatttcacagtaccagagatttttactgggagtatatattttggaggtaggcatagagggagccctaccccttccacaaattacgttactcaagagacagctaaaataaaatgcattatctccccagaccagagacagtggccaaaataaaaaatcatggggctggaaatttcccaaatcaaaccagcctcctggtgcttgaaggtttcattcactattacctgcacaggatgtaaagaaaagtcacagtaggcactctttaccagggaaataaggcagtatttgaatcacaagatatattttttatctgcaaccatggatccaatgatctgtagagctttttcactcattaactgtcaggatatgaaggactgacagtctgtaaagatatttatatttttgtatagttgttttcatagatttctcaaaggctgaagttttcaacctagaagatgagatttgtattgagtatagaaatgatgtttcctatctagtttgtaaataatcatggtgcacttgaggggtctcttggaaactcctagggggtcaagaatcactattctgaaactgtatagactgggatttagctgctgcattttgcctttcttaaataattatattttggaatgtaacccctgttctgtcttcattgacaggatttgcttgtgttgttaaaacactaacacaagagcttccagtgcctgggccgtgcctaggtgatgctatttcttctatatctcctgtcttctttatcccaaatcccactcagcatatcttcagacctaggttgtaagaccaactttggattggatctagccagtgaattattatttccatggttggttccctttctgttaactctggtaatcaacagattgaaaacggtggaagaacttcttctgaaaattgcagtgggagcaaattcttgttggttttgtgctgcttgcctttctagatctgctcatcagcacttaaccttccctcctctaaaggttactaaagaagcctgaagtaggtaaagagtgctcctcagcttcttatccttccactctttacccagcagatttcattcaatgccttagccaaggagtccagcacctgtctcccctgctaataattgtccttagagatgctagtactttaatccaggtatagcagtttcccgttattttcttgcttgtcgttcccctacatttcctcctgatttcccaagactctctttgtggcttttgagggtcagccaaggagcaggcaagtgagtgaacaatcctcaggaaaagaaggaccattttagcttaacacttccttttttttttttttttttttaagaagaatataggtaaacaggtaatgattcttgattggagataccatttgactcttgatgagagttgtacgaagatggaaatgagggatgattccaggcgttttagggggaaggctgcagataccattctaacccccaagatactgtgttctcaagacctcttagaactaggtgttgtcagggataatttgaggagggcttagtcttcagaacaatcctgcagtcttgacagaaatctaaaatctccaaaaactcctaccctttaaccttaccctagggggaactgatctatgaatattacatgtgtgattatgaaaggtgaagttgagtgagaggagttgaggaacgtggaagacagtgagctctcaccctaacactataagaagcatgatctcaatagaccaataattcacctttttatacatctgtaaataaatggaatgtttttaagaatataattatgtcagatttagcattttcttttatatattaaatatatatatctttccttttctgctttcgaaaagtgactatttttttagaaatctaagaacagaagtttggtgattgaaaggtagaatatataaacctgaaataaagcagttaaaacaattaaagcag

SEQ ID NO: 62513 - DNA, 9198 bp, Artificial Sequence
  derived and/or modified sequence
atggaagagaaacagcaaatcattctggccaatcaggacggcggcactgtggcgggcgcagctcccacatttttcgtcattctcaagcagcccggcaacggcaagactgatcagggaatattagtcacgaaccaggacgcctgcgcccttgctagcagtgtgtcctctcccgttaagagcaagggcaagatctgcctacccgccgactgcacagttggcggcattacagttaccctcgataacaatagcatgtggaatgagttctaccatagaagcacagaaatgatccttaccaaacaggggcgccggatgttcccttactgtaggtattggattacaggtctcgacagtaacctgaagtatatcctggttatggacatcagtccagtcgacaatcaccgctataaatggaacgggaggtggtgggagccttcagggaaggcagagccccacgtgcttggcagggtgttcatccaccccgagtccccatccacaggacactattggatgcaccaacctgtgagtttttacaagctgaaactgacaaacaataccctggaccaggagggacacattatcctgcatagcatgcaccgatacttacctcgcctgcacctagtgccagctgagaaggctgtggaagtaatccagctcaacggccctggagttcacaccttcacattcccacagaccgagtttttcgccgtgactgcgtaccaaaatattcaaatcacccagttgaagattgactataatccctttgcaaagggattcagggacgacgggctgaacaataaaccccagcgagacggcaaacagaagaacagttcagatcaggagggaaacaacatctcctcctcttctggccacagggtgaggctaactgagggacaaggctccgagatacagcccggagatctcgatccccttagccgaggacatgaaaccagcgggaaaggtcttgaaaagaccagcctgaatattaaacgcgacttcctcgggttcatggacactgactctgccttgtccgaagtgccacaattaaagcaagaaatcagcgaatgcctaattgcatccagcttcgaggatgattcacgggtagcttctcctctcgaccagaacggatcttttaacgttgtgatcaaagaagagcctctggacgattatgattatgagctgggcgagtgtccagagggagtaacagttaagcaggaggagactgacgaagagacggacgtatacagcaatagtgatgacgatccaatcttggaaaaacagctgaagagacacaataaggtcgataaccctgaagccgaccaccttagttccaagtggctccccagcagccccagtggagtcgcgaaggcaaagatgtttaagctcgatactgggaaaatgccagtggtgtaccttgagccatgcgcggtgacgaggtccacagttaagatctccgaactgccggataacatgttgtctaccagccggaaagataagtcttccatgcttgcagagttggaatatttgcccacttacatcgagaactccaacgagactgccttctgcctggggaaagaaagtgagaacggcctgcgtaaacattcacccgaccttagggtggtccagaaatatcctctgctaaaggagccacaatggaaataccctgacatctctgattccatttcaactgagcgcatcctcgacgattccaaggattccgttggagacagcctgtccggcaaggaagatctggggagaaaacgcactacaatgctcaagattgctacagcggcgaaagttgtgaatgcgaatcaaaatgcatcccctaatgtgccgggcaaacggggcagaccgcgtaaacttaagttatgcaaagctgggcgacctccaaagaacaccggaaaatctttgattagcacgaagaacactcctgtgagtccagggtctacatttccagacgtaaaaccagacttagaggatgttgacggagtgctttttgtttctttcgaaagcaaagaagcgctcgatatacatgctgttgatggtaccaccgaggaatccagtagcttgcaggcttcaaccacaaacgactcaggttatcgggctagaatttcacagctggagaaagaattaattgaggacctcaagaccttgcggcataagcaagtcatccatccagggctgcaggaggtgggtttgaagctaaactccgttgatcctaccatgtccattgatctgaaatacctgggagttcagcttccattagcccccgccacgagttttcctttctggaacttgactggtaccaatccagcatctcccgacgccggttttccattcgtttcccggaccggcaagactaacgattttactaagattaagggctggcgaggcaaatttcactctgccagcgccagcagaaatgagggcgggaattccgagagctcgctgaagaaccgctccgccttttgctcagacaaactagacgagtatctggaaaacgaggggaagctcatggaaacctcaatggggttcagtagtaatgcaccgacctcgcccgtagtgtaccagctgcccacaaaatccacaagttacgtccggaccctggattccgttttgaaaaagcagtctactatctccccaagcactagctactccttaaagccccattcagtgcccccggtctcaagaaaagccaagtcacagaataggcaggctacgttctcaggccgtactaaaagttcatataagtcaatattgccatacccagttagtcctaaacagaaatactcacacgtgatcctcggcgacaaggtgactaaaaacagcagcggaattattagcgagaatcaggccaacaatttcgttgtaccgacgctggatgagaatatatttcctaagcagatttcacttagacaggcacagcagcagcagcaacagcagcaggggtctcggcctcccggcctctccaagagccaggtaaagctgatggatctggaggattgcgccttatgggagggtaagccacgaacctacatcaccgaggaacgggcggatgtgagcttaaccacattgttaactgctcaggcatccctgaaaaccaagccaatacacaccattatccgcaagagagcaccaccatgcaataacgacttctgccgactggggtgtgtatgcagctcactggcacttgaaaagaggcaacctgcacattgcaggcgccccgactgtatgttcgggtgcacgtgcctgaaacggaaagtggtgttagtaaagggcggcagtaaaactaagcattttcaacgaaaggccgcccaccgcgacccggtgttttatgacacccttggcgaagaggctcgggaagaagaagaaggcatccgcgaggaagaggagcaactaaaggagaaaaagaagaggaagaagttggaatatacaatctgcgagacggagcccgaacagccggtgcgacattaccccttgtgggttaaggtggagggcgaggtggaccccgagccagtgtacataccgaccccatctgtaattgagcccatgaagccactgctgctgcctcagcccgaagtactaagccctaccgttaaagggaagctcctcacgggaataaagtccccaaggtcatacacaccaaagccaaatcctgtgatccgggaagaagacaaggaccctgtatatctctacttcgagtccatgatgacctgcgcacgggtgcgggtttatgagcgtaaaaaagaggatcagagacagccatcatccagctcgtccccgtccccaagtttccagcagcagacttcttgccatagttccccggagaatcacaacaatgcgaaagagccagatagcgagcaacagccgctaaagcagctcacttgtgacctggaggacgattccgacaaattgcaggaaaagagttggaaatcgtcttgcaacgagggcgagtcatcatctacctcttatatgcaccagcgatcccctggcggcccgaccaagctgattgagatcatttcagactgcaactgggaagaggatcggaacaagatcctctccatcctatctcagcacattaactcaaatatgcctcaaagcctcaaagtcggatcgtttataatcgaacttgcgtcccagcgcaaaagccgcggcgaaaagaacccaccagtgtatagcagcagggtgaaaatatctatgcctagttgtcaggatcaggacgacatggccgaaaagagtggaagcgaaacgccagacggacccttaagccccggcaagatggaggatatctcaccggttcagacagatgcactcgactccgtgcgggagcggctccatggcggtaagggccttccattctacgccgggttgtcccccgctggaaaactggttgcgtacaaacgtaaaccctcatcgtccacctccggtttgattcaggtcgcaagtaacgctaaagtagctgctagtcggaaaccaaggaccctgctaccatccacatccaactccaaaatggcatccagctcaggtacggctaccaataggcccgggaagaacctgaaggcctttgtgcccgccaagagacccatcgcggctcggccatcccccggtggtgtgtttactcagtttgtgatgtcaaaagtgggtgctttacaacagaagataccaggtgtgagcactccccagactctagcgggtacacagaagttctctatccgaccaagcccagtgatggtggtgacccccgtcgtttctagcgagcccgtacaagtttgcagccccgtcacagctgccgtaaccactaccacacctcaggtttttctggaaaacactacagctgtgacccccatgacagcaatctcagacgtcgagactaaggagactacttactcctctggagccacaactactggtgtcgttgaagtgagcgagaccaacacgtccacttccgtgacatccactcagtccacagctaccgtgaacctgacaaagactacaggcattaccacacccgtcgcttctgtcgcgtttcctaaatcgctggttgccagtccgagcacgattactctgcccgtcgcatcgaccgccagtacatctctggtggtggtgaccgctgctgcctcctcatctatggtcacaaccccaacaagttcacttggttccgtcccaattatcctttctggcatcaatgggtcccctcctgtatcccagcgacctgagaatgccgcccagatcccagttgctaccccgcaagtgtcacccaataccgttaaacgcgctggcccccgtctactcctgatccctgtccagcaagggagtcctactctgcgacccgtgagcaacacacagttgcaaggccacagaatggtcctgcagccagtgcgtagcccctccggtatgaatctgttcaggcaccccaacggccagatagtgcagctgctaccactgcatcagctgcgggggagcaatacccagccaaatctgcagccagttatgttccggaaccccggcagtgtgatgggcattcggctccccgctccaagtaaacccagcgaaacccctccaagctctactagttccagcgccttctctgtgatgaatcccgtcatacaagccgtgggttcctcgtccgccgttaacgtcatcacccaggcgcccagcctgctgtccagcggtgcgagctttgtcagtcaagcgggcaccctcaccttacgaataagccctcccgaaccccagagttttgcgtccaagacaggctccgaaacaaagatcacatatagcagcggcgggcagcctgtcgggactgcgagcctgattcccctccagagcgggagctttgcactgctccagctgcctggtcagaagcctgtgccatcttcgattctgcaacacgtggcaagtctgcagatgaagcgggagtcacagaatcccgaccaaaaagatgagaccaactcaataaaaagggaacaggagaccaaaaaggtattacagtcagaaggagaggccgtagacccggaggccaatgttattaagcagaactcgggggctgctacatcagaggagaccttgaacgacagcttagaagaccgtggcgatcatttggacgaagagtgcttacccgaggagggctgtgctaccgtgaaaccctcagagcattcctgcattaccggctcccataccgaccaagattataaggacgtgaatgaggagtatggggcacggaaccggaaaagctccaaggaaaaagttgctgtgctcgaggtgagaacaatcagcgagaaagcttctaataagaccgtacaaaacctgagcaaagtgcagcaccaaaagttgggtgacgttaaggtagagcaacagaagggatttgataacccggaagaaaacagctctgaatttccggtgacgttcaaggaagagtcaaagtttgagctttcagggtctaaggtgatggagcagcagagcaaccttcaacccgaggcaaaggagaaggagtgcggagactcactcgagaaggatagggaacgttggaggaaacatctgaagggccctttaacccggaagtgtgtgggagcttcccaggagtgtaagaaggaggctgatgaacagctcatcaaagagacgaagacctgtcaggaaaacagtgacgttttccaacaggagcaggggatttcagacctgttgggaaaatcaggcatcactgaggatgcccgtgtgcttaagaccgagtgcgattcctggagtcggatcagcaatcccagtgcattctcgattgtgccacgacgggcagccaagtcatcacgaggaaacggccacttccaagggcatctgctgctcccaggtgaacagatccaacctaagcaagagaagaagggcggacgtagtagcgccgacttcaccgtgctggacctggaggaggatgacgaggatgacaatgagaagaccgatgactccatcgatgagatcgtcgatgtagtgagtgattatcaatccgaagaggttgatgacgtcgagaagaataattgtgtggagtatatcgaggatgacgaggaacacgttgacatcgagacagtggaggaactctctgaggaaataaacgtggcccacctgaagactaccgcagcccacactcaaagctttaagcaacccagctgcacacatatatcggcggacgaaaaggctgctgagaggtctcggaaagctccaccaataccactgaaactcaagccagattattggagtgacaaactccagaaggaagccgaggcatttgcttactacagacgcacacatactgccaacgaacgcagaagacggggagagatgagggatttgtttgaaaagctgaaaataacattgggtctcctgcatagttccaaggtgtctaaatccctcatattgacgcgggcgttttccgagattcaaggactgaccgatcaggcggacaaacttattgggcaaaagaacctgctgacacgcaagcggaatatcctaattcggaaggtgtctagcctgtcaggtaagaccgaagaggtggttctgaaaaaactggagtacatctacgccaagcagcaagctctggaggcgcagaaacgtaagaagaaaatgggaagcgatgagttcgacatctcgccgcgcattagcaagcagcaggaaggcagcagcgcctcgtctgtggaccttggtcagatgttcataaataatcgacgcggcaagcccctcatcctgtctcggaaaaaggaccaggccaccgaaaatacatcccctcttaacaccccacatacatccgccaacttggtcatgacaccccagggccagctgctgactctgaaagggcccctctttagtggacccgtcgtggctgtctcgcccgatctgctcgagtccgacctgaaaccccaagtcgccgggagcgccgtggccctgcccgaaaatgacgacttgtttatgatgcctagaattgtcaacgttacaagcctggctacagagggcggcttggtggacatgggaggtagtaagtacccgcatgaagtgcccgacagtaaaccctctgatcacttgaaagatacggtgcgcaacgaggacaacagtctggaggataaggggagaatcagctcacgtggcaaccgggacggccgagtgaccctcggccctacacaggtcttcctcgccaataaagacagcggatatcctcagattgtagacgttagtaatatgcagaaggcacaagagtttttaccaaaaaaaattagtggtgatatgaggggcatccagtacaaatggaaggagtctgaatctcgcggtgaacgggttaagagcaaggattccagtttccataagctgaagatgaaagatttaaaagacagctcaatcgagatggaattacggaaagtgaccagcgccatagaggaggcggcgcttgactcctctgagctccttaccaacatggaggatgaggacgacaccgacgagaccctgacatccttgctgaatgaaattgccttcctgaatcagcaacttaatgatgatagtgttgggcttgccgagctgccctcaagcatggatacagagttccctggcgatgcccgccgagcctttatttccaaagtgccacctggctcccgtgcaacgttccaggtggaacatttgggcacgggcctgaaggagctacctgatgtccagggggagagcgactctattagccctttgctcttgcacctggaggacgatgattttagcgaaaacgagaagcagctagccgagcccgcctctgagcccgatgtgctaaagattgtgattgacagtgaaattaaggatagcctcctaagcaataaaaaggcaattgacggaggcaagaacacatcaggcctcccggccgagcccgagtccgtcagcagcccaccgactctccacatgaaaaccggactggaaaatagcaattccactgatactctgtggaggcctatgcccaagctagccccactcggactgaaagtagccaatccaagcagcgatgccgacggccaatcactgaaagtgatgccatgcctggcgcccattgccgccaaggtgggatctgtgggacataaaatgaatcttacagggaacgatcaagaggggcgagagtctaaagtaatgcctacactcgcgcccgtggtggctaagttagggaactccggagcgtctccatcatcggcgggcaaatag

SEQ ID NO: 62514 - DNA, 9081 bp, Artificial Sequence
  derived and/or modified sequence
atggaagagaagcagcagattatccttgcaaatcaggacggagggaccgttgccggcgcagctcccacattcttcgtcatacttaagcagcccggaaacgggaagacagatcagggaattcttgtcactaatcaagacgcatgtgctttagcctcttctgtgtctagtcccgtgaaatctaaaggaaaaatctgtctgccggcagattgtaccgtgggagggatcacagttactctggacaacaacagtatgtggaacgagttctatcaccggtccaccgaaatgatcctgacgaaacagggaaggaggatgttcccctactgtcgctattggattacgggactagattctaatctcaagtacattctggtcatggatattagtcctgtcgacaaccaccggtataagtggaatggccgctggtgggaacccagcggcaaggcagagccgcacgtcctcggtagagtcttcattcacccagagtctccgtccactgggcattactggatgcaccagcccgtcagcttctataagctcaaattaactaataacacactggatcaggaaggccatattatcctgcacagcatgcacagatatctgccaagactgcatttggtgcccgccgagaaggcagtagaggtgatccagctgaacggccccggcgtgcacacgttcacgtttccccagacagaattttttgcagtaacagcttatcagaacatacagatcacccagttgaaaatcgattacaacccattcgccaagggttttagggacgacgggctcaataacaagcctcaacgggacgggaagcaaaaaaattccagtgatcaggaaggcaacaatatcagctcttccagcggacaccgggtcagacttacagaagggcagggatcagaaatccagccaggagacctggaccctctgtcaagaggtcatgagacatccggcaaaggcttagagaaaaccagcctcaatattaagcgagatttccttgggtttatggacactgactcggctctgtcagaagttcctcaactgaagcaggagatctctgagtgtcttattgcttcctcctttgaagatgatagtagagttgctagtcctcttgaccaaaacgggtcattcaatgtcgtcataaaggaggaaccattagacgattatgactacgagcttggggaatgccctgaaggggtcacagttaagcaggaggagacggacgaggagaccgacgtgtatagcaattcagatgacgaccccattctggagaagcagctcaagcgacacaataaggtagacaatcccgaggccgaccatctaagtagcaaatggctcccctcctctccctccggagtggccaaggccaaaatgttcaaactggacaccggaaaaatgcccgtggtctacttggagccgtgcgctgtgacccgatctaccgttaagatttctgaactgcccgataacatgctttccacttctagaaaagataagagcagcatgctcgctgagctggagtacctgcctacctacatcgagaactccaacgaaacagccttttgtttaggtaaggagagtgagaatgggctgcgtaagcattcccccgatctacgcgtggtgcagaaatacccgctgttgaaggagcctcaatggaaataccctgatatctccgacagtattagcacagagcgtattctcgatgactccaaagattctgtcggtgattccttatccggaaaggaggatttaggtcggaagaggactactatgctcaagattgctactgccgcaaaagttgtaaacgccaatcagaacgcatcccctaatgttcctggaaagagaggtcgtccacgaaagctaaaactgtgtaaagccggccgtcctccaaagaacacggggaagtcattgatttctacaaaaaacacgccggtttcccctgggtcaacctttcccgatgtgaagcctgatcttgaggacgtcgatggggtgctgttcgtgtcttttgaaagcaaagaggccctcgatatccacgctgtggacgggaccacagaggagagcagcagcctccaggcatccactacgaatgatagtggatatagagcccgcataagtcagctcgaaaaggaactgattgaagacttgaaaacactgcgacataaacaggttattcatcccggactccaggaagtgggtctgaaactgaatagcgttgatcctacgatgagcatcgatttgaaatacttaggggtccagctgccacttgcgcctgccaccagtttccctttctggaacctcacgggtacaaaccctgcctcacctgatgccggcttcccattcgtgagccgaaccgggaagaccaacgacttcaccaagatcaaaggttggcgcggaaaattccactctgcatcggccagcagaaatgaggggggcaattcagaatcatccctgaagaacagatcagccttttgcagcgataagttggacgagtacctggagaatgaaggaaagctgatggagacctccatggggttctcttccaatgcccccacttccccggtcgtgtatcaactgcctaccaagtcaacctcatacgtgcggaccctggactccgttctgaagaaacagtccacaatctcaccttcaacctcttactccctgaagccacatagtgtgccccctgtgtccagaaaagctaaaagccagaacaggcaggctactttctccggccgcacaaagtcctcctacaagagcatcttgccctaccctgtgtcacccaagcagaaatactcccacgtaatccttggggacaaagtaacgaaaaattcttccggcatcatctctgaaaaccaggccaacaacttcgtcgtgcccaccttggacgagaatattttcccaaagcagatatccctgcgtcaggctcagcaacaacaacagcagcaacagggctcccgccccccaggactttctaaatcacaggtcaaactgatggatcttgaagattgtgccttgtgggaaggcaaaccacgaacttacattacagaggaaagggccgatgtgagtcttaccaccctcctgactgcccaggcttcgttaaagaccaagcccatacacactattattcggaagcgggcccctccttgcaacaatgacttttgtcgactgggatgtgtctgttcctctctggctctggagaagagacaacccgcacattgtcgtaggccggactgtatgttcggctgcacctgtctgaagaggaaggtggtcctggtcaaaggcggaagtaagactaaacacttccagaggaaagccgctcatcgtgaccctgtattctatgatacgctgggcgaggaggctcgcgaggaagaggaaggcattcgagaggaggaagagcagttgaaagaaaagaaaaagagaaagaagctagagtacacaatatgcgaaacggaaccagaacaaccagtgcgacactacccactctgggtcaaggtggagggcgaggtggaccctgagccagtgtatataccaacaccctctgtcatcgagcccatgaagccgctgttgttaccgcagcccgaggtgctcagtcctactgttaaaggtaaattactgacaggcattaagtctcctagatcctatacacccaagccgaatcctgtgatcagggaagaggacaaggatccagtttatttgtattttgagtcgatgatgacttgtgcccgcgtgcgcgtatatgagcgaaagaaggaggaccaacggcagccgtcttcatcatcttcgccctctccctcctttcagcaacagacgtcatgccatagtagtccggagaaccacaataacgccaaagaacctgacagtgagcaacagccactgaagcaactaacgtgtgacctcgaagacgatagcgataagttacaggagaaaagctggaagagctcctgtaatgaaggagaaagtagctccacatcctacatgcatcaacgtagtccaggaggacctaccaagctcattgagataatttctgattgcaactgggaggaggacagaaacaaaattttaagtattctcagccagcacatcaactcgaatatgcctcagagcctcaaagtcgggagctttatcatagaactcgcatcccagaggaaaagtcgaggcgaaaagaacccgccagtgtactcgtctcgcgtgaagatctctatgccatcttgtcaggaccaggatgatatggccgagaagagcggctcagaaacaccggatgggcccctctcccccggcaagatggaggatatttcccctgtacagaccgatgcactggacagcgtgcgggagcggctgcatggagggaagggccttcctttctacgctggcctatcacccgcgggaaaactcgtcgcatataagaggaagccaagttctagtacatccgggttgatacaggtggcctcaaacgcaaaagtcgccgcctcccgaaaaccccgaacgctcttgcctagtacttccaacagcaagatggctagcagctccgggaccgctactaaccgacccggaaagaacctgaaagcttttgtgcccgccaaacgcccaatcgctgcaagaccttctccaggaggagtgttcacacagtttgttatgagcaaagttggtgcgctgcaacaaaaaattccgggggtgagtaccccacagacactggccggaacccaaaaattttccatcagaccctctcccgtcatggtggtgactcctgttgtgagctccgaacctgttcaggtttgtagtcctgtcaccgccgccgttaccactaccaccccgcaggtttttctggagaacaccacagcagtcacaccaatgacggcgatttctgatgtagaaaccaaagaaacaacatattcatccggagcaacaactactggcgtagtcgaggtgtcagagaccaacactagcacaagtgtgaccagcacccagtctacagcgaccgtgaacctgacaaagactactggcattaccaccccagtggccagcgtagctttcccgaagagtcttgtggcaagcccaagtactattactctgcctgtcgccagcaccgcatcaaccagcctcgttgtggtaaccgcagccgcctccagcagcatggtcaccacacccactagctctctcggctctgtgcctattatactgagtggaattaacggttcaccgcccgtctcccagcgtcctgagaacgccgcccagatccccgtggcgaccccacaggtctcccctaacacagtgaagagggccgggccccggttattgcatcctaacggacagatcgtacagttgctgcctctgcaccaattgcgcggctctaatacacaaccaaatcttcaacccgtgatgttcaggaacccaggatcggtgatgggaattcgcttacctgctccaagcaagccaagtgaaactccacccagttctacgtcaagcagcgctttcagtgtcatgaacccagtgatacaggctgtgggtagctcatccgccgtgaatgtgattacacaggcaccaagcctcctctcttccggagcctccttcgtgtcccaggctgggacacttacccttcgcatttcgccgcccgagccacagtcttttgcaagtaagaccggctcagaaacaaagataacctactctagtgggggccagccggtaggcaccgccagcctgataccactacaaagtggcagtttcgcattactgcagttacccggacaaaagcctgtaccaagcagcatcctgcagcacgtcgccagccttcagatgaagagggaaagtcagaacccagaccagaaagatgaaacaaacagtatcaagagagagcaagaaacaaaaaaggtgctccagtctgaaggagaggcagtcgacccagaagctaatgtgattaagcaaaattcaggagctgccacttccgaagaaacactgaacgacagccttgaggatcgaggcgaccaccttgatgaagaatgcttaccagaggagggatgtgcaactgtgaagccttctgagcactcctgcatcactgggtctcacacagaccaggactacaaggacgttaatgaagaatacggcgctcgcaaccggaaatcctctaaagaaaaagtggcggtattggaagtgagaacaatttctgagaaagcctctaacaagactgtacagaatctatcgaaagtgcaacaccagaaattgggcgatgtgaaagtggaacaacaaaaaggatttgataatcccgaggaaaattctagcgaattccccgtcacattcaaggaggagagtaaattcgaactttccggaagcaaggtgatggagcagcagagcaaccttcagcccgaagccaaagaaaaggagtgcggagactctttggagaaggatagggagcggtggaggaagcacttaaaaggccctttaacgcgaaagtgcgttggcgcttcgcaagagtgtaaaaaggaagcagatgagcagttaatcaaagaaaccaaaacctgccaggagaattccgacgttttccagcaggagcaggggataagcgatctattggggaaatccggcatcactgaagacgccagggtccttaagactgagtgcgattcttggtcgagaatttccaatccctctgccttcagcatagtgccacgtagagctgcaaagagctcacgaggaaacggccacttccaggggcacctgttgctcccgggtgagcaaattcaaccaaagcaggaaaaaaaaggtggccgctcctctgcggattttacagtgctcgacctggaggaggatgatgaagacgacaacgaaaagactgatgatagcattgatgaaatcgtggatgtggttagcgactaccagagtgaggaggtggacgacgtcgagaagaataactgtgtggagtacatagaggacgatgaggaacatgtggatattgagaccgttgaagagctctcagaggagatcaacgtcgcacaccttaaaaccacagctgcacacacgcagagcttcaaacaacctagttgtacccatatctcagctgatgagaaggctgcagagaggagtcgtaaggctccacctattccactcaaactgaagcccgattattggtccgacaaactgcagaaggaggccgaagcatttgcatactaccgacggactcacaccgctaatgagcggcgtcggagaggtgagatgcgcgatttgttcgagaaactgaagatcactctgggcctgctgcactcttctaaggtcagcaaaagtctgatcctgacgcgggccttttcagagatccagggattgaccgaccaagccgataaattgatcgggcagaagaacttgctgacccgcaaaagaaatatcttgataaggaaggtgagctcactctcagggaagacagaggaggttgtattaaagaaacttgagtatatttacgcaaagcagcaggcactcgaggctcagaagagaaagaagaagatggggagtgacgagttcgacattagccccaggatctcgaagcagcaggaggggagttctgcgtcttcggtggacttgggtcagatgtttattaataatcggcgggggaagcctctcatcctgtctcggaagaaggatcaggctactgagaatacttcacctcttaatacgccacacacaagcgccaatctggttatgaccccccagggacagttactcactctaaaggggccactgtttagcggtcccgtggtcgccgtgagccctgacttgctggagtctgacctgaaacctcaggtggcgggtagcgcggtggcactacctgagaatgatgacctatttatgatgccacgaatagtcaacgttacatctctggccaccgagggggggctggttgacatgggcggaagcaaataccctcacgaagtacctgattccaaaccaagcgatcatctcaaggacaccgtccgcaatgaggataacagtctggaggataaaggccggatctcatcgcgtggtaacagagatgggagggtaaccttgggccctacacaggtgtttctggctaataaggactcgggttacccccaaatcgtggacgtcagcaacatgcagaaagcacaggaatttctgcccaaaaagatcagtggcgatatgcgagggattcagtacaagtggaaggagagcgagtcgaggggtgagcgagtcaagtcaaaggactcttccttccataaactcaagatgaaggatctcaaggacagctccatagagatggagttacgcaaggtcacttccgctatcgaagaggctgccctcgatagttctgagcttctgacaaatatggaagatgaggatgatacagatgaaactctgactagcctgctaaatgagattgctttcctgaaccaacagctgaatgacgattcagtggggctggccgagcttcctagttctatggatacggagtttccgggtgacgcgcgacgcgcctttatcagtaaggtgccgccaggcagtcgagctacgttccaagtagaacatctgggcacaggtcttaaggagctcccagatgtccagggcgaaagcgactcgatcagtcccctgttgctgcatctcgaagatgacgacttctccgagaacgaaaagcagctcgctgaacccgcttcagaacctgacgtgctgaagatcgtaatcgactccgaaattaaggactcactgctctcgaacaagaaagcaatcgatgggggaaaaaacacttcagggctgcctgccgaacccgagagtgttagctcaccacccacattacacatgaaaaccgggctcgagaacagcaatagcacagatacattatggcgccctatgccaaaactggctcccctcggcctgaaggtggccaacccctcttctgacgctgacgggcagtctctgaaggttatgccatgtctagctccaatcgccgctaaagtcggtagcgtgggccacaagatgaacctgaccggtaatgaccaggaaggcagagaaagtaaagttatgcccaccctagcaccagttgtggcgaagctggggaattccggagcgagcccctccagcgccggcaagtag

SEQ ID NO: 62515 - DNA, 9198 bp, Artificial Sequence
  derived and/or modified sequence
atggaggagaagcagcagatcatcctggccaaccaggacggcggcaccgtggccggggccgcccccaccttctttgtgatcctgaagcagcctggaaatggcaagacagaccagggcatcctggtgaccaaccaggatgcctgtgccctggccagctctgtgagcagccctgtgaagagcaagggcaagatctgcctgcctgctgactgcaccgtgggcggcatcaccgtgaccctggacaacaacagcatgtggaatgagttctaccacaggagcacagagatgatcctgaccaagcagggccgcaggatgttcccctactgccgctactggatcaccggcctggacagcaacctgaagtacatcctggtgatggacatcagccctgtggacaaccaccgctacaagtggaatggccgctggtgggagcccagcggcaaggccgagccccacgtgctgggccgggtcttcatccaccctgagagccccagcacaggccactactggatgcaccagcctgtgtccttctacaagctgaagctgaccaacaacaccctggaccaggagggccacatcatcctgcacagcatgcaccgctacctgccccggctgcacctggtgcctgctgagaaggctgtggaggtgatccagctgaatggacctggggtgcacaccttcaccttcccccagacagagttctttgctgtgacagcctaccagaacatccagatcacccagctgaagattgactacaacccctttgccaagggcttcagagatgatggcctgaacaacaagccccagagagatggcaagcagaagaacagcagtgaccaggagggcaacaacatcagcagcagcagcggccaccgggtgcggctgacagagggccagggcagcgagatccagcccggggacctggaccccctgagccggggccacgagaccagcggcaagggcctggagaagaccagcctgaacatcaagagggacttcctgggcttcatggacacagacagcgccctgtctgaggtgccccagctgaagcaggagatcagcgagtgcctgattgccagcagctttgaagatgacagccgggtggccagccccctggaccagaatggcagcttcaacgtggtgatcaaggaggagcccctggatgattatgactatgagctgggagaatgtcctgagggcgtgacagtgaagcaggaggagacagatgaggagacagatgtgtacagcaacagtgatgatgaccccatcctggagaagcagctgaagaggcacaacaaggtggacaaccctgaggccgaccacctgagcagcaagtggctgcccagcagccccagcggcgtggccaaggccaagatgttcaagctggacaccgggaagatgcctgtggtgtacctggagccctgtgctgtgaccaggagcacagtgaagatcagcgagctgcctgacaacatgctgagcaccagcaggaaggacaagagctccatgctggccgagctggagtacctgcccacctacatcgagaacagcaatgaaacagccttctgcctgggcaaggagagtgaaaatggcctgaggaagcacagcccagacctgcgggtggtgcagaagtaccccctgctgaaggagccccagtggaagtacccagacatcagtgacagcatcagcacagagcgcatcctggatgacagcaaggacagcgtgggggacagcctgagcggcaaggaggacctgggcaggaagaggaccaccatgctgaagatcgccacagctgccaaggtggtgaatgccaaccagaatgccagccccaacgtgcctgggaagaggggccggcccaggaagctgaagctgtgcaaggccggccggccccccaagaacacaggcaagagcctcatcagcaccaagaacacccctgtgtccccaggcagcaccttcccagatgtgaagccagacctggaggatgtggatggagtgctgtttgtgtcctttgagagcaaggaggccctggacatccatgctgtggatggcaccacagaggagagcagcagcctgcaggccagcaccaccaatgattctggctaccgggcccgcatcagccagctggagaaggagctgattgaggacctgaagaccctgcggcacaagcaggtgatccaccctggcctgcaggaggtgggcctgaagctgaacagcgtggaccccaccatgagcattgacctgaagtacctgggcgtgcagctgcccctggccccagccaccagcttccccttctggaacctgaccggcaccaacccagccagcccagatgctggcttcccctttgtgtccaggacaggcaagaccaatgacttcaccaagatcaagggctggaggggcaagttccacagcgccagcgccagcagaaatgaaggaggcaacagcgagagcagcctgaagaacagaagtgccttctgcagcgacaagctggatgagtacctggagaatgaaggcaagctgatggagacctccatgggcttcagcagcaatgcccccaccagccctgtggtgtaccagctgcccaccaagagcaccagctatgtgaggaccctggacagcgtgctgaagaagcagagcaccatcagccccagcaccagctacagcctgaagccccacagcgtgccccctgtgtccaggaaggccaagagccagaaccggcaggccaccttcagcggccgcaccaagagcagctacaagagcatcctgccctaccctgtgagccccaagcagaagtacagccacgtgatcctgggggacaaggtgaccaagaacagcagcggcatcatcagcgagaaccaggccaacaactttgtggtgcccaccctggatgagaacatcttccccaagcagatcagcctgcggcaggcccagcagcagcagcagcagcagcagggcagcaggcctcctggcctgagcaagagccaggtgaagctgatggacctggaggactgtgccctgtgggagggcaagcccaggacctacatcacagaggagcgggcagatgtgtccctgaccaccctgctgacagcccaggccagcctgaagaccaagcccatccacaccatcatcaggaagagggccccaccctgcaacaatgacttctgccgcctgggctgtgtgtgcagcagcctggccctggagaagaggcagcctgcccactgccggcggccagactgcatgtttggctgcacctgcctgaagaggaaggtggtgctggtgaagggcggcagcaagaccaagcacttccagaggaaggccgcccaccgggaccccgtcttctatgacaccctgggggaggaggcccgggaggaggaggagggcatccgggaggaggaggagcagctgaaggagaagaagaagaggaagaagctggagtacaccatctgtgaaacagagcctgagcagcctgtgcgccactaccccctgtgggtgaaggtggagggggaggtggaccctgagcctgtgtacatccccacccccagcgtcatcgagcccatgaagcccctgctgctgccccagcctgaggtgctgagccccaccgtgaagggcaagctgctgaccggcatcaagagccccaggagctacacccccaagcccaaccctgtgatccgggaggaggacaaggaccctgtgtacctgtactttgagagcatgatgacctgtgcccgggtgcgggtgtatgaaaggaagaaggaggaccagaggcagcccagcagcagcagcagccccagccccagcttccagcagcagaccagctgccacagcagccctgagaaccacaacaatgccaaggagccagattctgagcagcagcccctgaagcagctgacctgtgacctggaggatgacagcgacaagctgcaggagaagtcctggaagagcagctgcaatgaaggagagagcagcagcaccagctacatgcaccagaggagccctgggggccccaccaagctgattgagatcatcagtgactgcaactgggaggaggacaggaacaagatcctgagcatcctgagccagcacatcaacagcaacatgccccagagcctgaaggtgggcagcttcatcatcgagctggccagccagaggaagagcagaggagagaagaacccccctgtgtacagcagccgggtgaagatctccatgcccagctgccaggaccaggatgacatggccgagaagagcggcagcgagaccccagatggccccctgagccctgggaagatggaggacatcagccctgtgcagacagatgccctggacagcgtgcgggagcggctgcatggaggcaagggcctgcccttctacgccggcctgagccctgctgggaagctggtggcctacaagaggaagcccagcagcagcaccagcggcctcatccaggtggccagcaatgccaaggtggccgccagcaggaagcccaggaccctgctgcccagcaccagcaacagcaagatggccagcagcagcggcacagccaccaacagacctgggaagaacctgaaggcctttgtgcctgccaagaggcccatcgccgcccggcccagccctgggggcgtcttcacccagtttgtgatgagcaaggtgggcgccctgcagcagaagatccctggggtgtccaccccccagaccctggccggcacccagaagttcagcatccggcccagccctgtgatggtggtgacccctgtggtgagcagcgagcctgtgcaggtgtgcagccctgtgacagctgctgtgaccaccaccaccccccaggtgttcctggagaacaccacagctgtgacccccatgacagccatcagtgatgtggagaccaaggagaccacctacagcagcggggccaccaccactggagtggtggaggtgtctgagaccaacaccagcacctctgtgaccagcacccagagcacagccaccgtgaacctgaccaagaccaccggcatcaccacccctgtggcctctgtggccttccccaagagcctggtggccagccccagcaccatcaccctgcctgtggccagcacagccagcaccagcctggtggtggtgacagctgctgccagcagctccatggtgaccacccccaccagcagcctgggctctgtgcccatcatcctgagcggcatcaatggcagcccccctgtgtcccagaggccagaaaatgctgcccagatccctgtggccaccccccaggtgagccccaacacagtgaagagagctggcccccggctgctgctgatccctgtgcagcagggcagccccaccctgcggcctgtgagcaacacccagctgcagggccacaggatggtgctgcagcctgtgcgcagccccagcggcatgaacctcttccgccaccccaacggccagatcgtgcagctgctgcccctgcaccagctgcggggcagcaacacccagcccaacctgcagcctgtgatgttcaggaaccctggctctgtgatgggcatccggctgcctgcccccagcaagcccagcgagaccccacccagcagcaccagcagcagcgccttctctgtgatgaaccctgtgatccaggccgtgggcagcagcagcgctgtgaatgtcatcacccaggcccccagcctgctgagcagcggggccagctttgtgtcccaggccggcaccctgaccctgcgcatcagccccccagagccccagagctttgccagcaagacaggcagcgagaccaagatcacctacagcagcggcggccagcctgtgggcacagccagcctcatccccctgcagagcggcagctttgccctgctgcagctgcccggccagaagcctgtgcccagcagcatcctgcagcacgtggccagcctgcagatgaagcgggagagccagaacccagaccagaaggatgagaccaacagcatcaagcgggagcaggagaccaagaaggtgctgcagagcgagggggaggccgtggaccctgaggccaacgtcatcaagcagaacagcggggccgccaccagcgaggagaccctgaatgacagcctggaggacagaggagaccacctggatgaagaatgtctgcctgaggagggctgtgccaccgtgaagcccagcgagcacagctgcatcaccggcagccacacagaccaggactacaaggatgtgaatgaggagtatggagccaggaacaggaagagcagcaaggagaaggtggccgtgctggaggtgaggaccatcagcgagaaggccagcaacaagacagtgcagaacctgagcaaggtgcagcaccagaagctgggagatgtgaaggtggagcagcagaagggctttgacaaccctgaggagaacagcagcgagttccctgtgaccttcaaggaggagagcaagtttgagctgagcggcagcaaggtgatggagcagcagagcaacctgcagcctgaggccaaggagaaggaatgtggggacagcctggagaaggaccgggagcgctggaggaagcacctgaagggccccctgaccaggaaatgtgtgggcgccagccaggagtgcaagaaggaggctgatgagcagctgatcaaggagaccaagacctgccaggagaacagtgatgtgttccagcaggagcagggcatcagtgacctgctgggcaagagcggcatcacagaagatgcccgggtgctgaagacagaatgtgacagctggagccgcatcagcaaccccagcgccttcagcatcgtgccccggcgggccgccaagagcagcagaggaaatggccacttccagggccacctgctgctgcctggagagcagatccagcccaagcaggagaagaagggcggccgcagcagcgctgacttcaccgtgctggacctggaggaggatgatgaagatgacaatgagaagacagatgacagcattgatgaaattgtggatgtggtgtctgactaccagagcgaggaggtggatgatgtggagaagaacaactgtgtggagtacattgaagatgatgaggagcacgtggacatcgagaccgtggaggagctgtctgaggagatcaacgtggcccacctgaagaccacagctgcccacacccagagcttcaagcagcccagctgcacccacatctctgcagatgagaaggctgctgagaggagcaggaaggccccacccatccccctgaagctgaagccagactactggagcgacaagctgcagaaggaggccgaggcctttgcctactacagaaggacccacacagccaatgaaagaagaagaagaggagagatgagggacctgtttgagaagctgaagatcaccctgggcctgctgcacagcagcaaggtgtccaagagcctcatcctgacccgggccttcagcgagatccagggcctgacagaccaggccgacaagctgattggccagaagaacctgctgaccaggaagaggaacatcctgatcaggaaggtgagcagcctgagcggcaagacagaggaggtggtgctgaagaagctggagtacatctatgccaagcagcaggccctggaggcccagaagaggaagaagaagatgggcagtgatgaatttgacatcagcccccgcatcagcaagcagcaggagggcagcagcgccagctctgtggacctgggccagatgttcatcaacaacagaagaggcaagcccctcatcctgagcaggaagaaggaccaggccacagagaacaccagccccctgaacaccccccacaccagcgccaacctggtgatgaccccccagggccagctgctgaccctgaagggccccctcttcagcggccctgtggtggccgtgtccccagacctgctggagagtgacctgaagccccaggtggccggcagcgctgtggccctgcctgaaaatgatgacctcttcatgatgcccagaattgtgaatgtgaccagcctggccacagaaggaggcctggtggacatgggcggcagcaagtacccccatgaggtgcctgacagcaagcccagcgaccacctgaaggacacagtgagaaatgaagacaacagcctggaggacaagggccgcatcagcagccggggcaacagagatggccgggtgaccctgggccccacccaggtgttcctggccaacaaggacagcggctacccccagatcgtggatgtgagcaacatgcagaaggcccaggagttcctgcccaagaagatcagcggggacatgaggggcatccagtacaagtggaaggagagcgagagcagaggagagcgggtgaagagcaaggacagcagcttccacaagctgaagatgaaggacctgaaggacagcagcattgagatggagctgaggaaggtgaccagcgccatcgaggaggccgccctggacagcagcgagctgctgaccaacatggaggatgaagatgacacagatgagaccctgaccagcctgctgaatgagatcgccttcctgaaccagcagctgaatgatgattctgtgggcctggccgagctgcccagctccatggacacagagttccctggagatgcccggcgggccttcatcagcaaggtgcccccaggcagccgggccaccttccaggtggagcacctgggcaccggcctgaaggagctgcctgatgtgcagggcgagagtgacagcatcagccccctgctgctgcacctggaggatgatgacttctctgaaaatgagaagcagctggccgagcccgccagcgagccagatgtgctgaagatcgtcatcgacagcgagatcaaggacagcctgctgagcaacaagaaggccattgatggcggcaagaacaccagcggcctgcctgctgagcctgagagcgtgagcagcccccccaccctgcacatgaagacaggcctggagaacagcaacagcacagacaccctgtggaggcccatgcccaagctggcccccctgggcctgaaggtggccaaccccagcagtgatgctgatggccagagcctgaaggtgatgccctgcctggcccccatcgccgccaaggtgggctctgtgggccacaagatgaacctgactggaaatgaccaggagggccgggagagcaaggtgatgcccaccctggcccctgtggtggccaagctgggcaacagcggggccagccccagcagcgctgggaagtag

SEQ ID NO: 62516 - DNA, 9081 bp, Artificial Sequence
  derived and/or modified sequence
atggaggagaagcagcagatcatcctggccaaccaggacggcggcaccgtggccggggccgcccccaccttctttgtgatcctgaagcagcctggaaatggcaagacagaccagggcatcctggtgaccaaccaggatgcctgtgccctggccagctctgtgagcagccctgtgaagagcaagggcaagatctgcctgcctgctgactgcaccgtgggcggcatcaccgtgaccctggacaacaacagcatgtggaatgagttctaccacaggagcacagagatgatcctgaccaagcagggccgcaggatgttcccctactgccgctactggatcaccggcctggacagcaacctgaagtacatcctggtgatggacatcagccctgtggacaaccaccgctacaagtggaatggccgctggtgggagcccagcggcaaggccgagccccacgtgctgggccgggtcttcatccaccctgagagccccagcacaggccactactggatgcaccagcctgtgtccttctacaagctgaagctgaccaacaacaccctggaccaggagggccacatcatcctgcacagcatgcaccgctacctgccccggctgcacctggtgcctgctgagaaggctgtggaggtgatccagctgaatggacctggggtgcacaccttcaccttcccccagacagagttctttgctgtgacagcctaccagaacatccagatcacccagctgaagattgactacaacccctttgccaagggcttcagagatgatggcctgaacaacaagccccagagagatggcaagcagaagaacagcagtgaccaggagggcaacaacatcagcagcagcagcggccaccgggtgcggctgacagagggccagggcagcgagatccagcccggggacctggaccccctgagccggggccacgagaccagcggcaagggcctggagaagaccagcctgaacatcaagagggacttcctgggcttcatggacacagacagcgccctgtctgaggtgccccagctgaagcaggagatcagcgagtgcctgattgccagcagctttgaagatgacagccgggtggccagccccctggaccagaatggcagcttcaacgtggtgatcaaggaggagcccctggatgattatgactatgagctgggagaatgtcctgagggcgtgacagtgaagcaggaggagacagatgaggagacagatgtgtacagcaacagtgatgatgaccccatcctggagaagcagctgaagaggcacaacaaggtggacaaccctgaggccgaccacctgagcagcaagtggctgcccagcagccccagcggcgtggccaaggccaagatgttcaagctggacaccgggaagatgcctgtggtgtacctggagccctgtgctgtgaccaggagcacagtgaagatcagcgagctgcctgacaacatgctgagcaccagcaggaaggacaagagctccatgctggccgagctggagtacctgcccacctacatcgagaacagcaatgaaacagccttctgcctgggcaaggagagtgaaaatggcctgaggaagcacagcccagacctgcgggtggtgcagaagtaccccctgctgaaggagccccagtggaagtacccagacatcagtgacagcatcagcacagagcgcatcctggatgacagcaaggacagcgtgggggacagcctgagcggcaaggaggacctgggcaggaagaggaccaccatgctgaagatcgccacagctgccaaggtggtgaatgccaaccagaatgccagccccaacgtgcctgggaagaggggccggcccaggaagctgaagctgtgcaaggccggccggccccccaagaacacaggcaagagcctcatcagcaccaagaacacccctgtgtccccaggcagcaccttcccagatgtgaagccagacctggaggatgtggatggagtgctgtttgtgtcctttgagagcaaggaggccctggacatccatgctgtggatggcaccacagaggagagcagcagcctgcaggccagcaccaccaatgattctggctaccgggcccgcatcagccagctggagaaggagctgattgaggacctgaagaccctgcggcacaagcaggtgatccaccctggcctgcaggaggtgggcctgaagctgaacagcgtggaccccaccatgagcattgacctgaagtacctgggcgtgcagctgcccctggccccagccaccagcttccccttctggaacctgaccggcaccaacccagccagcccagatgctggcttcccctttgtgtccaggacaggcaagaccaatgacttcaccaagatcaagggctggaggggcaagttccacagcgccagcgccagcagaaatgaaggaggcaacagcgagagcagcctgaagaacagaagtgccttctgcagcgacaagctggatgagtacctggagaatgaaggcaagctgatggagacctccatgggcttcagcagcaatgcccccaccagccctgtggtgtaccagctgcccaccaagagcaccagctatgtgaggaccctggacagcgtgctgaagaagcagagcaccatcagccccagcaccagctacagcctgaagccccacagcgtgccccctgtgtccaggaaggccaagagccagaaccggcaggccaccttcagcggccgcaccaagagcagctacaagagcatcctgccctaccctgtgagccccaagcagaagtacagccacgtgatcctgggggacaaggtgaccaagaacagcagcggcatcatcagcgagaaccaggccaacaactttgtggtgcccaccctggatgagaacatcttccccaagcagatcagcctgcggcaggcccagcagcagcagcagcagcagcagggcagcaggcctcctggcctgagcaagagccaggtgaagctgatggacctggaggactgtgccctgtgggagggcaagcccaggacctacatcacagaggagcgggcagatgtgtccctgaccaccctgctgacagcccaggccagcctgaagaccaagcccatccacaccatcatcaggaagagggccccaccctgcaacaatgacttctgccgcctgggctgtgtgtgcagcagcctggccctggagaagaggcagcctgcccactgccggcggccagactgcatgtttggctgcacctgcctgaagaggaaggtggtgctggtgaagggcggcagcaagaccaagcacttccagaggaaggccgcccaccgggaccccgtcttctatgacaccctgggggaggaggcccgggaggaggaggagggcatccgggaggaggaggagcagctgaaggagaagaagaagaggaagaagctggagtacaccatctgtgaaacagagcctgagcagcctgtgcgccactaccccctgtgggtgaaggtggagggggaggtggaccctgagcctgtgtacatccccacccccagcgtcatcgagcccatgaagcccctgctgctgccccagcctgaggtgctgagccccaccgtgaagggcaagctgctgaccggcatcaagagccccaggagctacacccccaagcccaaccctgtgatccgggaggaggacaaggaccctgtgtacctgtactttgagagcatgatgacctgtgcccgggtgcgggtgtatgaaaggaagaaggaggaccagaggcagcccagcagcagcagcagccccagccccagcttccagcagcagaccagctgccacagcagccctgagaaccacaacaatgccaaggagccagattctgagcagcagcccctgaagcagctgacctgtgacctggaggatgacagcgacaagctgcaggagaagtcctggaagagcagctgcaatgaaggagagagcagcagcaccagctacatgcaccagaggagccctgggggccccaccaagctgattgagatcatcagtgactgcaactgggaggaggacaggaacaagatcctgagcatcctgagccagcacatcaacagcaacatgccccagagcctgaaggtgggcagcttcatcatcgagctggccagccagaggaagagcagaggagagaagaacccccctgtgtacagcagccgggtgaagatctccatgcccagctgccaggaccaggatgacatggccgagaagagcggcagcgagaccccagatggccccctgagccctgggaagatggaggacatcagccctgtgcagacagatgccctggacagcgtgcgggagcggctgcatggaggcaagggcctgcccttctacgccggcctgagccctgctgggaagctggtggcctacaagaggaagcccagcagcagcaccagcggcctcatccaggtggccagcaatgccaaggtggccgccagcaggaagcccaggaccctgctgcccagcaccagcaacagcaagatggccagcagcagcggcacagccaccaacagacctgggaagaacctgaaggcctttgtgcctgccaagaggcccatcgccgcccggcccagccctgggggcgtcttcacccagtttgtgatgagcaaggtgggcgccctgcagcagaagatccctggggtgtccaccccccagaccctggccggcacccagaagttcagcatccggcccagccctgtgatggtggtgacccctgtggtgagcagcgagcctgtgcaggtgtgcagccctgtgacagctgctgtgaccaccaccaccccccaggtgttcctggagaacaccacagctgtgacccccatgacagccatcagtgatgtggagaccaaggagaccacctacagcagcggggccaccaccactggagtggtggaggtgtctgagaccaacaccagcacctctgtgaccagcacccagagcacagccaccgtgaacctgaccaagaccaccggcatcaccacccctgtggcctctgtggccttccccaagagcctggtggccagccccagcaccatcaccctgcctgtggccagcacagccagcaccagcctggtggtggtgacagctgctgccagcagctccatggtgaccacccccaccagcagcctgggctctgtgcccatcatcctgagcggcatcaatggcagcccccctgtgtcccagaggccagaaaatgctgcccagatccctgtggccaccccccaggtgagccccaacacagtgaagagagctggcccccggctgctgcaccccaacggccagatcgtgcagctgctgcccctgcaccagctgcggggcagcaacacccagcccaacctgcagcctgtgatgttcagaaatcctggctctgtgatgggcatccggctgcctgcccccagcaagcccagcgagaccccacccagcagcaccagcagcagcgccttctctgtgatgaaccctgtgatccaggccgtgggcagcagcagcgctgtgaatgtcatcacccaggcccccagcctgctgagcagcggggccagctttgtgtcccaggccggcaccctgaccctgcgcatcagccccccagagccccagagctttgccagcaagacaggcagcgagaccaagatcacctacagcagcggcggccagcctgtgggcacagccagcctcatccccctgcagagcggcagctttgccctgctgcagctgcccggccagaagcctgtgcccagcagcatcctgcagcacgtggccagcctgcagatgaagcgggagagccagaacccagaccagaaggatgagaccaacagcatcaagcgggagcaggagaccaagaaggtgctgcagagcgagggggaggccgtggaccctgaggccaacgtcatcaagcagaacagcggggccgccaccagcgaggagaccctgaatgacagcctggaggacagaggagaccacctggatgaggagtgcctgcctgaggagggctgtgccaccgtgaagcccagcgagcacagctgcatcaccggcagccacacagaccaggactacaaggatgtgaatgaggagtatggagccaggaacaggaagagcagcaaggagaaggtggccgtgctggaggtgaggaccatcagcgagaaggccagcaacaagacagtgcagaacctgagcaaggtgcagcaccagaagctgggagatgtgaaggtggagcagcagaagggctttgacaaccctgaggagaacagcagcgagttccctgtgaccttcaaggaggagagcaagtttgagctgagcggcagcaaggtgatggagcagcagagcaacctgcagcctgaggccaaggagaaggaatgtggggacagcctggagaaggaccgggagcgctggaggaagcacctgaagggccccctgaccaggaaatgtgtgggcgccagccaggagtgcaagaaggaggctgatgagcagctgatcaaggagaccaagacctgccaggagaacagtgatgtgttccagcaggagcagggcatcagtgacctgctgggcaagagcggcatcacagaagatgcccgggtgctgaagacagaatgtgacagctggagccgcatcagcaaccccagcgccttcagcatcgtgcccaggagagctgccaagagcagcagaggaaatggccacttccagggccacctgctgctgcccggggagcagatccagcccaagcaggagaagaagggcggccgcagcagcgctgacttcaccgtgctggacctggaggaggatgatgaagatgacaatgagaagacagatgacagcattgatgagatcgtggatgtggtgtctgactaccagagcgaggaggtggatgatgtggagaagaacaactgtgtggagtacattgaagatgatgaggagcacgtggacattgaaacagtggaggagctgtctgaggagatcaacgtggcccacctgaagaccacagctgcccacacccagagcttcaagcagcccagctgcacccacatctctgcagatgagaaggctgctgagaggagcaggaaggccccacccatccccctgaagctgaagccagactactggagcgacaagctgcagaaggaggccgaggcctttgcctactacagaaggacccacacagccaatgaaagaagaagaagaggagagatgagggacctgtttgagaagctgaagatcaccctgggcctgctgcacagcagcaaggtgtccaagagcctcatcctgacccgggccttcagcgagatccagggcctgacagaccaggccgacaagctgattggccagaagaacctgctgaccaggaagaggaacatcctgatcaggaaggtgagcagcctgagcggcaagacagaggaggtggtgctgaagaagctggagtacatctatgccaagcagcaggccctggaggcccagaagaggaagaagaagatgggcagtgatgaatttgacatcagcccccgcatcagcaagcagcaggagggcagcagcgccagctctgtggacctgggccagatgttcatcaacaacagaagaggcaagcccctcatcctgagcaggaagaaggaccaggccacagagaacaccagccccctgaacaccccccacaccagcgccaacctggtgatgaccccccagggccagctgctgaccctgaagggccccctcttcagcggccctgtggtggccgtgtccccagacctgctggagagtgacctgaagccccaggtggccggcagcgctgtggccctgcctgaaaatgatgacctcttcatgatgccccgcatcgtgaatgtgaccagcctggccacagagggcggcctggtggacatgggcggcagcaagtacccccatgaggtgcctgacagcaagcccagcgaccacctgaaggacacagtgagaaatgaagacaacagcctggaggacaagggccgcatcagcagccggggcaacagagatggccgggtgaccctgggccccacccaggtgttcctggccaacaaggacagcggctacccccagatcgtggatgtgagcaacatgcagaaggcccaggagttcctgcccaagaagatcagcggggacatgaggggcatccagtacaagtggaaggagagcgagagcagaggagagcgggtgaagagcaaggacagcagcttccacaagctgaagatgaaggacctgaaggacagcagcattgagatggagctgaggaaggtgaccagcgccatcgaggaggccgccctggacagcagcgagctgctgaccaacatggaggatgaagatgacacagatgagaccctgaccagcctgctgaatgaaattgccttcctgaaccagcagctgaatgatgacagcgtgggcctggccgagctgcccagctccatggacacagagttccctggagatgcccggcgggccttcatcagcaaggtgcccccaggcagccgggccaccttccaggtggagcacctgggcaccggcctgaaggagctgcctgatgtgcagggcgagagtgacagcatcagccccctgctgctgcacctggaggatgatgacttctctgaaaatgagaagcagctggccgagcccgccagcgagccagatgtgctgaagatcgtgattgattctgagatcaaggacagcctgctgagcaacaagaaggccattgatggcggcaagaacaccagcggcctgcctgctgagcctgagagcgtgagcagcccccccaccctgcacatgaagacaggcctggagaacagcaacagcacagacaccctgtggaggcccatgcccaagctggcccccctgggcctgaaggtggccaaccccagcagtgatgctgatggccagagcctgaaggtgatgccctgcctggcccccatcgccgccaaggtgggctctgtgggccacaagatgaacctgactggaaatgaccaggagggccgggagagcaaggtgatgcccaccctggcccctgtggtggccaagctgggcaacagcggggccagccccagcagcgctgggaagtag

SEQ ID NO: 62517 - DNA, 12042 bp, Artificial Sequence
  derived and/or modified sequence
gcgcgcgcgcaggctcttcagctggagcggacacacggtgtgcgaaccgaacagaataacccgcccccagcgggatgtgaaggactccgggtgaggccggccacgccccgcacggatgggaaggccattgtgactatgtggtgattacagttgtcttactactgagtttcctactgaaatcatggaggagaaacagcagattatattggctaatcaagatggtggaacagtggcaggagcagcacctaccttctttgtcatcttaaagcagccaggaaatggcaaaactgatcaaggaattttggttactaatcaggatgcctgtgctttggctagtagtgtgtcatcaccagtaaaatctaaagggaagatttgccttccagctgattgtactgtgggtggaatcactgttaccctcgataacaatagtatgtggaatgagttctatcatcgaagcacagagatgattctgaccaagcaaggaagacgcatgtttccttactgtcgttattggataacaggtttagattcaaatttgaagtatattcttgtcatggatatatctcctgtggataaccatcgttataagtggaatggtcgttggtgggaacctagtgggaaggctgaacctcatgttttggggagggttttcattcatccagaatctccttccacaggtcattattggatgcatcaaccagtatctttctataaactcaaacttaccaacaatacactggaccaagaagggcatatcatcttgcactctatgcatcgttacctgccgaggcttcatttggtgcctgcagaaaaggctgtggaggtgatacaattaaatggccctggtgtccacacttttaccttcccacagactgaattctttgcagtaacagcttatcagaacattcagattactcagctgaaaatagattacaatccatttgccaaaggctttcgggatgatgggctgaataataagccccagagagatggaaaacaaaagaacagctctgaccaagaagggaataatatttccagttcttctggtcatcgggtccgtcttacagaaggtcaggggtcagagatacaaccaggtgatttggatcctttgtcaaggggtcatgaaacatcaggcaagggtttggagaagacttcccttaatataaaacgagactttcttggtttcatggatactgattcagcacttagtgaagttcctcaattgaagcaagagatttctgaatgtcttattgccagcagttttgaagatgactcccgtgtagcctcaccgttagaccagaacggaagcttcaatgttgttattaaagaggaacctctagatgattatgactacgaacttggtgagtgcccagaaggggtcactgtgaaacaggaagagacagatgaagagacggatgtatactcaaacagtgatgatgatcctatactagagaaacagctaaagaggcacaataaagttgacaacccagaagctgaccatctatcttctaaatggcttccaagcagcccatcaggtgttgctaaagctaaaatgttcaaattagacactggaaagatgccagtagtctatctggagccctgtgctgtcaccagaagcacagttaagatttctgaactccccgataacatgctttccacatctcgaaaggataaatcttctatgttggcagaattggaatatttgcctacatacattgaaaattccaatgagactgccttctgcttaggcaaggaatcagaaaatggtcttagaaaacattcaccagatctcagagtggtacaaaaatatcccttactgaaagagcctcagtggaaatatcctgatatatctgacagcattagcacagaaagaatactcgacgattcaaaggattcagttggagactcactttcaggaaaagaggacttgggcagaaagagaacaactatgcttaagattgcaacagccgcaaaggtagtgaatgctaatcagaatgcctctccaaatgtccctggaaaaagaggaaggccacgaaaattgaaactctgtaaggcaggacgaccacctaagaacacaggaaagtctttaatttctacaaagaatacacctgtaagccctgggagtacctttccagatgtgaagcctgatctggaagatgtggatggtgttctctttgtttcctttgaatcaaaggaagctctagacattcatgcagttgatgggacaacagaagaatcttctagtctccaggcatcaaccacaaatgactcaggttacagagcaagaatttcccagttggaaaaggaattgatagaagatttgaagactttgcggcacaagcaggtgatacatcctggtcttcaagaagtgggcttaaaattgaattcagtggatccaacaatgagcattgatcttaaatacttgggagtacagttacctttggctccagctactagctttcctttttggaaccttacaggaaccaaccctgcctctcctgatgcgggatttccctttgtttctaggacagggaaaaccaatgatttcactaagatcaagggatggaggggaaaatttcatagtgcttctgcatctaggaatgaaggtggaaattcagaaagttcactgaaaaatcgttctgctttctgtagtgataagctagatgaatacttggaaaatgaaggcaagctgatggaaacaagcatgggtttttcttctaatgctcccacatctcctgtggtgtaccagcttcccactaagagtaccagttatgtacgaacacttgatagtgtactaaagaagcaatctactatttccccttctacctcttattctttgaaacctcattctgtaccccctgtctctcgaaaggcaaagtctcaaaacagacaggcaactttcagtggccgaactaaatcatcttataaatccattttaccataccctgtttcaccaaagcagaaatactctcatgtgattctaggagataaggttaccaagaattcttcaggcatcatctcagaaaatcaggcgaataactttgttgtgccaactttggatgaaaatatatttccaaagcagattagtttgcggcaggcacagcagcagcagcaacagcaacagggaagtcgccctccaggcttgtctaaatctcaggtgaagctaatggacctggaagactgtgcactttgggaaggaaaaccaaggacatacatcacagaagagcgagcagatgtatccttaacaactctacttacagctcaagcatccctcaaaactaaacctatccacacaatcataaggaaacgagcccctccctgcaacaatgacttctgtcgactgggttgtgtatgttccagtctagctttggagaagcgccaacctgctcactgccgccgaccagactgcatgtttggttgtacttgtttgaaaagaaaagttgtacttgttaaaggaggatccaaaactaagcattttcagaggaaggctgctcatcgagatccagtattttatgatactctgggagaggaggcaagggaggaggaagaaggaatcagggaggaggaggaacaattgaaagagaaaaagaagagaaagaagctagaatacactatatgtgagacagagcctgaacagcctgttcgacattacccattatgggtaaaagtagaaggtgaagtagatccagaaccagtttatatccccacgccttctgtcattgagcctatgaaaccattgttattgcctcagccagaagttttatctcctactgtgaagggcaaactgctcactggaattaaatctccacggtcatatactcccaaacccaatcctgtgattcgggaagaggacaaagatccagtctacttgtactttgaaagtatgatgacttgtgctcgagttcgagtatatgagcgaaaaaaagaggaccagagacaaccatcttcctcctcctccccatctccatcatttcagcagcaaacttcatgtcattctagccctgagaaccataataatgcaaaggaacctgattctgaacagcagcccttaaaacaactcacctgtgacttggaggatgattctgataaattacaagaaaagagctggaagtcttcctgcaatgaaggagaatcctcttctacttcttatatgcatcagaggtcacctggtggtcccaccaaactgattgagatcatctcagactgcaactgggaggaagatcggaacaagattttgagcatcttatcccagcacatcaatagcaacatgccacaatcacttaaggtgggcagcttcatcattgagttggcttctcagcgaaagagccggggtgagaagaaccctcctgtttattcttctcgtgtgaaaatctctatgccatcatgtcaagaccaagatgatatggctgagaaatctggatcagagactcctgatggtccattgtcccctgggaaaatggaggatatctctcctgtgcagacagatgccctggattcagtgagggagagattacatggaggcaaaggtctgcctttttatgcagggctttctcctgcagggaagcttgtggcctataaacgtaaacccagttcaagtacatctgggcttatccaggtagcatccaatgccaaggtggctgcatccaggaaaccacgtaccctgttgccttcaacatccaattccaaaatggcatcctcctctggcactgcaacaaatcgccctgggaagaatctgaaggcgtttgtcccagcaaaacggccaattgcggctcgaccctctcctggtggtgtgttcacacagtttgtgatgagtaaagttggagccttgcagcagaagatacctggagttagcacaccccaaaccctggcagggacacagaagttcagtatcagaccttctccagtaatggtcgtcacacctgtggtttcttctgagccagttcaggtgtgcagccctgtgactgctgctgtcactactaccacccctcaagtgtttttagaaaatactactgctgtgacacctatgactgctatttctgacgtggaaactaaagaaactacttattcttctggtgccaccactacaggggttgttgaggtctctgaaactaataccagcacctctgtaacatctacccagtctacagccactgtgaaccttaccaaaaccactgggataactacccctgtggcttcagttgcttttcctaagtctttggtagcatctccttcaaccataactcttcctgttgcttccactgcttccacctccttagtcgtggtgactgcagctgcatcttcctccatggtgaccacaccaacttcatctctgggctctgttcctattatactctcaggaattaatgggagtccaccagtgagccagagaccagaaaatgctgctcaaattccagtggctactccacaggtctctcctaacacagtgaaacgtgctggacctcgattgttgttgattccagtgcagcagggttctcctactcttagacctgtctcaaacacacaacttcagggacatcggatggtcttgcagcctgttaggagtccaagtggaatgaacttattcaggcaccctaatgggcagattgtccagcttctacctttgcatcagcttcgaggctctaatacccagcccaacttacagcctgtcatgtttcggaacccagggtctgtgatgggaatccggttacctgctccttccaaaccctctgagactccgccatcttccacttcgtcctctgctttctctgtcatgaatcctgtaattcaagctgttgggtcttcttcagcagtgaatgttatcactcaggcaccatcattgctttcctctggagctagttttgtgtctcaggctggtacattgaccctgaggatttctcctcctgaaccacaaagctttgcaagtaaaacaggctctgaaaccaaaataacttatagctcaggaggacagcctgttggtacagccagtcttattcctctccagtctggtagttttgccttgttacagctcccaggacaaaagcctgttcctagctccattcttcagcatgttgcttcccttcagatgaagagagaatctcagaatccagaccagaaagatgaaacaaactcaataaaaagagagcaagaaacgaagaaggttctacagtcagaaggagaggctgtagaccctgaggctaatgtaataaaacaaaactcaggagctgctacctcagaagaaactctgaatgattccttggaagataggggtgatcatttggatgaagaatgccttccagaagaaggttgtgcaactgtcaaaccatctgagcattcctgtatcactgggtcacatacagatcaagattataaagatgttaatgaagaatatggggctaggaatcgtaagagttccaaagaaaaagtggctgttctggaagttaggaccatttctgaaaaagccagtaataagacagtccaaaatttaagtaaagtacagcatcaaaaacttggtgatgtgaaggtggaacagcagaaaggatttgacaatccagaagaaaactcaagtgaatttccagtcacctttaaggaagaaagtaaatttgaattgtcaggaagcaaagttatggagcagcaatctaatctacagccagaggccaaagagaaggaatgtggagactctctggagaaagacagggaaagatggagaaaacatctgaagggccccttaaccaggaaatgtgttggagcttcacaggaatgtaagaaagaggcagacgagcagttaattaaagaaacaaagacatgtcaggaaaattcagatgtgtttcagcaagaacaaggcatctctgacttacttggaaaaagtggaattactgaagatgccagagttttgaaaactgaatgtgattcttggagtaggatttctaatccttcagccttctccattgttcctaggagagctgcaaaaagcagcagagggaatggacattttcagggtcacttactgctacctggagaacagatacaaccaaagcaagagaagaagggtgggagaagcagtgctgacttcactgttttggatttggaagaagatgatgaagatgataatgagaaaactgatgattctattgatgaaattgtggatgttgtttctgactaccagagtgaggaggttgatgatgtagaaaagaataactgtgtagaatacattgaggatgatgaggagcacgtggacattgagactgtagaagagctctcagaggaaattaatgttgctcacctgaagaccacagcggcccacacacagtcattcaaacagccgtcctgtactcacatctctgcagatgaaaaagcagctgaaaggagtcgaaaggctccaccaattcctctaaaactgaagcctgattactggagtgacaaactacagaaagaagcagaagcgtttgcttattatcgccggacacacactgccaatgagcggcggcggcgtggtgaaatgagggatctctttgagaaattaaagatcacattgggattacttcattcttccaaggtttccaaaagtctcattcttactcgagccttcagtgaaattcagggactaacagatcaggcagacaaattgataggacagaaaaatctcctgactcgaaaacggaatattctgatacggaaagtatcgtctctttcaggtaagacagaagaagtggtcctgaagaagctagagtatatttatgcaaaacagcaagcactagaggcacaaaaaagaaaaaagaagatgggatcagatgagtttgacatatctcccagaattagcaaacagcaggaaggatcttctgcatcatctgtagatcttggacagatgtttataaataacaggagggggaaacctttgattctttccagaaaaaaagaccaggccacagaaaatacctcacccttgaacactccacacacctctgccaaccttgtgatgactccgcaagggcaattgctcaccctaaaaggtcccctattctcaggaccagtggtagctgtttctcctgatctcttagaatctgatcttaagcctcaagttgccggtagtgctgtggctctaccagaaaatgacgacttatttatgatgccacgaattgttaatgtgacatcattggccacagagggaggtttggtagatatgggtggcagcaaatatcctcatgaagttcctgatagcaagccatctgaccatctgaaagacaccgtcaggaatgaagataattccttagaggataagggtagaatctcttccagaggaaacagagatggcagagtgacgttgggtccaacgcaggtttttctggcaaacaaagattctggttatccacaaatagttgacgtttccaatatgcagaaagcacaagagttcttacctaaaaagatttctggtgatatgagagggattcagtataaatggaaagagagtgaatcaagaggggagagagtgaagtcaaaggattcttcatttcataaattaaagatgaaagatctcaaggactcaagcatagagatggaactgaggaaagtaacatcagctatagaggaagcagctcttgattccagtgaactgctgactaacatggaagatgaggatgatactgatgagacactgacttcactgctcaatgaaattgcctttcttaatcaacaactaaatgatgactctgttggcctggctgaactacccagctctatggatacagagttcccaggggatgctcggcgggcttttattagtaaggttcctcctggaagcagagcaactttccaggttgagcacttgggaactggtttgaaagagttgcctgatgttcaaggggagagtgactctatcagtcccctcctcttgcacttggaagacgatgacttttctgagaatgaaaaacaacttgcagaaccagcctctgagccagatgtccttaagattgttattgactctgaaataaaggattccctcctttccaacaagaaagctattgatggagggaagaatacttctggcctccctgcagagcccgaaagtgtgtcctcaccccccaccctacacatgaagactggcttggagaacagcaacagcacagacactttgtggaggcctatgccaaagttggcccctctaggtttaaaagtagctaatccttccagtgatgcagatggtcagagtctcaaggtgatgccttgtttggcacctatagctgccaaagttgggtcagttggacacaaaatgaacttaacagggaatgaccaggaaggccgggaaagcaaggtgatgcctacattggcacctgttgtggctaaattgggcaactcgggggcctcaccaagttctgcagggaaatgaacttacttgtccttaagcagaagccaggctgtgaggggaaatagatctcacctcctttctctgcaggcatctgtttgtttgtgtcttagaacttggatccttgacttcaatgatgcagtggataatgatgggagaaagggggtagggtgctgaccctggtataagaagtactctgaaattctgatcatgttaaaatgtgttacctcacttgtggtgctgggtcccctcatcctctctaagaagatgtgatccattactgaacatgaggtgcccctcttacccaaggaatttataacatgactctggctccacagtggtttctagttcttcccccacaagcgaaagagctgtttgcaactttggagttgctgtagactgaactgtagcttgtagctgttgaattaagtccaaaatctaaggaatgcgatggacttgtgcaaagggatccagaagagacactttttagttgatgtttcaagaatagggagagagaggatgggtaccatggaataccaaagtgaaggactttgtgtcattcagtaaaattttcttttttcatatcctaagtagctcccattccctcaccttttcaatcagaattaacaaattcaagccttcagtaaagtagggatgcttttaacttttattattaattattttgagatcttaaaaaaatagtagttctcccttattatttttgtgggcattgaaaagctcatttcacagtaccagagatttttactgggagtatatattttggaggtaggcatagagggagccctaccccttccacaaattacgttactcaagagacagctaaaataaaatgcattatctccccagaccagagacagtggccaaaataaaaaatcatggggctggaaatttcccaaatcaaaccagcctcctggtgcttgaaggtttcattcactattacctgcacaggatgtaaagaaaagtcacagtaggcactctttaccagggaaataaggcagtatttgaatcacaagatatattttttatctgcaaccatggatccaatgatctgtagagctttttcactcattaactgtcaggatatgaaggactgacagtctgtaaagatatttatatttttgtatagttgttttcatagatttctcaaaggctgaagttttcaacctagaagatgagatttgtattgagtatagaaatgatgtttcctatctagtttgtaaataatcatggtgcacttgaggggtctcttggaaactcctagggggtcaagaatcactattctgaaactgtatagactgggatttagctgctgcattttgcctttcttaaataattatattttggaatgtaacccctgttctgtcttcattgacaggatttgcttgtgttgttaaaacactaacacaagagcttccagtgcctgggccgtgcctaggtgatgctatttcttctatatctcctgtcttctttatcccaaatcccactcagcatatcttcagacctaggttgtaagaccaactttggattggatctagccagtgaattattatttccatggttggttccctttctgttaactctggtaatcaacagattgaaaacggtggaagaacttctgaaaattgcagtgggagcaaattcttgttggttttgtgctgcttgcctttctagatctgctcatcagcacttaaccttccctcctctaaaggttactaaagaagcctgaagtaggtaaagagtgctcctcagcttcttatccttccactctttacccagcagatttcattcaatgccttagccaaggagtccagcacctgtctcccctgctaataattgtccttagagatgctagtactttaatccaggtatagcagtttcccgttattttcttgcttgtcgttcccctacatttcctcctgatttcccaagactctctttgtggcttttgagggtcagccaaggagcaggcaagtgagtgaacaatcctcaggaaaagaaggaccattttagcttaacacttccttttttttttttttttttttaagaagaatataggtaaacaggtaatgattcttgattggagataccatttgactcttgatgagagttgtacgaagatggaaatgagggatgattccaggcgttttagggggaaggctgcagataccattctaacccccaagatactgtgttctcaagacctcttagaactaggtgttgtcagggataatttgaggagggcttagtcttcagaacaatcctgcagtcttgacagaaatctaaaatctccaaaaactcctaccctttaaccttaccctagggggaactgatctatgaatattacatgtgtgattatgaaaggtgaagttgagtgagaggagttgaggaacgtggaagacagtgagctctcaccctaacactataagaagcatgatctcaatagaccaataattcacctttttatacatctgtaaataaatggaatgtttttaagaatataattatgtcagatttagcattttcttttatatattaaatatatatatctttccttttctgctttcgaaaagtgactatttttttagaaatctaagaacagaagtttggtgattgaaaggtagaatatataaacctgaaataaagcagttaaaacaattaaagcagaa

SEQ ID NO: 62518 - DNA, 11921 bp, Artificial Sequence
  derived and/or modified sequence
gcgcgcgcgcaggctcttcagctggagcggacacacggtgtgcgaaccgaacagaataacccgcccccagcgggatgtgaaggactccgggtgaggccggccacgccccgcacggatgggaaggccattgtgactatgtggtgattacagttgtcttactactgagtttcctactgaaatcatggaggagaaacagcagattatattggctaatcaagatggtggaacagtggcaggagcagcacctaccttctttgtcatcttaaagcagccaggaaatggcaaaactgatcaaggaattttggttactaatcaggatgcctgtgctttggctagtagtgtgtcatcaccagtaaaatctaaagggaagatttgccttccagctgattgtactgtgggtggaatcactgttaccctcgataacaatagtatgtggaatgagttctatcatcgaagcacagagatgattctgaccaagcaaggaagacgcatgtttccttactgtcgttattggataacaggtttagattcaaatttgaagtatattcttgtcatggatatatctcctgtggataaccatcgttataagtggaatggtcgttggtgggaacctagtgggaaggctgaacctcatgttttggggagggttttcattcatccagaatctccttccacaggtcattattggatgcatcaaccagtatctttctataaactcaaacttaccaacaatacactggaccaagaagggcatatcatcttgcactctatgcatcgttacctgccgaggcttcatttggtgcctgcagaaaaggctgtggaggtgatacaattaaatggccctggtgtccacacttttaccttcccacagactgaattctttgcagtaacagcttatcagaacattcagattactcagctgaaaatagattacaatccatttgccaaaggctttcgggatgatgggctgaataataagccccagagagatggaaaacaaaagaacagctctgaccaagaagggaataatatttccagttcttctggtcatcgggtccgtcttacagaaggtcaggggtcagagatacaaccaggtgatttggatcctttgtcaaggggtcatgaaacatcaggcaagggtttggagaagacttcccttaatataaaacgagactttcttggtttcatggatactgattcagcacttagtgaagttcctcaattgaagcaagagatttctgaatgtcttattgccagcagttttgaagatgactcccgtgtagcctcaccgttagaccagaacggaagcttcaatgttgttattaaagaggaacctctagatgattatgactacgaacttggtgagtgcccagaaggggtcactgtgaaacaggaagagacagatgaagagacggatgtatactcaaacagtgatgatgatcctatactagagaaacagctaaagaggcacaataaagttgacaacccagaagctgaccatctatcttctaaatggcttccaagcagcccatcaggtgttgctaaagctaaaatgttcaaattagacactggaaagatgccagtagtctatctggagccctgtgctgtcaccagaagcacagttaagatttctgaactccccgataacatgctttccacatctcgaaaggataaatcttctatgttggcagaattggaatatttgcctacatacattgaaaattccaatgagactgccttctgcttaggcaaggaatcagaaaatggtcttagaaaacattcaccagatctcagagtggtacaaaaatatcccttactgaaagagcctcagtggaaatatcctgatatatctgacagcattagcacagaaagaatactcgacgattcaaaggattcagttggagactcactttcaggaaaagaggacttgggcagaaagagaacaactatgcttaagattgcaacagccgcaaaggtagtgaatgctaatcagaatgcctctccaaatgtccctggaaaaagaggaaggccacgaaaattgaaactctgtaaggcaggacgaccacctaagaacacaggaaagtctttaatttctacaaagaatacacctgtaagccctgggagtacctttccagatgtgaagcctgatctggaagatgtggatggtgttctctttgtttcctttgaatcaaaggaagctctagacattcatgcagttgatgggacaacagaagaatcttctagtctccaggcatcaaccacaaatgactcaggttacagagcaagaatttcccagttggaaaaggaattgatagaagatttgaagactttgcggcacaagcaggtgatacatcctggtcttcaagaagtgggcttaaaattgaattcagtggatccaacaatgagcattgatcttaaatacttgggagtacagttacctttggctccagctactagctttcctttttggaaccttacaggaaccaaccctgcctctcctgatgcgggatttccctttgtttctaggacagggaaaaccaatgatttcactaagatcaagggatggaggggaaaatttcatagtgcttctgcatctaggaatgaaggtggaaattcagaaagttcactgaaaaatcgttctgctttctgtagtgataagctagatgaatacttggaaaatgaaggcaagctgatggaaacaagcatgggtttttcttctaatgctcccacatctcctgtggtgtaccagcttcccactaagagtaccagttatgtacgaacacttgatagtgtactaaagaagcaatctactatttccccttctacctcttattctttgaaacctcattctgtaccccctgtctctcgaaaggcaaagtctcaaaacagacaggcaactttcagtggccgaactaaatcatcttataaatccattttaccataccctgtttcaccaaagcagaaatactctcatgtgattctaggagataaggttaccaagaattcttcaggcatcatctcagaaaatcaggcgaataactttgttgtgccaactttggatgaaaatatatttccaaagcagattagtttgcggcaggcacagcagcagcagcaacagcaacagggaagtcgccctccaggcttgtctaaatctcaggtgaagctaatggacctggaagactgtgcactttgggaaggaaaaccaaggacatacatcacagaagagcgagcagatgtatccttaacaactctacttacagctcaagcatccctcaaaactaaacctatccacacaatcataaggaaacgagcccctccctgcaacaatgacttctgtcgactgggttgtgtatgttccagtctagctttggagaagcgccaacctgctcactgccgccgaccagactgcatgtttggttgtacttgtttgaaaagaaaagttgtacttgttaaaggaggatccaaaactaagcattttcagaggaaggctgctcatcgagatccagtattttatgatactctgggagaggaggcaagggaggaggaagaaggaatcagggaggaggaggaacaattgaaagagaaaaagaagagaaagaagctagaatacactatatgtgagacagagcctgaacagcctgttcgacattacccattatgggtaaaagtagaaggtgaagtagatccagaaccagtttatatccccacgccttctgtcattgagcctatgaaaccattgttattgcctcagccagaagttttatctcctactgtgaagggcaaactgctcactggaattaaatctccacggtcatatactcccaaacccaatcctgtgattcgggaagaggacaaagatccagtctacttgtactttgaaagtatgatgacttgtgctcgagttcgagtatatgagcgaaaaaaagaggaccagagacaaccatcttcctcctcctccccatctccatcatttcagcagcaaacttcatgtcattctagccctgagaaccataataatgcaaaggaacctgattctgaacagcagcccttaaaacaactcacctgtgacttggaggatgattctgataaattacaagaaaagagctggaagtcttcctgcaatgaaggagaatcctcttctacttcttatatgcatcagaggtcacctggtggtcccaccaaactgattgagatcatctcagactgcaactgggaggaagatcggaacaagattttgagcatcttatcccagcacatcaatagcaacatgccacaatcacttaaggtgggcagcttcatcattgagttggcttctcagcgaaagagccggggtgagaagaaccctcctgtttattcttctcgtgtgaaaatctctatgccatcatgtcaagaccaagatgatatggctgagaaatctggatcagagactcctgatggtccattgtcccctgggaaaatggaggatatctctcctgtgcagacagatgccctggattcagtgagggagagattacatggaggcaaaggtctgcctttttatgcagggctttctcctgcagggaagcttgtggcctataaacgtaaacccagttcaagtacatctgggcttatccaggtagcatccaatgccaaggtggctgcatccaggaaaccacgtaccctgttgccttcaacatccaattccaaaatggcatcctcctctggcactgcaacaaatcgccctgggaagaatctgaaggcgtttgtcccagcaaaacggccaattgcggctcgaccctctcctggtggtgtgttcacacagtttgtgatgagtaaagttggagccttgcagcagaagatacctggagttagcacaccccaaaccctggcagggacacagaagttcagtatcagaccttctccagtaatggtcgtcacacctgtggtttcttctgagccagttcaggtgtgcagccctgtgactgctgctgtcactactaccacccctcaagtgtttttagaaaatactactgctgtgacacctatgactgctatttctgacgtggaaactaaagaaactacttattcttctggtgccaccactacaggggttgttgaggtctctgaaactaataccagcacctctgtaacatctacccagtctacagccactgtgaaccttaccaaaaccactgggataactacccctgtggcttcagttgcttttcctaagtctttggtagcatctccttcaaccataactcttcctgttgcttccactgcttccacctccttagtcgtggtgactgcagctgcatcttcctccatggtgaccacaccaacttcatctctgggctctgttcctattatactctcaggaattaatgggagtccaccagtgagccagagaccagaaaatgctgctcaaattccagtggctactccacaggtctctcctaacacagtgaaacgtgctggacctcgattgttgcaccctaatgggcagattgtccagcttctacctttgcatcagcttcgaggctctaatacccagcccaacttacagcctgtcatgtttcggaacccagggtctgtgatgggaatccggttacctgctccttccaaaccctctgagactccgccatcttccacttcgtcctctgctttctctgtcatgaatcctgtaattcaagctgttgggtcttcttcagcagtgaatgttatcactcaggcaccatcattgctttcctctggagctagttttgtgtctcaggctggtacattgaccctgaggatttctcctcctgaaccacaaagctttgcaagtaaaacaggctctgaaaccaaaataacttatagctcaggaggacagcctgttggtacagccagtcttattcctctccagtctggtagttttgccttgttacagctcccaggacaaaagcctgttcctagctccattcttcagcatgttgcttcccttcagatgaagagagaatctcagaatccagaccagaaagatgaaacaaactcaataaaaagagagcaagaaacgaagaaggttctacagtcagaaggagaggctgtagaccctgaggctaatgtaataaaacaaaactcaggagctgctacctcagaagaaactctgaatgattccttggaagataggggtgatcatttggatgaagaatgccttccagaagaaggttgtgcaactgtcaaaccatctgagcattcctgtatcactgggtcacatacagatcaagattataaagatgttaatgaagaatatggggctaggaatcgtaagagttccaaagaaaaagtggctgttctggaagttaggaccatttctgaaaaagccagtaataagacagtccaaaatttaagtaaagtacagcatcaaaaacttggtgatgtgaaggtggaacagcagaaaggatttgacaatccagaagaaaactcaagtgaatttccagtcacctttaaggaagaaagtaaatttgaattgtcaggaagcaaagttatggagcagcaatctaatctacagccagaggccaaagagaaggaatgtggagactctctggagaaagacagggaaagatggagaaaacatctgaagggccccttaaccaggaaatgtgttggagcttcacaggaatgtaagaaagaggcagacgagcagttaattaaagaaacaaagacatgtcaggaaaattcagatgtgtttcagcaagaacaaggcatctctgacttacttggaaaaagtggaattactgaagatgccagagttttgaaaactgaatgtgattcttggagtaggatttctaatccttcagccttctccattgttcctaggagagctgcaaaaagcagcagagggaatggacattttcagggtcacttactgctacctggagaacagatacaaccaaagcaagagaagaagggtgggagaagcagtgctgacttcactgttttggatttggaagaagatgatgaagatgataatgagaaaactgatgattctattgatgaaattgtggatgttgtttctgactaccagagtgaggaggttgatgatgtagaaaagaataactgtgtagaatacattgaggatgatgaggagcacgtggacattgagactgtagaagagctctcagaggaaattaatgttgctcacctgaagaccacagcggcccacacacagtcattcaaacagccgtcctgtactcacatctctgcagatgaaaaagcagctgaaaggagtcgaaaggctccaccaattcctctaaaactgaagcctgattactggagtgacaaactacagaaagaagcagaagcgtttgcttattatcgccggacacacactgccaatgagcggcggcggcgtggtgaaatgagggatctctttgagaaattaaagatcacattgggattacttcattcttccaaggtttccaaaagtctcattcttactcgagccttcagtgaaattcagggactaacagatcaggcagacaaattgataggacagaaaaatctcctgactcgaaaacggaatattctgatacggaaagtatcgtctctttcaggtaagacagaagaagtggtcctgaagaagctagagtatatttatgcaaaacagcaagcactagaggcacaaaaaagaaaaaagaagatgggatcagatgagtttgacatatctcccagaattagcaaacagcaggaaggatcttctgcatcatctgtagatcttggacagatgtttataaataacaggagggggaaacctttgattctttccagaaaaaaagaccaggccacagaaaatacctcacccttgaacactccacacacctctgccaaccttgtgatgactccgcaagggcaattgctcaccctaaaaggtcccctattctcaggaccagtggtagctgtttctcctgatctcttagaatctgatcttaagcctcaagttgccggtagtgctgtggctctaccagaaaatgacgacttatttatgatgccacgaattgttaatgtgacatcattggccacagagggaggtttggtagatatgggtggcagcaaatatcctcatgaagttcctgatagcaagccatctgaccatctgaaagacaccgtcaggaatgaagataattccttagaggataagggtagaatctcttccagaggaaacagagatggcagagtgacgttgggtccaacgcaggtttttctggcaaacaaagattctggttatccacaaatagttgacgtttccaatatgcagaaagcacaagagttcttacctaaaaagatttctggtgatatgagagggattcagtataaatggaaagagagtgaatcaagaggggagagagtgaagtcaaaggattcttcatttcataaattaaagatgaaagatctcaaggactcaagcatagagatggaactgaggaaagtaacatcagctatagaggaagcagctcttgattccagtgaactgctgactaacatggaagatgaggatgatactgatgagacactgacttcactgctcaatgaaattgcctttcttaatcaacaactaaatgatgactctgttggcctggctgaactacccagctctatggatacagagttcccaggggatgctcggcgggcttttattagtaaggttcctcctggaagcagagcaactttccaggttgagcacttgggaactggtttgaaagagttgcctgatgttcaaggggagagtgactctatcagtcccctcctcttgcacttggaagacgatgacttttctgagaatgaaaaacaacttgcagaaccagcctctgagccagatgtccttaagattgttattgactctgaaataaaggattccctcctttccaacaagaaagctattgatggagggaagaatacttctggcctccctgcagagcccgaaagtgtgtcctcaccccccaccctacacatgaagactggcttggagaacagcaacagcacagacactttgtggaggcctatgccaaagttggcccctctaggtttaaaagtagctaatccttccagtgatgcagatggtcagagtctcaaggtgatgccttgtttggcacctatagctgccaaagttgggtcagttggacacaaaatgaacttaacagggaatgaccaggaaggccgggaaagcaaggtgatgcctacattggcacctgttgtggctaaattgggcaactcgggggcctcaccaagttctgcagggaaatgaacttacttgtccttaagcagaagccaggctgtgaggggaaatagatctcacctcctttctctgcaggcatctgtttgtttgtgtcttagaacttggatccttgacttcaatgatgcagtggataatgatgggagaaagggggtagggtgctgaccctggtataagaagtactctgaaattctgatcatgttaaaatgtgttacctcacttgtggtgctgggtcccctcatcctctctaagaagatgtgatccattactgaacatgaggtgcccctcttacccaaggaatttataacatgactctggctccacagtggtttctagttcttcccccacaagcgaaagagctgtttgcaactttggagttgctgtagactgaactgtagcttgtagctgttgaattaagtccaaaatctaaggaatgcgatggacttgtgcaaagggatccagaagagacactttttagttgatgtttcaagaatagggagagagaggatgggtaccatggaataccaaagtgaaggactttgtgtcattcagtaaaattttcttttttcatatcctaagtagctcccattccctcaccttttcaatcagaattaacaaattcaagccttcagtaaagtagggatgcttttaacttttattattaattattttgagatcttaaaaaaatagtagttctcccttattatttttgtgggcattgaaaagctcatttcacagtaccagagatttttactgggagtatatattttggaggtaggcatagagggagccctaccccttccacaaattacgttactcaagagacagctaaaataaaatgcattatctccccagaccagagacagtggccaaaataaaaaatcatggggctggaaatttcccaaatcaaaccagcctcctggtgcttgaaggtttcattcactattacctgcacaggatgtaaagaaaagtcacagtaggcactctttaccagggaaataaggcagtatttgaatcacaagatatattttttatctgcaaccatggatccaatgatctgtagagctttttcactcattaactgtcaggatatgaaggactgacagtctgtaaagatatttatatttttgtatagttgttttcatagatttctcaaaggctgaagttttcaacctagaagatgagatttgtattgagtatagaaatgatgtttcctatctagtttgtaaataatcatggtgcacttgaggggtctcttggaaactcctagggggtcaagaatcactattctgaaactgtatagactgggatttagctgctgcattttgcctttcttaaataattatattttggaatgtaacccctgttctgtcttcattgacaggatttgcttgtgttgttaaaacactaacacaagagcttccagtgcctgggccgtgcctaggtgatgctatttcttctatatctcctgtcttctttatcccaaatcccactcagcatatcttcagacctaggttgtaagaccaactttggattggatctagccagtgaattattatttccatggttggttccctttctgttaactctggtaatcaacagattgaaaacggtggaagaacttctgaaaattgcagtgggagcaaattcttgttggttttgtgctgcttgcctttctagatctgctcatcagcacttaaccttccctcctctaaaggttactaaagaagcctgaagtaggtaaagagtgctcctcagcttcttatccttccactctttacccagcagatttcattcaatgccttagccaaggagtccagcacctgtctcccctgctaataattgtccttagagatgctagtactttaatccaggtatagcagtttcccgttattttcttgcttgtcgttcccctacatttcctcctgatttcccaagactctctttgtggcttttgagggtcagccaaggagcaggcaagtgagtgaacaatcctcaggaaaagaaggaccattttagcttaacacttccttttttttttttttttttttaagaagaatataggtaaacaggtaatgattcttgattggagataccatttgactcttgatgagagttgtacgaagatggaaatgagggatgattccaggcgttttagggggaaggctgcagataccattctaacccccaagatactgtgttctcaagacctcttagaactaggtgttgtcagggataatttgaggagggcttagtcttcagaacaatcctgcagtcttgacagaaatctaaaatctccaaaaactcctaccctttaaccttaccctagggggaactgatctatgaatattacatgtgtgattatgaaaggtgaagttgagtgagaggagttgaggaacgtggaagacagtgagctctcaccctaacactataagaagcatgatctcaatagaccaataattcacctttttatacatctgtaaataaatggaatgtttttaagaatataattatgtcagatttagcattttcttttatatattaaatatatatatctttccttttctgctttcgaaaagtgactatttttttagaaatctaagaacagaagtttggtgattgaaaggtagaatatataaacctgaaataaagcagttaaaacaattaaagc

SEQ ID NO: 62519 - DNA, 9198 bp, Artificial Sequence
  derived and/or modified sequence
atggaggagaagcagcagatcatcctggccaaccaggacggcggcaccgtcgctggagcagctccaacattttttgtcatcctgaagcaacccggaaatggcaagactgatcaagggatcttagtcaccaatcaggatgcctgcgctctggcctcctccgtaagtagtcctgtgaagtccaagggcaagatctgtctgccagctgattgtacagtgggaggaattaccgtaactttagacaacaactcaatgtggaacgagttttaccaccggtcaactgagatgatcctcacaaagcagggccgtaggatgtttccatactgcaggtactggatcactgggctcgacagcaatctgaagtatatccttgtgatggatatctctcctgtcgataaccatagatataaatggaacgggcggtggtgggagccgagcggaaaagccgagccacacgtgctgggaagagtgtttattcacccggagtcgccgagcactggccattattggatgcaccagccagtcagcttctacaagcttaagctcacaaataatactctggatcaagaagggcatattattctgcactctatgcacagatacctgcccagattgcatttggttcctgccgagaaagccgtggaagtaatccaacttaatgggcccggcgtgcatacttttacattcccacaaaccgagttctttgcggtcacagcatatcagaacatacaaatcactcaactgaagattgattataaccccttcgctaaaggatttagagatgatggtctaaataataagccccaacgggatggcaagcaaaagaatagctctgatcaggagggtaacaacatatcatcctcctcaggccatcgagtaagactcaccgaggggcaggggagtgagattcagcccggagatctcgatcccctgtcacgagggcatgagacttctggtaagggtctcgaaaagacctcactgaatatcaagagagacttcttgggatttatggataccgacagcgccctgtcagaggttccacagctgaagcaggagatttcagagtgtctgatcgcttcgagcttcgaagacgactcccgggtggcttcccccttggatcagaatggctcctttaatgtggtgattaaagaagagccactggacgattatgactacgagttgggcgaatgcccagaaggcgtgacagtgaaacaggaggagactgacgaagagactgacgtctactctaacagcgacgacgacccaatcctagagaagcagctgaagcgccacaataaagtcgacaacccagaagccgatcatctgtcaagtaaatggctgccctcttcccctagcggagtcgccaaagcgaaaatgttcaagttagatacagggaaaatgcccgtggtgtatctcgagccctgtgccgtgacgaggagcaccgtgaaaatttctgaactccccgacaacatgctgtcaacgtcacgaaaagataaatctagcatgttagctgagctcgagtatctgcccacatacatcgaaaactcaaacgagaccgcattctgcctgggcaaagaaagcgagaatggccttcggaagcacagtcccgatctccgcgttgtgcaaaagtatcctctgctgaaggagccccagtggaagtatccagacatttcggacagcatctcaaccgagagaatactcgatgactctaaagattctgtcggggacagcctgagcgggaaggaggacttgggacgtaagaggactaccatgctcaaaatagccacagctgccaaagtggtcaacgccaaccagaatgcctctcccaatgtgccaggcaagagggggaggcctcggaaactgaagctatgtaaggcaggccgtcctcccaagaatactggaaaaagcctaatcagtacaaaaaatacccctgtatcgccaggaagcaccttccctgacgtgaaaccagaccttgaggacgtagacggcgtgctgtttgtctcattcgaaagtaaagaggctctggacattcatgcagtggatggcacaaccgaagaatcaagttccctccaggccagtactactaacgactctggatatcgcgcacggatcagccagttagagaaagagcttatcgaagacttgaaaaccttacggcacaaacaggtcattcatcctggcctgcaagaggttggcctgaagttgaattcggttgatcccactatgagtatagacctaaaatatctgggcgtgcagttgcccctggctccagcgacgtcattccccttctggaacctgacaggtaccaacccagctagccccgatgctggttttccttttgtttcccgtaccggcaaaactaacgattttactaagattaaaggttggcgtggcaaattccatagtgccagtgcctcccggaacgagggtggaaactccgagagcagtctcaagaaccggtctgcattctgctccgataaacttgatgagtacttggaaaatgagggaaaactaatggagacatccatgggcttttctagcaatgcccccacttcacccgtggtgtaccagctgcctacgaagtccacgtcgtatgtcaggaccctggacagtgtattaaagaagcagagtaccatatccccctcaacatcctactctctaaaaccacacagtgtccctccagtctcacggaaggccaaatctcaaaatcgccaggccacgttctctggtaggaccaaatcctcttacaagagcatacttccctatcctgtgtcacctaaacagaagtattctcacgttatcctcggggacaaagttactaaaaatagcagcggaatcattagcgagaaccaggccaacaacttcgtggtgccaaccctagatgagaacatctttcccaaacagatcagtctccggcaggcccagcagcagcagcagcagcagcaggggagtagaccacccggcctttccaagtcccaggtcaaactcatggacctcgaagattgtgccttatgggaaggtaagccgcggacgtatatcacagaggagcgggcagatgtttcattgaccacgttgttgactgcccaggccagtctcaagaccaagccaatccatacaatcatcagaaaaagggcccccccttgcaataatgacttctgccgtctgggttgcgtttgcagctcactagccttagagaagagacagcctgcgcactgcaggcgaccagactgcatgttcggttgcacatgtctcaaacgcaaagtggtcttggtgaaaggtggatcaaagaccaaacattttcagcggaaagccgcgcaccgagatccagtcttttacgacaccctcggcgaggaagctagggaggaagaggagggaataagggaagaagaagagcagttgaaggagaagaagaaacgcaagaagctggagtacactatctgtgagaccgagcctgaacagccagtgaggcactacccactatgggttaaggtggaaggtgaggtggatcctgagcccgtctatataccaaccccctctgtcatcgagccaatgaaacctctgctgttacctcagcccgaggtattgtcgccgactgtgaaagggaaactgctgacaggtataaagtctccacggtcctacacccccaagcccaaccccgtcattcgggaggaggataaggatcctgtgtatctctattttgaatcaatgatgacatgtgcacgcgtgcgggtgtacgaacgcaaaaaggaagaccagcggcagccctcttcatccagttccccatctccgagttttcagcagcagacttcttgccactctagccctgaaaaccataataacgcaaaggagccagactcggagcaacagcccctgaagcaactcacttgcgacctggaagatgactccgacaagctgcaggagaagtcatggaaatctagttgtaacgagggagaatcctcctccacgtcttacatgcaccaacggtcccccggcggccccaccaagctgatcgaaattatttcagactgcaactgggaggaggatagaaacaagatcctgagcattctctcgcagcacattaattctaatatgccgcagagtctgaaggtcggaagttttatcattgaactggcatcccaacggaaaagtcgcggggagaaaaatccacccgtgtactccagccgggtgaaaattagcatgcccagctgccaggatcaggacgacatggctgaaaaaagtgggtcagagaccccagacgggccattgtcaccgggtaaaatggaggacatcagcccagtgcaaacagatgctttagatagcgtccgtgagcgcctgcacggtggaaaaggtttgcccttctatgccggtctatctcccgcagggaaactggtggcgtataagcggaaaccatcctcctccaccagcggtttaatacaagtggcctctaacgccaaggtggccgcatctaggaaaccgcggacgttacttcccagcacatctaatagcaaaatggcctcttcgagcgggaccgcgaccaaccgccctggcaagaatctgaaggcatttgtgccggccaagagacctatagctgcccggccttccccgggaggggtgtttacgcaattcgttatgtctaaagtgggggcccttcagcagaaaatacccggcgtctcaacaccacaaacgctagccggcacacagaagtttagtatccggccctcccccgttatggttgtaactcccgtggtgtcctccgaaccagttcaggtctgttctcccgtgacagcggccgtaactaccaccaccccacaggttttcctggaaaacacgaccgccgtcacccctatgactgccatcagcgacgtggagacaaaggaaacaacctactcctccggcgccaccacaacaggcgtggtagaagtgagcgagactaatacatcaaccagtgtcacatccacgcagagcaccgcaactgtgaacctgaccaaaacaaccggtatcaccactcccgtggcctctgttgcattcccgaagagccttgtcgcaagccctagcacaataactttacccgtggcgtcaacagcctctacaagtctggtggttgtgactgccgcagcctctagttcaatggtcacgacccccaccagttctctggggagcgtccctataattcttagcgggatcaacggatccccgcctgtgtcacaaagaccggagaatgcagcgcaaataccagtagcaaccccacaggtgtctcctaacacagtgaagagagccggccctcgcctcctacttatccctgtgcaacaaggatcaccgacactgcgcccagtgagcaacacccagttacagggtcaccggatggtgctgcaacccgtaagatccccctcggggatgaatttgttccgccaccccaacggacaaattgttcagctgctgcctctgcaccagttaaggggctcaaacacccagcccaatctgcagcccgtgatgttccgaaatcctggaagtgttatgggaataagattacccgctccgagtaaaccatcggagacacctccatctagtacctcttcctctgcttttagcgtgatgaatcccgttattcaggctgttggctcgtcttctgctgtcaatgtgatcacccaggcgccaagccttcttagtagtggagcatcttttgtttcccaggccgggaccctaaccctaagaatctccccgccggagcctcaaagttttgcgagcaaaacagggagcgagaccaaaattacatatagcagcgggggtcagcctgtggggacagcttccctgatccccctgcagagcggctcttttgctttgctccagctccctgggcagaagccagttccctccagtatccttcaacacgtggcatctctgcagatgaagagggaatcacagaaccccgaccagaaggatgaaaccaacagtattaagcgggaacaggaaaccaaaaaagtcctgcagagtgagggggaggccgttgaccctgaggcaaatgtgatcaagcaaaatagtggggccgcgacaagcgaagagactctgaacgactcactggaagataggggggaccacctggacgaggaatgccttcccgaagagggctgcgcaaccgtaaagccgagcgagcacagctgcatcaccgggtcacacaccgaccaagattacaaggacgtgaacgaagaatatggggccaggaatagaaagtcaagtaaggagaaggtggccgtgctggaggtccgaacaatctccgaaaaggccagcaacaagaccgtgcagaacctcagcaaagtgcaacaccagaaacttggtgatgtgaaagttgagcagcagaaaggcttcgataatccagaggaaaactctagcgagttccccgtgaccttcaaagaggagagtaaattcgagctttctggatccaaagtaatggaacagcaatccaatctccagcctgaagccaaggaaaaagaatgcggggacagtttggagaaagatcgcgaacggtggaggaagcatcttaaaggaccgctgacccggaaatgcgtgggagcctctcaagagtgcaagaaggaggcagatgagcagctgattaaagaaacaaagacctgccaggagaactcggacgtctttcagcaggagcaaggcatctccgacctactcggcaagagcggaatcacagaagatgctcgagtcttaaaaacagagtgtgactcatggagtaggatctcaaatccatcggctttttctattgttcctcgcagggcagccaagagcagcagaggaaacggccatttccaggggcacttactcttaccaggagaacagatccagcctaagcaggagaaaaaaggaggtaggagctcagccgactttacggtgctggacctagaggaagacgacgaggatgataatgaaaagactgacgatagtatagatgaaatagtcgacgtcgtgtccgactaccagtccgaagaggtggacgacgttgagaagaataactgcgtggaatacatcgaagacgacgaagagcacgtggatattgaaaccgtggaagaactgtcagaagagatcaacgtggcacacctgaaaacgactgctgcccatactcaatcattcaaacaaccgagctgcacgcacatttctgctgacgagaaagctgcggaaagatccaggaaagcccccccaatccctttgaaactgaagcctgattactggagtgataaactgcagaaagaggctgaagccttcgcctactaccgtagaactcacactgcgaatgagcgcagacgtcggggggaaatgagagacctgtttgagaaactgaaaataacacttggtctgctccactccagcaaggtctccaaatcactcatactgactcgggcattctctgaaatacaagggctgactgatcaggcggataagctcatcggccagaaaaacctgttgacccggaaacggaatatcttgattcgaaaggtgtcgagcctgagcggcaagacagaggaagtggtgctcaagaagttagaatacatctacgctaagcagcaagccctggaggcgcagaagaggaaaaagaaaatggggagtgatgaatttgatattagcccacggatctcaaagcagcaagaaggatctagcgcgtcttctgtggatctgggccaaatgttcattaacaaccggagaggaaaacccctgatcctgagtcggaaaaaagatcaggcaacagaaaacacttcccctctgaatactccgcatacatctgctaacctggttatgacacctcaggggcagctgcttaccctcaagggccccctctttagcgggccggtggtcgctgtgtcacccgatctcttagagtccgacttaaagccccaggtcgccggctcagctgtggcactcccagaaaacgatgatctattcatgatgccccgtatcgtcaatgtcacctcgctggcgaccgagggcggcctcgttgatatggggggttctaagtatccccatgaagtgcccgacagcaagccatccgatcacctcaaggacacagtgcgtaacgaagacaattcactggaagataaaggccgaatttccagccgcggcaatagggacggacgagtaaccctcggtcccacgcaggtgtttctcgctaataaagattcaggatatcctcagattgttgacgtgtcaaacatgcaaaaagctcaagagtttctgcccaagaaaatttctggggacatgaggggcatccagtataagtggaaggagtcggaaagcagaggcgaacgggtaaaaagtaaggacagctctttccataagctgaaaatgaaggatctgaaggacagctctatcgagatggaactccgcaaagttactagcgccatagaagaggcagctctggactcctccgaactgctgaccaacatggaagatgaagatgataccgacgaaaccctcacctcgcttctgaacgagatagcattcttgaatcaacaactgaatgatgacagtgtgggtcttgcggaacttccatcatctatggacactgagtttccaggagacgccagacgcgcgtttatctccaaagtaccgcctggaagcagggctacattccaggtagagcatcttgggaccgggttgaaggagttgccagacgttcagggcgagtccgattcaatctcccccctgctactgcatcttgaggacgacgatttttctgaaaatgaaaaacagctggcggagccggcttctgagccagatgttcttaagattgtcatagactccgaaattaaggactccctgttgagtaataagaaggcaatcgatggcggaaagaacacctcagggcttcccgcggaaccagaatcagtgtctagcccacccaccctgcatatgaaaactgggctcgaaaattccaactcaaccgatacgctttggaggcccatgccgaaactggcacctctgggactaaaagttgctaatcctagttcagacgcagacgggcaatcactgaaggtgatgccatgtctggctccaatcgccgccaaagtgggcagcgtgggtcataaaatgaacttaacagggaatgaccaagaaggaagggagagcaaagtcatgccaactcttgcaccagttgttgcaaagttagggaactcaggcgcttcccctagttcggccggtaaatag

SEQ ID NO: 62520 - DNA, 9081 bp, Artificial Sequence
  derived and/or modified sequence
atggaggagaagcagcagatcatcctggccaaccaggacggcggcaccgtggccggggccgcccccacattcttcgtgattctcaagcaaccaggaaatggcaagaccgaccaagggattctcgtgactaaccaggacgcttgcgccctagcttcctctgtttcctcaccggtaaaatccaaggggaaaatatgcctgcctgcggattgcaccgtcggcggcatcacagtcacactggataacaactctatgtggaacgaattctatcaccggtctaccgagatgatccttacaaagcagggacggcggatgtttccttactgcagatattggataacaggcctggattccaacctcaagtacatcctggtgatggacatcagccccgttgacaatcacagatacaaatggaacggcaggtggtgggagccaagcggcaaagccgagccccatgttttaggacgcgtctttattcatccagaatccccttctactgggcactactggatgcatcaacctgtcagtttctataagctaaagctcaccaacaatactctcgatcaggagggccacataatactccattcaatgcatcggtacctgccacgcctgcacctggtccctgccgagaaagcggtggaggtcatccagctgaatggtccgggtgtgcataccttcacttttcctcagaccgagttcttcgctgtgacagcgtatcaaaatattcagataacccagctgaagatcgattataatcctttcgccaagggctttcgggatgacgggctcaacaacaaacctcaacgcgatgggaagcagaaaaacagttccgaccaggaaggtaataatattagcagctcgtctgggcacagagtgagactcaccgaaggtcaggggtctgagatacagccaggggatcttgaccctcttagcagagggcacgagacaagcggaaaaggactggaaaagaccagtctgaatatcaaaagggactttctcggtttcatggatactgacagcgcactaagtgaggttccgcagctcaagcaggagatctcagagtgtctcatcgccagctccttcgaggacgactccagggtcgcgagccctcttgatcaaaacggttcgttcaatgtggttataaaggaggagcctctggatgactacgattacgaactgggggaatgtcccgaaggcgtgaccgttaagcaggaggagaccgacgaggagactgacgtgtactcaaattcagacgacgacccaattttggagaaacagctcaagaggcacaataaagtcgacaacccagaggctgaccatctctctagcaagtggctcccctccagcccttctggggtagctaaggcgaagatgttcaagctcgatactgggaagatgcccgtggtctacctggaaccatgcgccgttactaggtccaccgtaaagatctcagagttacccgataacatgctttctactagcaggaaagacaagtcctccatgctggcagagttggagtatttgccaacatatattgaaaactccaatgaaaccgccttttgcctggggaaagaatccgagaacggcctgagaaaacacagccctgacctgagagtggtgcaaaagtaccccctgttgaaggagccacagtggaagtatcctgatatcagtgactccataagcaccgagaggattttagatgattctaaggattccgtgggcgactctctttcagggaaagaagacctcggccgtaagcgtaccaccatgctgaagatcgccaccgcagccaaggtggtcaatgctaaccaaaatgcttctcccaatgtgcccgggaaacgcggcaggcccagaaagctgaaactctgtaaggcagggcgcccccccaaaaatactggaaagtcgctgatctcgacaaagaataccccagtgtctccaggaagcaccttcccggacgtcaagcccgacctggaggacgttgacggagtgctgtttgtttctttcgagagtaaggaagcccttgacatacatgccgttgacggaactacagaagaatcatcttctcttcaggcatccacgactaacgacagcgggtatcgagctcggatttcccagctggagaaagagttgattgaagacctgaaaacactgcgccacaagcaggtgatacaccctggcctccaagaggttgggcttaaactcaatagtgtggatccaactatgtctatcgacctgaaatatcttggagttcagctgcccttggctcccgccacaagctttccattctggaacctaactggaaccaacccggcgtctcccgacgctggttttccattcgtttccaggacaggaaagacaaacgacttcaccaagataaaaggttggcgggggaagttccactcagcgagcgctagccggaatgaaggaggcaactccgaatccagtttgaaaaatcgttctgccttctgctcagacaagctggacgagtatttggaaaacgaaggtaaattgatggagacgagtatgggcttttcttccaacgcccccacaagtcccgtcgtctaccagcttcctactaagtcaacctcctacgtcagaacacttgacagcgtcctgaaaaagcagtccactatttcaccctccaccagctattctcttaaaccccacagcgttcccccagtctcccgaaaggccaagtcccagaatagacaggcaacgttttcgggccgcaccaagtcaagctacaaatccatccttccctacccagtcagccctaagcagaaatactcccacgttatactcggtgataaggtcaccaagaacagttcaggtatcataagcgaaaaccaggccaacaactttgtcgttcccaccctggacgagaacatctttccaaagcagattagtttgaggcaggcccagcagcagcagcagcaacaacaggggtccagaccacccgggctcagtaagagccaagttaagctcatggacctcgaggattgtgccctctgggagggcaaaccacggacctacatcacggaagaacgcgcggatgtaagtctgaccaccctgctgaccgcccaggcgtcactgaagaccaaacctattcacaccattatcagaaaacgcgcccctccttgtaacaacgatttttgcaggttggggtgcgtgtgctcttcgttggccctggaaaagaggcagcccgctcactgcaggagaccagattgtatgttcggctgtacatgcctcaaaagaaaagtggtgctcgtgaaaggaggctcgaaaaccaaacacttccagcggaaggctgcacaccgggatcctgttttttacgataccttaggggaggaggctcgcgaggaagaagagggaataagagaagaagaagagcagctgaaagagaaaaaaaaacgcaaaaaattggaatacactatctgtgaaactgaacccgaacaaccagtccgccattaccccttatgggtgaaggtggagggcgaagtcgatcccgaaccagtctatatccccacaccctccgtgatagagcctatgaaacccttgttactaccgcaaccggaggttctgagcccgactgtgaaggggaaactgcttacgggcatcaagtcgccacgcagctacacacccaaaccaaaccccgtgatccgcgaagaggacaaggatcccgtgtacctctattttgaatctatgatgacctgtgcgagggttcgagtctacgaacgcaaaaaagaggatcagcgccaacctagttcctcatcttccccctccccaagcttccagcagcagacttcctgtcatagctcccccgagaaccacaacaatgctaaggagccagatagtgagcagcagccgcttaaacaactgacatgcgatctggaggatgattccgacaaattgcaagagaagtcctggaagagttcatgtaatgagggggagtcaagtagcacaagctatatgcaccagcggagccccggagggccgacaaagctgatcgagatcatttccgactgcaactgggaagaggacagaaataaaatcctctccatactttctcagcacattaactctaatatgccacaatccctcaaagtgggttccttcatcattgagctcgcatcccagaggaaatccaggggggaaaagaatccccccgtctatagtagccgcgtcaagattagcatgccttcttgccaagatcaggacgatatggccgagaaatctggttctgagacgccagatgggccactatccccaggaaaaatggaggacatcagcccagtgcagaccgatgccctggatagcgtgagagaacggctacacggcgggaaagggttgcctttctacgctggactgtctccagccggcaagcttgtagcctacaagcgaaagccatctagtagcacttccggccttattcaggtggccagtaacgctaaagtggcagcctcgcggaagccccggacactgctcccatcaacctccaatagtaagatggcctcaagcagcggcacagcaactaatcgccctggtaagaaccttaaagccttcgtgccggcaaagcgtcctattgctgccagaccctctcccggtggagttttcactcaattcgtgatgtccaaggttggtgcactacagcaaaagatccctggagtctctacaccccagactctggccgggacacaaaagttctcgattaggccgtcgcctgtgatggtggtgaccccagtcgtgtcttctgaaccggttcaggtgtgctcgcctgtaacagccgctgtgaccaccaccaccccacaggtgtttctggagaacacgaccgccgtcacacctatgaccgccatctcagatgttgagaccaaggaaacaacctatagttccggagccaccactactggtgtggttgaagtgagcgaaacaaataccagcacctccgttaccagcactcagtccactgccacagtgaacctgaccaagacaaccggcattacgacccccgttgcctccgttgccttccctaagtccttggtagccagtccgtcaaccatcactctgccagttgcctctactgcctcaacttcgctggtagtcgtcaccgccgccgcaagctcaagcatggtgacgacccctacctcctctctgggctccgtgcctattattctgtccggaatcaacggatcccctccagtgtcccaacgcccagagaatgcggcccagattccagtagccacccctcaagtgtcccccaatacagtgaagagagcaggccctcgtttactccatcccaatggccagatcgtgcagctgcttccactgcaccagctgaggggctccaatactcagcctaacctccagccagtaatgtttagaaatcctggcagcgtcatgggcatccggttgccagctccgtcaaaaccgagcgagaccccaccaagctcaacctcgtcatctgcttttagtgtgatgaatcccgtgatacaagccgtgggctccagctctgcggtcaacgtgataacacaagctccctcattactgagtagtggcgcctccttcgtgtctcaggccgggacattaacgcttcgcattagcccaccagaaccacagtcgttcgccagcaagacgggttctgagaccaaaattacctatagctctgggggacagcctgtgggtacagcctccttgattccgcttcagtcagggagcttcgccttgcttcagctgcccgggcaaaaacccgtcccatctagcattctacagcatgtggcctctttacaaatgaagagagaaagtcaaaacccagatcaaaaggatgaaactaattcaataaaacgagaacaggaaacaaaaaaggttttacagtcagaaggcgaggcagtagatccagaggcaaatgtaatcaagcagaatagcggcgcagccacctcagaggaaactctgaacgattccctcgaagacagaggggatcatctggatgaggaatgcctgccagaggagggctgtgccaccgtcaagccatcagagcactcctgtataaccggctctcacacagaccaagattacaaagacgtgaatgaggagtatggtgctagaaatcgcaagtccagtaaggagaaagtggccgtgctggaggtcaggactatttctgaaaaggcttccaacaaaacagttcagaacctttccaaggtgcagcatcaaaaactgggagatgtgaaggtagaacagcagaaaggctttgacaatcccgaggagaactcatcagagttccctgtcacttttaaagaggaatccaaatttgagctgtctgggagcaaggtgatggagcagcagagtaacttacaacccgaggctaaagaaaaggaatgtggagactcgttagagaaggatcgcgaacggtggagaaaacatctaaaaggacctttgaccagaaagtgtgtaggggcatcccaggaatgtaaaaaagaggctgatgagcaactgatcaaggaaaccaaaacgtgccaagagaactccgacgtttttcaacaggagcaagggatctctgacttgttaggaaagagcggcatcaccgaagatgccagggttttaaaaactgagtgcgattcctggagtagaatctctaacccctcagcatttagcattgttccaagacgggccgctaagtctagcagaggtaatggccactttcaggggcacctgctcttgcctggcgagcagattcagcccaaacaggaaaaaaaaggcggtcggtcatccgctgattttacagttctggacctggaggaggacgacgaagacgataacgagaagacggatgactccattgacgaaatcgttgatgtggtctcggattaccagagcgaggaagtggatgacgttgagaagaataactgtgtggagtacatagaagacgacgaggaacacgtcgatatcgagactgtggaagaactgagcgaggagattaatgttgctcacttaaagactacggccgcacatactcagtcattcaagcaacctagctgtacacatatatcagccgatgagaaagcagccgaacgttcccgcaaggcgcctcctattcctctgaagctgaagcctgattactggtccgacaaactacagaaagaagcagaagcctttgcttactatcgtcgtacacataccgctaacgagcgaaggagacgtggtgaaatgcgcgacctttttgagaagttgaaaattacgctcggcctcctccacagctccaaagtatccaagtcgctgatactcacacgagctttttcagaaatacagggactgactgatcaggctgataaactgatcggccagaaaaacctgctgacacgcaagagaaacattctgataagaaaggtctcttctctgagcggcaaaaccgaagaggtggtgctcaaaaagctggagtacatctacgccaaacagcaagcactggaggctcagaagcgaaaaaagaaaatgggcagtgatgagttcgatataagtccacgtattagcaagcaacaggaaggttcctcagcctcttcagtggacctcggtcaaatgttcattaacaatcgacgcggcaaacccttaatcctgtcacggaaaaaggatcaggccaccgagaacactagtcccctcaatacacctcacacgtcagcgaacctagttatgaccccccagggtcagctgctaaccctgaagggacccctcttcagcggtccagtggtggccgtgtcacccgacctactggagtccgatttaaagcctcaggtggcaggcagtgccgtggctctgcccgagaacgatgacctgttcatgatgcctagaatagtgaacgtgacttccctcgctacagagggcggcctggtagatatgggaggatccaagtaccctcacgaggtgcctgacagcaagccctctgatcaccttaaggatacagtcaggaacgaggataacagtctggaggataagggcagaataagttcccggggtaatcgggatggccgagtcacacttgggcccactcaagtgtttctggcaaacaaggattcggggtacccgcaaatcgtggatgttagcaacatgcaaaaagcacaggagtttctgcccaagaagattagcggagatatgagaggcattcagtacaagtggaaggaatctgagtctcggggagagcgcgtgaagtctaaagattcgagcttccataaactgaagatgaaggacctcaaagattcatctatagaaatggagctgagaaaggtcacctcagcaatagaggaggcagccctggatagttctgagctgctcactaatatggaggatgaggacgatacggacgagacactgacctctctgctcaatgaaatcgcattcctcaaccagcaactgaacgacgatagcgtgggtctggccgagctgcccagcagtatggatacggagtttccaggcgatgcgagaagagcttttatctccaaagtgccaccaggcagcagagccactttccaggtcgagcaccttggcactgggctcaaagaattaccggatgtgcaaggtgagtccgatagcatctcccctctgctgttgcaccttgaagatgacgacttctctgagaatgaaaaacagctcgcggaaccagcctccgagcctgatgtgctgaaaatcgtgatcgacagtgagatcaaggactcactgctgagcaacaagaaggccattgacggcggcaagaacacctcaggcctcccagcggaacccgagagcgtttcatcacccccaactcttcatatgaaaacagggttagagaactccaactcaactgatacactctggcgccccatgcccaagctagccccccttggtttaaaggttgcaaacccatcaagcgacgcggacggtcaaagtctaaaggtaatgccgtgcctagccccgatcgccgccaaagtaggctctgtggggcataagatgaacctgacaggcaacgaccaagagggccgcgagagcaaggttatgccgactctggcacctgtggtggctaaattgggcaactccggggcatcgcctagcagcgctgggaagtag

SEQ ID NO: 62521 - DNA, 9198 bp, Artificial Sequence
  derived and/or modified sequence
atggaggaaaagcaacaaatcattcttgccaaccaagatggtggaaccgtggctggcgctgcccctacgttctttgtgatcctgaagcaacccggtaacgggaagaccgaccagggtatactcgttacgaatcaggatgcatgtgccctcgcgtcatctgtcagctccccagtaaagagcaaagggaagatttgcttacctgctgattgcactgtcgggggtatcactgtgacgcttgacaataactctatgtggaacgagttctaccacagatccacggaaatgatccttactaaacaaggcagaaggatgttcccgtactgtagatattggattaccggacttgatagcaacctcaagtacatactggtgatggatatttcaccagttgacaatcatcgatataagtggaatggcaggtggtgggagcccagcggaaaagcggagcctcacgtcctgggacgagttttcattcaccctgaaagccccagcactggtcactattggatgcatcagcctgtgtccttctacaagctgaagctgactaacaatacgctggaccaggagggccacattatcctgcacagcatgcataggtatctgcctagactacacctagtgcccgctgagaaagccgtcgaagtgatccaactgaatggtcccggagtgcatactttcactttcccccagacagaattcttcgccgtgaccgcttatcagaacattcagattactcagctaaaaattgattataatcccttcgccaaaggctttagagatgacggactgaataataagccacagcgcgacggcaaacaaaagaactcatcagaccaagagggtaacaatatcagctcctcatccggccaccgtgtccgtctcaccgaaggccaggggagtgaaatccagcccggagatttggatccgctgagtagaggacacgaaacttctggaaagggtttagagaaaacgagtctcaacattaaacgcgattttctgggcttcatggacactgacagtgctctttccgaggtaccccaattgaaacaggagatctcggagtgccttatcgcgagcagctttgaggacgatagtcgcgtagcctctcctctggaccagaatggctcttttaatgtagttattaaggaagaaccacttgatgattacgattatgagctcggcgagtgtcctgagggcgtcactgtcaaacaagaggagaccgatgaggagacagatgtgtacagtaacagtgatgatgatcccattttggagaagcagctgaagcgccataacaaggtcgacaacccagaagccgaccacctctccagcaagtggttaccttcttctcctagcggtgtagccaaggcaaaaatgtttaaactggatacaggaaagatgcccgttgtgtacttggagccttgcgcagtgacaagatctactgtgaagattagtgagctccccgataacatgctatccacaagtagaaaagacaaatcatccatgcttgccgagctggaatatctgcccacttacatcgagaacagcaatgagaccgccttctgcctgggaaaagaaagcgagaacggcctgcggaaacattctcctgacctgcgcgtggtccaaaagtatccccttctgaaggagcctcaatggaaatatccagatattagtgatagtataagtacagaacgtattttggacgatagtaaggactcggtaggcgacagtctttccgggaaggaagatctgggcagaaagagaaccacaatgcttaagatcgctacagctgctaaagtggtgaatgctaatcagaatgcatccccaaacgtgccaggcaagagagggaggccaaggaagttgaaactctgcaaggccggaaggccccctaaaaacaccggcaagtccttaatctctactaaaaatacaccagtcagccccggaagcaccttcccagatgtcaaaccggatctagaggatgttgatggcgtactattcgtgagcttcgagagcaaagaggctctcgacatacacgccgtggacgggactaccgaagaatcaagcagcctccaggctagcaccacaaacgactccggatatcgcgctcggatctctcagctggagaaggaactcatagaagacctgaaaacactgagacacaaacaagtaatccacccaggactgcaggaagtcggcctgaaactgaactctgtagatccaacgatgagtatcgatctgaagtacctaggcgtccaactgccgctcgccccagcgaccagcttcccgttctggaatttgacgggaacgaatccagccagtccggatgctggctttccctttgtgagtaggactggcaagacaaatgacttcaccaagattaagggctggcgcggtaagttccactcagcctccgcaagtcggaatgaggggggaaactccgaaagctctctgaagaatcgatccgcattttgcagcgacaaactagacgagtatttggaaaacgagggcaagctaatggagaccagtatgggatttagcagtaatgccccaactagtccggttgtgtatcaactgcctactaagtctacctcctatgttcgcactctagactctgtgctgaaaaagcagtctacgatcagcccatctacgtcgtactcactcaagccgcactctgtgcctcccgtgtcccggaaggctaaatcgcagaaccgccaagcgaccttttctggcaggacaaagagctcttacaaatctatcttgccttacccagtgagccccaaacaaaagtacagccacgtaatcctgggggacaaggttaccaaaaattcctccgggatcatttcggaaaatcaagccaataacttcgtagtccccaccttggacgaaaatatcttcccaaagcagatctcactcagacaggcacagcagcaacaacagcagcagcagggctcaagaccccctggactgtcaaagtcccaggtaaagctgatggatctcgaggattgcgccttgtgggaggggaaaccacgcacttatatcaccgaggagagggcagacgtatccctgactactttgctgacagcgcaggcgtcgctgaaaacaaaacctattcataccatcatccgaaagagagctccaccgtgtaacaacgacttctgccggctgggttgcgtgtgtagcagcctcgcgcttgaaaagagacagccagcacattgtagacggcctgattgtatgtttggttgcacttgtcttaaacgcaaggtggtccttgtgaaggggggttctaaaacgaaacattttcagcgaaaggcggcacacagagatcccgtattttatgacaccttaggggaggaagccagagaggaagaagaggggattcgtgaagaagaggagcagcttaaagagaagaagaagaggaagaaactcgagtacacaatctgcgaaactgagcccgaacagccagtgagacattaccctctctgggtgaaggttgaaggtgaggtcgatcctgagcctgtgtacattcccacgccttccgtaatcgaacccatgaagcccctgttactgccccagccggaggtgctgtcacccacggtgaagggtaagttgttaaccggtatcaagagccctcgcagctacacacctaaaccaaaccctgtaatccgcgaggaggacaaagacccagtgtacctgtattttgaatccatgatgacctgtgccagagttcgggtctatgaaagaaagaaagaggaccagaggcagcctagtagtagctctagcccctccccctccttccaacagcagactagctgtcattcttcacccgaaaaccataacaacgccaaagaaccagactctgaacagcaacccctaaaacagttgacatgtgacctcgaggatgactcagataagctccaggagaagtcctggaagtcaagttgcaacgagggagaatcatcttctacctcatacatgcatcagcggtcaccaggaggccctaccaagcttattgagatcatcagcgattgcaattgggaagaagacagaaacaaaatactgtcaatattgtcccaacatatcaattccaacatgccacagtcccttaaagtcgggtccttcatcatagaactggctagccagagaaagtcacgtggcgaaaagaatccacccgtgtattccagcagagttaagatctccatgccgtcatgtcaggatcaggatgatatggctgaaaaaagtggctcagaaacccccgacggcccactaagtcctggaaagatggaagatataagcccagtgcagactgatgcgctggactccgtcagggagcgtctgcacgggggtaaaggactaccgttttacgccggtttgtctccagccggtaaactcgtggcatataaacgcaaaccttctagcagcacaagtggactgattcaggtggccagcaatgccaaagtcgctgcctccagaaaaccacgcacattactcccgtccacttccaattccaaaatggcctcatcttctggcacggccactaacaggccaggtaaaaacctgaaggcatttgtgcccgctaaacgccctattgcggcaaggccctcgcccggaggggtgttcacacaatttgtaatgtcgaaagtaggagccttacaacagaaaatccctggtgttagcaccccacagaccttggccggtactcagaagttcagtatcaggccttccccggtgatggtcgtgactcccgttgtttcatccgaacctgtgcaggtgtgtagtcccgttacagccgctgtcacaaccacaactccacaggtctttctcgagaatactacggcggtgacccccatgactgcaataagtgatgtcgagacaaaggaaaccacctacagctccggtgcaacaacgacaggagtcgtggaggtcagcgagacaaacacaagtacctccgtgacctctacccagtccacggctactgttaatctaacaaagaccaccggcatcacaacccctgttgcctcagttgcttttcctaagtcactggtggctagtccctcaactatcaccctgccagtggcttctacagcttccacttctctggtggtggtgacagccgctgcatcaagtagcatggtcaccacgcccacctcatcattgggctccgtccctattatactctcagggattaatggcagtccaccggtcagccagcgccctgagaatgccgctcagattcctgtggcgacccctcaggtttcacctaatactgtgaagagggccggacctcggctgctgctaatcccagtccagcaaggctcccccactctgaggccggtgagcaacactcagctgcaaggccataggatggtattgcagccggttcggtccccaagtggaatgaatcttttccggcatccaaacggacaaattgtgcaactgttgcctctccatcagctgcgcggaagcaatacacagcccaatctccagcccgttatgttccggaatccaggaagtgtcatgggaatccggctcccagccccaagtaagccaagcgagacgcccccatcttcaacttctagttcagccttcagtgtgatgaaccctgtgatccaggccgtcggtagtagtagtgccgtcaatgttatcacgcaggccccatctctcctgtcctctggtgcgagtttcgtgtctcaggcgggtacgctcaccttgaggattagcccgcctgagccccaatcatttgcctcgaaaacaggctctgagaccaaaataacatattcgtctggagggcaaccagtgggtacagcaagtctgatacctttacagtctggttccttcgcactgctgcagcttcctggccaaaagccagtcccctctagtattctgcaacacgttgcttccctacagatgaagcgggagtcccaaaaccctgaccaaaaagacgagacgaactccattaagagagaacaggaaaccaagaaggtcctgcagtccgaaggggaagctgtagaccccgaggctaacgtgataaagcagaatagcggcgcagcgacaagtgaggaaactctgaacgattccctggaagatcggggagaccatttagacgaggagtgtctcccagaggaaggttgtgctacagtgaagcctagcgagcacagttgtatcaccgggagtcacacggaccaggactacaaagatgtgaacgaagaatacggcgctagaaaccgtaaatccagcaaggagaaagtggcagtgctggaggtgcggactatctcagagaaggcatcaaacaagacagtgcagaatctctccaaggtgcagcatcagaagctgggcgatgttaaagtggagcaacaaaaaggattcgataaccccgaagagaacagtagtgaatttcctgttacgtttaaagaagaatcaaaattcgaactctcggggtcgaaggtcatggagcagcagtcgaatcttcagcccgaagccaaagagaaagagtgcggggatagccttgagaaagatcgggagagatggagaaagcaccttaagggcccactgacgcggaaatgtgtcggcgcatcccaggagtgcaaaaaggaagccgacgagcaactcataaaagagaccaaaacgtgccaggagaacagcgacgtgtttcagcaggagcagggcatttccgacctcttgggcaagagcgggatcaccgaggacgccagggtgctcaagaccgaatgcgattcctggagccgcattagcaatccatctgcgttctctatcgttccgcgacgagccgcaaaatcctctcggggaaatggccacttccagggacaccttctcctgccgggagaacaaatccaacctaagcaggagaagaagggagggaggagtagtgccgattttacagtgctcgacttggaagaggatgacgaagacgacaatgagaagacagatgacagcattgacgagattgtcgacgtggtctccgattaccaatctgaagaagtcgatgacgtcgaaaaaaataattgcgtggagtatattgaggatgatgaggagcatgttgatatcgaaactgtggaggagctctcagaagagatcaacgtcgcccacctgaagaccactgctgctcatacccagtcatttaagcaaccgagttgcactcatatctccgctgatgagaaagctgctgagcgaagtaggaaggcaccgcctatccccctaaagctcaagcctgattattggtccgataagctgcaaaaagaagccgaagctttcgcatattataggcggacacatacagccaacgaacggagaagacggggtgagatgcgggatctgttcgagaaactgaagataacgttgggcctgctccattctagcaaggtaagcaagagcctaattttgaccagggcattttccgagatacaagggctgactgatcaggctgacaaactcattggacagaagaatttattgacccggaagaggaatatcctgatccgaaaggtgagctctctttcaggcaaaacggaggaagtggtgttgaagaaactagaatacatctatgcaaaacaacaagccctggaagcccaaaagcgtaaaaaaaagatgggcagcgacgaattcgacataagtcctcggataagcaagcagcaagaaggatcttccgcttcaagcgttgacctagggcaaatgttcataaataatcgccgaggcaaacccctcatcttatccagaaaaaaagatcaggcaacggagaatacgtccccactcaataccccgcatacttcagccaacctggtgatgacgcctcaaggccagcttcttactctaaaaggacctctgttcagtgggcctgtggtggctgtaagtccagatcttttggaatcagacttaaaaccccaggtggccggatcagcggtggccctgcccgaaaacgatgatctgttcatgatgcctaggattgttaacgtaacaagtctagcaacagagggcggactggtggatatggggggaagtaaatatcctcatgaggtgcctgattcaaagccctctgaccacctaaaagatactgttaggaatgaagataattccctagaggacaagggccgtataagttcccggggaaaccgagacggtcgagtgaccctcggaccaacccaggtgttcctggcaaacaaagattccgggtaccctcaaatcgtggacgtttccaatatgcaaaaagcgcaggagttcttgcccaagaagatttcaggggatatgcggggtattcagtacaagtggaaggagagtgaatcacggggtgaacgggtgaagtcgaaggacagtagttttcataagttgaaaatgaaggacctgaaggacagcagtatcgaaatggaattgcggaaggtaactagcgccattgaagaggcagccctagattcatctgagctactgacaaatatggaggacgaggacgatacggatgaaactctgacctccctgttgaacgaaatcgccttcctgaaccagcagctgaacgatgattctgtcggactcgccgaactcccaagctccatggataccgaattcccaggcgacgccaggcgcgcattcatctcgaaggtgccccctgggagtagggctaccttccaggtggaacatctgggcaccggcttgaaagagctgcctgacgtgcaaggggagagcgattcaatttcaccattacttttacatctagaagatgatgacttttcggaaaacgagaaacaattagccgagcctgctagcgagcctgatgtcctgaagatagtcatcgactctgaaataaaagatagcctcctctcaaacaagaaagcaattgatggcggaaaaaacacctctgggctgcccgcagaacctgagtcagtgtccagccccccaaccttacatatgaaaaccggcttggaaaattctaattcaacggataccttgtggcggccaatgcctaagctggcgcctctggggctgaaagttgccaacccatcctccgacgctgacggccagtccctgaaggtgatgccatgcttagccccaattgcagccaaagttggatccgttggacacaagatgaacctgaccgggaacgaccaagaggggagggagagcaaggtgatgcccacattagcccctgtggtggcaaagctcggcaactctggagcatcgccttcgagcgctggaaaatag

SEQ ID NO: 62522 - DNA, 9080 bp, Artificial Sequence
  derived and/or modified sequence
atggaagaaaagcagcagattattttagctaatcaggatgggggaacggtggccggagccgcacctacattcttcgtgattcttaagcaaccaggcaatggcaaaacggaccaaggaattctggtcaccaatcaggatgcttgtgcgctcgcctcaagcgtgagtagtcccgtgaagtccaaaggaaagatttgtctacctgctgattgcaccgtggggggtattaccgtaactttggacaataactcgatgtggaacgagttctatcaccgaagcactgagatgatcctgactaaacagggaagaagaatgttcccttattgccgctattggattaccggactggactctaatctcaaatacatcctcgtcatggatatcagtccagtggacaatcaccgttacaagtggaatggccgttggtgggagccaagcgggaaagccgagcctcacgtgctgggaagggtcttcattcatcccgaatccccaagtaccggacactattggatgcaccagcccgtgagcttctataaattgaaactgaccaacaatactctggaccaagagggacacattattctgcactctatgcatagatatcttccaaggctgcacctggtgcccgcagagaaggccgtcgaggtgatccagctgaacggcccaggcgttcataccttcacctttccacagactgaatttttcgctgttactgcctaccagaacattcagattacccagctcaagatcgactataacccattcgctaaggggttccgagacgatggtctgaacaacaagccccaacgcgatgggaagcaaaaaaacagctctgaccaggaaggtaataacatctcctcatctagcgggcaccgtgtccgtctgaccgaaggccaggggagcgaaatacagccaggagatctggaccccctatcccggggacacgagacgagcggaaaaggcctcgaaaaaactagcttaaacataaagcgggatttcttagggtttatggatacggattccgctttgtcagaggttccccaactgaagcaagaaattagcgaatgccttatagcatcgtcattcgaggatgattcgagagtagcatcccctctggatcagaatggatccttcaatgtggtcatcaaagaggaaccactggacgattacgactatgagctcggcgagtgtcccgagggtgtgacagttaagcaggaggagacggacgaagaaacagatgtctacagcaacagcgacgacgacccgattctggagaagcagctaaaacgccacaataaggtggacaacccagaagcagaccatttgagtagcaagtggctccccagcagcccgagcggggttgccaaggccaaaatgtttaagcttgacacgggaaaaatgcccgtcgtgtacctggaaccttgtgccgtaacaaggagtaccgtcaagatttctgagctccctgataatatgctgagcacaagcaggaaggacaagagttcgatgctagctgagctagagtatctgcccacatacatcgaaaattctaacgaaacagctttttgtcttgggaaagagtccgagaacggactgcgcaaacatagcccagatcttcgagttgtgcaaaagtatcctctgctcaaagagccccaatggaagtaccctgacatttctgacagtatttccactgagcgcattttggatgacagtaaggatagcgtgggggatagcctgagtggcaaagaagaccttgggagaaagaggacaactatgctgaaaattgctactgctgcgaaggtcgtgaacgctaaccaaaatgccagcccaaacgtgcccggaaaaaggggaagacccaggaagctgaagttatgtaaggccggacggccaccgaagaatacaggaaagtctctgatctcaacaaagaatactcctgtatcccccggaagtacttttccagatgtgaaacccgacctggaagacgtcgacggagtgctcttcgtgtcgttcgaatccaaagaggccctcgacattcacgctgtggatgggacaaccgaggagagcagttctcttcaggcctcaaccacaaacgatagtggataccgagcccgtatttcacagctggaaaaagaactgatcgaggacttgaagactctgaggcacaagcaggtaatccatccgggtctgcaggaagtcgggttaaaattgaattcggtggaccctacaatgagcattgatttaaagtacttaggcgtgcagctccctcttgcccctgcgactagctttccattttggaacctgacaggcaccaaccccgcaagtcccgacgcaggcttcccttttgtcagcaggacaggcaaaaccaatgactttacaaagatcaaagggtggcgcggtaagtttcactctgccagcgccagtaggaacgagggcggaaacagcgaatcttcgctgaaaaataggtccgcgttctgctccgataaacttgatgaatacctagagaatgaaggaaaactcatggagacctctatgggcttttcatcaaacgcaccaacgagtccggttgtttatcaacttcctaccaagtctacttcctacgtgaggaccctggattcggttttgaaaaaacagagcaccatctcaccaagcacctcatattccttgaaaccccacagtgtccctcccgtcagcaggaaggctaagtcacagaatcgtcaggcgaccttttccggccgaacaaagagcagctataagagcatcctaccttaccccgtttctcccaaacagaaatatagtcacgtgattctcggcgacaaagttactaaaaattcctcaggtattatatccgagaaccaagccaataacttcgtcgtaccaaccttggacgaaaacattttcccaaagcaaatttccctccgacaagctcagcaacagcagcaacagcagcagggctctcggccacctggccttagtaaaagccaagtgaaacttatggacctcgaagactgcgctctctgggaagggaagcctcgcacatacatcacagaggagagggccgacgtgagtcttacaacacttcttacggcacaagctagcctgaagacaaaacccattcatactatcataaggaagcgggctcctccttgtaataacgacttttgtcggctcggatgcgtgtgctcatctctcgcgctggagaaaagacaaccagcccactgcaggaggccagactgtatgttcggttgcacatgcttgaagcgtaaagttgtgcttgtgaaaggaggaagcaagaccaagcacttccagcgaaaagccgcacaccgcgaccccgtattttacgatacgttaggagaagaggcaagggaggaagaggaagggatccgagaagaggaggagcagctgaaagagaagaaaaaaaggaagaagttggagtacaccatctgtgaaaccgaacctgagcagcctgtccgacactatcccctgtgggttaaggttgaaggcgaagtggaccctgagccggtgtatatccccacacccagcgtgatcgaacccatgaaaccacttctactcccacaaccagaggttctgtcacctacagttaaaggaaagctgctgacggggattaaaagtcctaggtcttatacccctaaacccaaccctgtgatccgggaggaggataaggaccccgtgtatctgtacttcgagtccatgatgacctgcgcacgggtgcgcgtgtacgaaaggaagaaggaggatcaaaggcagccatctagttccagttcaccctcaccctcctttcagcagcagactagttgtcattcaagtccggagaaccacaataacgcaaaggagccagattctgagcagcagcctctgaagcagcttacctgtgacctggaagatgatagtgacaaactccaggaaaagtcctggaagtccagctgtaacgagggtgaatcatctagtacatcctacatgcatcagagaagtcctggtgggcctaccaagttaatcgagatcattagcgattgcaactgggaagaggatcgcaacaagattttgagtattctttctcagcacattaatagcaacatgccccagtcgctgaaagtgggaagcttcattattgagctggcctcccagcgtaagagcagaggcgagaagaacccacctgtgtacagttcccgcgtcaagatttcaatgccaagctgccaggaccaggacgatatggctgagaaatccggtagcgagacaccagatgggcctttgagccccggtaagatggaggacatatcgcccgtccagactgacgccctggactccgtgagagagaggctgcacgggggtaaggggctccctttttatgccggtctcagcccggctggtaaactggtcgcctacaagagaaagccctctagtagtacttctgggctgattcaggtggccagcaatgccaaggtggctgcatctcgtaagccacgcacactgctgccttctacaagcaactcgaaaatggccagctctagcggaacagcaaccaataggcccggaaagaatttgaaagcgtttgtacccgctaagcgtccgatcgccgctagaccttcgcctggcggagtattcacccaattcgtgatgtctaaggtcggcgcactccagcagaagatcccgggtgtctccaccccccaaaccctcgcaggtacgcaaaagtttagcattaggccatcgcctgtgatggtggtcacccccgtggtctcctctgaaccggtacaggtatgctcccccgtgactgccgctgtgaccacaacaacacctcaagtctttttggagaacaccactgccgtcacccccatgaccgcaatcagcgacgtcgagaccaaagagacaacatactcctctggtgccacaacaactggcgtggtggaagtgagtgagaccaacacttctacatctgtcactagtacccagagtaccgccactgtgaacctgacgaaaaccacgggcataactacccctgtggctagcgttgcctttcctaagagcctggttgcctcaccttccacaattaccctgcccgttgcgtccactgcttctacgtccttggttgttgtgactgccgctgcctccagcagcatggtgacgaccccaacttccagtctggggagcgttcccatcattctgtcagggattaatgggagccctccagttagccagaggcctgaaaacgcagcacagatcccggtcgccactccgcaggttagcccaaacacagtcaagcgagccggtcccagactcttacaccctaatggccagattgtgcagctcttgcccctccatcaactacgaggctccaatacacagcctaacttacagcccgtaatgtttagaaaccccggaagcgtgatgggtatccgcctgcctgcacctagcaaaccatctgaaacacctccaagtagtacatcatcatcagctttcagtgtcatgaatcctgtgatacaggcagtgggatccagttctgcggtcaatgttatcactcaagccccatccctgttatcttctggtgcttcttttgttagtcaggccggaaccctcaccctgagaatatcgccccctgagccccagtcattcgccagcaaaaccggctctgagaccaagattacatacagttccggaggacaaccagtgggtacggcctctcttatccctttgcagagcgggtcatttgctctgttgcaactccctggtcagaagcccgttcccagctcaattctacagcatgtcgcgagtcttcagatgaagagagaatcccagaatcctgatcagaaggatgaaaccaactctatcaaacgcgagcaagagaccaagaaggtgctgcaatccgaaggagaggcagtcgaccccgaggcaaacgtgattaagcagaactcaggggctgcaaccagcgaggagactctgaacgatagcctggaggataggggcgaccacttggatgaggagtgcctgcctgaggaaggctgtgcgactgtgaagccctcagagcatagctgcattactgggagtcataccgatcaagactacaaagatgtgaatgaggaatatggagccaggaatcgaaaaagctctaaggaaaaagtggctgtgcttgaagttcgaaccatctcagagaaggcctcaaacaagacagtgcaaaatctttcaaaggtgcaacatcaaaagctgggggatgttaaggtggaacaacagaaggggttcgacaaccctgaagagaactcatctgaattccctgtcactttcaaggaggaaagcaaattcgagctgagcgggagcaaagtgatggagcagcagtccaacctgcagcctgaagcaaaagagaaagagtgtggcgactctctggagaaggacagagaacgatggaggaagcacctgaaaggcccattgactcgcaaatgcgtgggggcaagtcaggaatgcaagaaagaagccgacgaacagctgatcaaggaaacaaagacctgtcaggaaaactccgatgttttccagcaggaacagggcatctctgatctgctgggaaaatccgggatcacagaggatgcacgcgtcttgaaaacggaatgtgactcctggagcagaatcagcaatccttctgctttctccatcgtaccacgaagagccgctaaatcgtctcggggtaatgggcacttccagggtcacctcctgttgccaggcgagcagatccagccaaaacaggaaaagaaggggggtcgcagtagcgccgattttaccgttctcgatttagaagaggatgatgaagacgataacgaaaagactgacgattcaattgacgagattgttgatgtggtcagcgactaccagtccgaggaggttgacgatgtggagaaaaataactgtgtggaatacatagaagacgacgaagagcatgttgatattgaaaccgttgaggagctgtctgaggagatcaacgttgctcacctcaaaaccaccgcggctcacacacagtctttcaagcaaccaagctgtacgcatattagtgccgatgaaaaggctgccgagaggagcaggaaggcccctcccataccgctgaaactaaaacctgattattggtctgacaagctacagaaggaagctgaagctttcgcctattataggagaacccatacagcaaatgaacgcagaagaaggggagagatgcgagacctatttgagaagctcaaaatcacgctcggattactgcacagctccaaggtgtcaaaaagtctgattctgactcgtgctttctcggaaatccagggattgactgatcaagccgacaagctgatcggccagaagaatctgcttacccggaagcggaacatcctcatccggaaagtgtcttctctgtccgggaagacagaggaggtcgtgctaaagaagctggagtacatatatgccaagcagcaggcgttagaagcccagaaacggaagaaaaagatgggcagtgacgagttcgatatctccccacgtatctcaaaacaacaagaaggcagctctgcctcatcggttgacttaggacagatgttcatcaataatagaagaggaaagcccctgattctaagccgcaagaaggatcaggccactgagaatacatcgccactcaacactccacatacctccgctaatcttgtaatgaccccccagggccagttgctgactctaaagggaccattattcagcgggcctgttgtagctgtgtcccccgatctgttggagtccgatctcaagccacaggtggctggctccgccgttgcccttcctgaaaacgacgacctgttcatgatgccaagaatcgtcaacgtgacgagtcttgccactgagggtgggttggttgatatgggcggttcaaaatatccacatgaggtccctgatagcaaaccctccgaccacctcaaggatacagtccggaatgaagataacagtcttgaggataaggggaggatctcctctcgcggtaacagggatggaagggtgaccctcggccctacacaggtgttcctggccaacaaagactctggatacccacagatcgtggatgtgtcaaatatgcaaaaggctcaggaattcctgcctaagaagatctcgggagacatgaggggcatccagtataaatggaaggagtccgaatcccggggagaacgggtcaaaagcaaagattcgtctttccataaactgaaaatgaaagacctaaaagacagcagcatcgagatggagctgcgtaaggtgacctcagcaatagaggaggcggcactcgattcttccgaattgcttacaaacatggaagatgaagacgacacggacgagaccttgactagcctgcttaacgaaatagccttcttaaatcagcaactgaacgatgacagcgtcggccttgcagagttgccgagtagtatggacaccgaattcccgggtgatgccaggcgggcttttatatctaaggtccccccaggctcccgcgctacattccaagtggagcatctgggtaccggcctaaaagagctcccggacgtgcagggggagtccgattctatcagcccactgctcctccatctggaggatgacgatttttcggagaacgaaaaacaattggctgaacctgcctccgaaccagatgtgctgaagatagtgatcgactctgagattaaggactcactgctctctaataaaaaagccatcgacggcggtaaaaatacctctggcctgcccgctgagcctgagagcgtgtcttctccacccactctccatatgaaaacgggcctggagaattcaaacagcactgatacactgtggaggcccatgccgaagctggcccctctgggcctgaaggtcgctaatcccagctcagacgccgacggccagagcctcaaagtgatgccatgcctcgctccgattgctgctaaagtcggatccgtgggtcacaagatgaacttgaccggtaatgatcaggagggtagagagtccaaggtcatgcccactctggccccagtcgtggcgaaactgggcaacagtggtgcctcacccagcagtgccggtaaata

SEQ ID NO: 62523 - DNA, 9198 bp, Artificial Sequence
  derived and/or modified sequence
atggaggagaagcagcagatcatcctggccaaccaggacggcggcaccgtggccggcgccgcccccaccttcttcgtgatcctgaagcagcccggcaacggcaagaccgaccagggcatcctggtgaccaaccaggacgcctgcgccctggccagcagcgtgagcagccccgtgaagagcaagggcaagatctgcctgcccgccgactgcaccgtgggcggcatcaccgtgaccctggacaacaacagcatgtggaacgagttctaccacagaagcaccgagatgatcctgaccaagcagggcagaagaatgttcccctactgcagatactggatcaccggcctggacagcaacctgaagtacatcctggtgatggacatcagccccgtggacaaccacagatacaagtggaacggcagatggtgggagcccagcggcaaggccgagccccacgtgctgggcagagtgttcatccaccccgagagccccagcaccggccactactggatgcaccagcccgtgagcttctacaagctgaagctgaccaacaacaccctggaccaggagggccacatcatcctgcacagcatgcacagatacctgcccagactgcacctggtgcccgccgagaaggccgtggaggtgatccagctgaacggccccggcgtgcacaccttcaccttcccccagaccgagttcttcgccgtgaccgcctaccagaacatccagatcacccagctgaagatcgactacaaccccttcgccaagggcttcagagacgacggcctgaacaacaagccccagagagacggcaagcagaagaacagcagcgaccaggagggcaacaacatcagcagcagcagcggccacagagtgagactgaccgagggccagggcagcgagatccagcccggcgacctggaccccctgagcagaggccacgagaccagcggcaagggcctggagaagaccagcctgaacatcaagagagacttcctgggcttcatggacaccgacagcgccctgagcgaggtgccccagctgaagcaggagatcagcgagtgcctgatcgccagcagcttcgaggacgacagcagagtggccagccccctggaccagaacggcagcttcaacgtggtgatcaaggaggagcccctggacgactacgactacgagctgggcgagtgccccgagggcgtgaccgtgaagcaggaggagaccgacgaggagaccgacgtgtacagcaacagcgacgacgaccccatcctggagaagcagctgaagagacacaacaaggtggacaaccccgaggccgaccacctgagcagcaagtggctgcccagcagccccagcggcgtggccaaggccaagatgttcaagctggacaccggcaagatgcccgtggtgtacctggagccctgcgccgtgaccagaagcaccgtgaagatcagcgagctgcccgacaacatgctgagcaccagcagaaaggacaagagcagcatgctggccgagctggagtacctgcccacctacatcgagaacagcaacgagaccgccttctgcctgggcaaggagagcgagaacggcctgagaaagcacagccccgacctgagagtggtgcagaagtaccccctgctgaaggagccccagtggaagtaccccgacatcagcgacagcatcagcaccgagagaatcctggacgacagcaaggacagcgtgggcgacagcctgagcggcaaggaggacctgggcagaaagagaaccaccatgctgaagatcgccaccgccgccaaggtggtgaacgccaaccagaacgccagccccaacgtgcccggcaagagaggcagacccagaaagctgaagctgtgcaaggccggcagaccccccaagaacaccggcaagagcctgatcagcaccaagaacacccccgtgagccccggcagcaccttccccgacgtgaagcccgacctggaggacgtggacggcgtgctgttcgtgagcttcgagagcaaggaggccctggacatccacgccgtggacggcaccaccgaggagagcagcagcctgcaggccagcaccaccaacgacagcggctacagagccagaatcagccagctggagaaggagctgatcgaggacctgaagaccctgagacacaagcaggtgatccaccccggcctgcaggaggtgggcctgaagctgaacagcgtggaccccaccatgagcatcgacctgaagtacctgggcgtgcagctgcccctggcccccgccaccagcttccccttctggaacctgaccggcaccaaccccgccagccccgacgccggcttccccttcgtgagcagaaccggcaagaccaacgacttcaccaagatcaagggctggagaggcaagttccacagcgccagcgccagcagaaacgagggcggcaacagcgagagcagcctgaagaacagaagcgccttctgcagcgacaagctggacgagtacctggagaacgagggcaagctgatggagaccagcatgggcttcagcagcaacgcccccaccagccccgtggtgtaccagctgcccaccaagagcaccagctacgtgagaaccctggacagcgtgctgaagaagcagagcaccatcagccccagcaccagctacagcctgaagccccacagcgtgccccccgtgagcagaaaggccaagagccagaacagacaggccaccttcagcggcagaaccaagagcagctacaagagcatcctgccctaccccgtgagccccaagcagaagtacagccacgtgatcctgggcgacaaggtgaccaagaacagcagcggcatcatcagcgagaaccaggccaacaacttcgtggtgcccaccctggacgagaacatcttccccaagcagatcagcctgagacaggcccagcagcagcagcagcagcagcagggcagcagaccccccggcctgagcaagagccaggtgaagctgatggacctggaggactgcgccctgtgggagggcaagcccagaacctacatcaccgaggagagagccgacgtgagcctgaccaccctgctgaccgcccaggccagcctgaagaccaagcccatccacaccatcatcagaaagagagcccccccctgcaacaacgacttctgcagactgggctgcgtgtgcagcagcctggccctggagaagagacagcccgcccactgcagaagacccgactgcatgttcggctgcacctgcctgaagagaaaggtggtgctggtgaagggcggcagcaagaccaagcacttccagagaaaggccgcccacagagaccccgtgttctacgacaccctgggcgaggaggccagagaggaggaggagggcatcagagaggaggaggagcagctgaaggagaagaagaagagaaagaagctggagtacaccatctgcgagaccgagcccgagcagcccgtgagacactaccccctgtgggtgaaggtggagggcgaggtggaccccgagcccgtgtacatccccacccccagcgtgatcgagcccatgaagcccctgctgctgccccagcccgaggtgctgagccccaccgtgaagggcaagctgctgaccggcatcaagagccccagaagctacacccccaagcccaaccccgtgatcagagaggaggacaaggaccccgtgtacctgtacttcgagagcatgatgacctgcgccagagtgagagtgtacgagagaaagaaggaggaccagagacagcccagcagcagcagcagccccagccccagcttccagcagcagaccagctgccacagcagccccgagaaccacaacaacgccaaggagcccgacagcgagcagcagcccctgaagcagctgacctgcgacctggaggacgacagcgacaagctgcaggagaagagctggaagagcagctgcaacgagggcgagagcagcagcaccagctacatgcaccagagaagccccggcggccccaccaagctgatcgagatcatcagcgactgcaactgggaggaggacagaaacaagatcctgagcatcctgagccagcacatcaacagcaacatgccccagagcctgaaggtgggcagcttcatcatcgagctggccagccagagaaagagcagaggcgagaagaacccccccgtgtacagcagcagagtgaagatcagcatgcccagctgccaggaccaggacgacatggccgagaagagcggcagcgagacccccgacggccccctgagccccggcaagatggaggacatcagccccgtgcagaccgacgccctggacagcgtgagagagagactgcacggcggcaagggcctgcccttctacgccggcctgagccccgccggcaagctggtggcctacaagagaaagcccagcagcagcaccagcggcctgatccaggtggccagcaacgccaaggtggccgccagcagaaagcccagaaccctgctgcccagcaccagcaacagcaagatggccagcagcagcggcaccgccaccaacagacccggcaagaacctgaaggccttcgtgcccgccaagagacccatcgccgccagacccagccccggcggcgtgttcacccagttcgtgatgagcaaggtgggcgccctgcagcagaagatccccggcgtgagcaccccccagaccctggccggcacccagaagttcagcatcagacccagccccgtgatggtggtgacccccgtggtgagcagcgagcccgtgcaggtgtgcagccccgtgaccgccgccgtgaccaccaccaccccccaggtgttcctggagaacaccaccgccgtgacccccatgaccgccatcagcgacgtggagaccaaggagaccacctacagcagcggcgccaccaccaccggcgtggtggaggtgagcgagaccaacaccagcaccagcgtgaccagcacccagagcaccgccaccgtgaacctgaccaagaccaccggcatcaccacccccgtggccagcgtggccttccccaagagcctggtggccagccccagcaccatcaccctgcccgtggccagcaccgccagcaccagcctggtggtggtgaccgccgccgccagcagcagcatggtgaccacccccaccagcagcctgggcagcgtgcccatcatcctgagcggcatcaacggcagcccccccgtgagccagagacccgagaacgccgcccagatccccgtggccaccccccaggtgagccccaacaccgtgaagagagccggccccagactgctgctgatccccgtgcagcagggcagccccaccctgagacccgtgagcaacacccagctgcagggccacagaatggtgctgcagcccgtgagaagccccagcggcatgaacctgttcagacaccccaacggccagatcgtgcagctgctgcccctgcaccagctgagaggcagcaacacccagcccaacctgcagcccgtgatgttcagaaaccccggcagcgtgatgggcatcagactgcccgcccccagcaagcccagcgagaccccccccagcagcaccagcagcagcgccttcagcgtgatgaaccccgtgatccaggccgtgggcagcagcagcgccgtgaacgtgatcacccaggcccccagcctgctgagcagcggcgccagcttcgtgagccaggccggcaccctgaccctgagaatcagcccccccgagccccagagcttcgccagcaagaccggcagcgagaccaagatcacctacagcagcggcggccagcccgtgggcaccgccagcctgatccccctgcagagcggcagcttcgccctgctgcagctgcccggccagaagcccgtgcccagcagcatcctgcagcacgtggccagcctgcagatgaagagagagagccagaaccccgaccagaaggacgagaccaacagcatcaagagagagcaggagaccaagaaggtgctgcagagcgagggcgaggccgtggaccccgaggccaacgtgatcaagcagaacagcggcgccgccaccagcgaggagaccctgaacgacagcctggaggacagaggcgaccacctggacgaggagtgcctgcccgaggagggctgcgccaccgtgaagcccagcgagcacagctgcatcaccggcagccacaccgaccaggactacaaggacgtgaacgaggagtacggcgccagaaacagaaagagcagcaaggagaaggtggccgtgctggaggtgagaaccatcagcgagaaggccagcaacaagaccgtgcagaacctgagcaaggtgcagcaccagaagctgggcgacgtgaaggtggagcagcagaagggcttcgacaaccccgaggagaacagcagcgagttccccgtgaccttcaaggaggagagcaagttcgagctgagcggcagcaaggtgatggagcagcagagcaacctgcagcccgaggccaaggagaaggagtgcggcgacagcctggagaaggacagagagagatggagaaagcacctgaagggccccctgaccagaaagtgcgtgggcgccagccaggagtgcaagaaggaggccgacgagcagctgatcaaggagaccaagacctgccaggagaacagcgacgtgttccagcaggagcagggcatcagcgacctgctgggcaagagcggcatcaccgaggacgccagagtgctgaagaccgagtgcgacagctggagcagaatcagcaaccccagcgccttcagcatcgtgcccagaagagccgccaagagcagcagaggcaacggccacttccagggccacctgctgctgcccggcgagcagatccagcccaagcaggagaagaagggcggcagaagcagcgccgacttcaccgtgctggacctggaggaggacgacgaggacgacaacgagaagaccgacgacagcatcgacgagatcgtggacgtggtgagcgactaccagagcgaggaggtggacgacgtggagaagaacaactgcgtggagtacatcgaggacgacgaggagcacgtggacatcgagaccgtggaggagctgagcgaggagatcaacgtggcccacctgaagaccaccgccgcccacacccagagcttcaagcagcccagctgcacccacatcagcgccgacgagaaggccgccgagagaagcagaaaggccccccccatccccctgaagctgaagcccgactactggagcgacaagctgcagaaggaggccgaggccttcgcctactacagaagaacccacaccgccaacgagagaagaagaagaggcgagatgagagacctgttcgagaagctgaagatcaccctgggcctgctgcacagcagcaaggtgagcaagagcctgatcctgaccagagccttcagcgagatccagggcctgaccgaccaggccgacaagctgatcggccagaagaacctgctgaccagaaagagaaacatcctgatcagaaaggtgagcagcctgagcggcaagaccgaggaggtggtgctgaagaagctggagtacatctacgccaagcagcaggccctggaggcccagaagagaaagaagaagatgggcagcgacgagttcgacatcagccccagaatcagcaagcagcaggagggcagcagcgccagcagcgtggacctgggccagatgttcatcaacaacagaagaggcaagcccctgatcctgagcagaaagaaggaccaggccaccgagaacaccagccccctgaacaccccccacaccagcgccaacctggtgatgaccccccagggccagctgctgaccctgaagggccccctgttcagcggccccgtggtggccgtgagccccgacctgctggagagcgacctgaagccccaggtggccggcagcgccgtggccctgcccgagaacgacgacctgttcatgatgcccagaatcgtgaacgtgaccagcctggccaccgagggcggcctggtggacatgggcggcagcaagtacccccacgaggtgcccgacagcaagcccagcgaccacctgaaggacaccgtgagaaacgaggacaacagcctggaggacaagggcagaatcagcagcagaggcaacagagacggcagagtgaccctgggccccacccaggtgttcctggccaacaaggacagcggctacccccagatcgtggacgtgagcaacatgcagaaggcccaggagttcctgcccaagaagatcagcggcgacatgagaggcatccagtacaagtggaaggagagcgagagcagaggcgagagagtgaagagcaaggacagcagcttccacaagctgaagatgaaggacctgaaggacagcagcatcgagatggagctgagaaaggtgaccagcgccatcgaggaggccgccctggacagcagcgagctgctgaccaacatggaggacgaggacgacaccgacgagaccctgaccagcctgctgaacgagatcgccttcctgaaccagcagctgaacgacgacagcgtgggcctggccgagctgcccagcagcatggacaccgagttccccggcgacgccagaagagccttcatcagcaaggtgccccccggcagcagagccaccttccaggtggagcacctgggcaccggcctgaaggagctgcccgacgtgcagggcgagagcgacagcatcagccccctgctgctgcacctggaggacgacgacttcagcgagaacgagaagcagctggccgagcccgccagcgagcccgacgtgctgaagatcgtgatcgacagcgagatcaaggacagcctgctgagcaacaagaaggccatcgacggcggcaagaacaccagcggcctgcccgccgagcccgagagcgtgagcagcccccccaccctgcacatgaagaccggcctggagaacagcaacagcaccgacaccctgtggagacccatgcccaagctggcccccctgggcctgaaggtggccaaccccagcagcgacgccgacggccagagcctgaaggtgatgccctgcctggcccccatcgccgccaaggtgggcagcgtgggccacaagatgaacctgaccggcaacgaccaggagggcagagagagcaaggtgatgcccaccctggcccccgtggtggccaagctgggcaacagcggcgccagccccagcagcgccggcaagtag

SEQ ID NO: 62524 - DNA, 9081 bp, Artificial Sequence
  derived and/or modified sequence
atggaggagaagcagcagatcatcctggccaaccaggacggcggcaccgtggccggcgccgcccccaccttcttcgtgatcctgaagcagcccggcaacggcaagaccgaccagggcatcctggtgaccaaccaggacgcctgcgccctggccagcagcgtgagcagccccgtgaagagcaagggcaagatctgcctgcccgccgactgcaccgtgggcggcatcaccgtgaccctggacaacaacagcatgtggaacgagttctaccacagaagcaccgagatgatcctgaccaagcagggcagaagaatgttcccctactgcagatactggatcaccggcctggacagcaacctgaagtacatcctggtgatggacatcagccccgtggacaaccacagatacaagtggaacggcagatggtgggagcccagcggcaaggccgagccccacgtgctgggcagagtgttcatccaccccgagagccccagcaccggccactactggatgcaccagcccgtgagcttctacaagctgaagctgaccaacaacaccctggaccaggagggccacatcatcctgcacagcatgcacagatacctgcccagactgcacctggtgcccgccgagaaggccgtggaggtgatccagctgaacggccccggcgtgcacaccttcaccttcccccagaccgagttcttcgccgtgaccgcctaccagaacatccagatcacccagctgaagatcgactacaaccccttcgccaagggcttcagagacgacggcctgaacaacaagccccagagagacggcaagcagaagaacagcagcgaccaggagggcaacaacatcagcagcagcagcggccacagagtgagactgaccgagggccagggcagcgagatccagcccggcgacctggaccccctgagcagaggccacgagaccagcggcaagggcctggagaagaccagcctgaacatcaagagagacttcctgggcttcatggacaccgacagcgccctgagcgaggtgccccagctgaagcaggagatcagcgagtgcctgatcgccagcagcttcgaggacgacagcagagtggccagccccctggaccagaacggcagcttcaacgtggtgatcaaggaggagcccctggacgactacgactacgagctgggcgagtgccccgagggcgtgaccgtgaagcaggaggagaccgacgaggagaccgacgtgtacagcaacagcgacgacgaccccatcctggagaagcagctgaagagacacaacaaggtggacaaccccgaggccgaccacctgagcagcaagtggctgcccagcagccccagcggcgtggccaaggccaagatgttcaagctggacaccggcaagatgcccgtggtgtacctggagccctgcgccgtgaccagaagcaccgtgaagatcagcgagctgcccgacaacatgctgagcaccagcagaaaggacaagagcagcatgctggccgagctggagtacctgcccacctacatcgagaacagcaacgagaccgccttctgcctgggcaaggagagcgagaacggcctgagaaagcacagccccgacctgagagtggtgcagaagtaccccctgctgaaggagccccagtggaagtaccccgacatcagcgacagcatcagcaccgagagaatcctggacgacagcaaggacagcgtgggcgacagcctgagcggcaaggaggacctgggcagaaagagaaccaccatgctgaagatcgccaccgccgccaaggtggtgaacgccaaccagaacgccagccccaacgtgcccggcaagagaggcagacccagaaagctgaagctgtgcaaggccggcagaccccccaagaacaccggcaagagcctgatcagcaccaagaacacccccgtgagccccggcagcaccttccccgacgtgaagcccgacctggaggacgtggacggcgtgctgttcgtgagcttcgagagcaaggaggccctggacatccacgccgtggacggcaccaccgaggagagcagcagcctgcaggccagcaccaccaacgacagcggctacagagccagaatcagccagctggagaaggagctgatcgaggacctgaagaccctgagacacaagcaggtgatccaccccggcctgcaggaggtgggcctgaagctgaacagcgtggaccccaccatgagcatcgacctgaagtacctgggcgtgcagctgcccctggcccccgccaccagcttccccttctggaacctgaccggcaccaaccccgccagccccgacgccggcttccccttcgtgagcagaaccggcaagaccaacgacttcaccaagatcaagggctggagaggcaagttccacagcgccagcgccagcagaaacgagggcggcaacagcgagagcagcctgaagaacagaagcgccttctgcagcgacaagctggacgagtacctggagaacgagggcaagctgatggagaccagcatgggcttcagcagcaacgcccccaccagccccgtggtgtaccagctgcccaccaagagcaccagctacgtgagaaccctggacagcgtgctgaagaagcagagcaccatcagccccagcaccagctacagcctgaagccccacagcgtgccccccgtgagcagaaaggccaagagccagaacagacaggccaccttcagcggcagaaccaagagcagctacaagagcatcctgccctaccccgtgagccccaagcagaagtacagccacgtgatcctgggcgacaaggtgaccaagaacagcagcggcatcatcagcgagaaccaggccaacaacttcgtggtgcccaccctggacgagaacatcttccccaagcagatcagcctgagacaggcccagcagcagcagcagcagcagcagggcagcagaccccccggcctgagcaagagccaggtgaagctgatggacctggaggactgcgccctgtgggagggcaagcccagaacctacatcaccgaggagagagccgacgtgagcctgaccaccctgctgaccgcccaggccagcctgaagaccaagcccatccacaccatcatcagaaagagagcccccccctgcaacaacgacttctgcagactgggctgcgtgtgcagcagcctggccctggagaagagacagcccgcccactgcagaagacccgactgcatgttcggctgcacctgcctgaagagaaaggtggtgctggtgaagggcggcagcaagaccaagcacttccagagaaaggccgcccacagagaccccgtgttctacgacaccctgggcgaggaggccagagaggaggaggagggcatcagagaggaggaggagcagctgaaggagaagaagaagagaaagaagctggagtacaccatctgcgagaccgagcccgagcagcccgtgagacactaccccctgtgggtgaaggtggagggcgaggtggaccccgagcccgtgtacatccccacccccagcgtgatcgagcccatgaagcccctgctgctgccccagcccgaggtgctgagccccaccgtgaagggcaagctgctgaccggcatcaagagccccagaagctacacccccaagcccaaccccgtgatcagagaggaggacaaggaccccgtgtacctgtacttcgagagcatgatgacctgcgccagagtgagagtgtacgagagaaagaaggaggaccagagacagcccagcagcagcagcagccccagccccagcttccagcagcagaccagctgccacagcagccccgagaaccacaacaacgccaaggagcccgacagcgagcagcagcccctgaagcagctgacctgcgacctggaggacgacagcgacaagctgcaggagaagagctggaagagcagctgcaacgagggcgagagcagcagcaccagctacatgcaccagagaagccccggcggccccaccaagctgatcgagatcatcagcgactgcaactgggaggaggacagaaacaagatcctgagcatcctgagccagcacatcaacagcaacatgccccagagcctgaaggtgggcagcttcatcatcgagctggccagccagagaaagagcagaggcgagaagaacccccccgtgtacagcagcagagtgaagatcagcatgcccagctgccaggaccaggacgacatggccgagaagagcggcagcgagacccccgacggccccctgagccccggcaagatggaggacatcagccccgtgcagaccgacgccctggacagcgtgagagagagactgcacggcggcaagggcctgcccttctacgccggcctgagccccgccggcaagctggtggcctacaagagaaagcccagcagcagcaccagcggcctgatccaggtggccagcaacgccaaggtggccgccagcagaaagcccagaaccctgctgcccagcaccagcaacagcaagatggccagcagcagcggcaccgccaccaacagacccggcaagaacctgaaggccttcgtgcccgccaagagacccatcgccgccagacccagccccggcggcgtgttcacccagttcgtgatgagcaaggtgggcgccctgcagcagaagatccccggcgtgagcaccccccagaccctggccggcacccagaagttcagcatcagacccagccccgtgatggtggtgacccccgtggtgagcagcgagcccgtgcaggtgtgcagccccgtgaccgccgccgtgaccaccaccaccccccaggtgttcctggagaacaccaccgccgtgacccccatgaccgccatcagcgacgtggagaccaaggagaccacctacagcagcggcgccaccaccaccggcgtggtggaggtgagcgagaccaacaccagcaccagcgtgaccagcacccagagcaccgccaccgtgaacctgaccaagaccaccggcatcaccacccccgtggccagcgtggccttccccaagagcctggtggccagccccagcaccatcaccctgcccgtggccagcaccgccagcaccagcctggtggtggtgaccgccgccgccagcagcagcatggtgaccacccccaccagcagcctgggcagcgtgcccatcatcctgagcggcatcaacggcagcccccccgtgagccagagacccgagaacgccgcccagatccccgtggccaccccccaggtgagccccaacaccgtgaagagagccggccccagactgctgcaccccaacggccagatcgtgcagctgctgcccctgcaccagctgagaggcagcaacacccagcccaacctgcagcccgtgatgttcagaaaccccggcagcgtgatgggcatcagactgcccgcccccagcaagcccagcgagaccccccccagcagcaccagcagcagcgccttcagcgtgatgaaccccgtgatccaggccgtgggcagcagcagcgccgtgaacgtgatcacccaggcccccagcctgctgagcagcggcgccagcttcgtgagccaggccggcaccctgaccctgagaatcagcccccccgagccccagagcttcgccagcaagaccggcagcgagaccaagatcacctacagcagcggcggccagcccgtgggcaccgccagcctgatccccctgcagagcggcagcttcgccctgctgcagctgcccggccagaagcccgtgcccagcagcatcctgcagcacgtggccagcctgcagatgaagagagagagccagaaccccgaccagaaggacgagaccaacagcatcaagagagagcaggagaccaagaaggtgctgcagagcgagggcgaggccgtggaccccgaggccaacgtgatcaagcagaacagcggcgccgccaccagcgaggagaccctgaacgacagcctggaggacagaggcgaccacctggacgaggagtgcctgcccgaggagggctgcgccaccgtgaagcccagcgagcacagctgcatcaccggcagccacaccgaccaggactacaaggacgtgaacgaggagtacggcgccagaaacagaaagagcagcaaggagaaggtggccgtgctggaggtgagaaccatcagcgagaaggccagcaacaagaccgtgcagaacctgagcaaggtgcagcaccagaagctgggcgacgtgaaggtggagcagcagaagggcttcgacaaccccgaggagaacagcagcgagttccccgtgaccttcaaggaggagagcaagttcgagctgagcggcagcaaggtgatggagcagcagagcaacctgcagcccgaggccaaggagaaggagtgcggcgacagcctggagaaggacagagagagatggagaaagcacctgaagggccccctgaccagaaagtgcgtgggcgccagccaggagtgcaagaaggaggccgacgagcagctgatcaaggagaccaagacctgccaggagaacagcgacgtgttccagcaggagcagggcatcagcgacctgctgggcaagagcggcatcaccgaggacgccagagtgctgaagaccgagtgcgacagctggagcagaatcagcaaccccagcgccttcagcatcgtgcccagaagagccgccaagagcagcagaggcaacggccacttccagggccacctgctgctgcccggcgagcagatccagcccaagcaggagaagaagggcggcagaagcagcgccgacttcaccgtgctggacctggaggaggacgacgaggacgacaacgagaagaccgacgacagcatcgacgagatcgtggacgtggtgagcgactaccagagcgaggaggtggacgacgtggagaagaacaactgcgtggagtacatcgaggacgacgaggagcacgtggacatcgagaccgtggaggagctgagcgaggagatcaacgtggcccacctgaagaccaccgccgcccacacccagagcttcaagcagcccagctgcacccacatcagcgccgacgagaaggccgccgagagaagcagaaaggccccccccatccccctgaagctgaagcccgactactggagcgacaagctgcagaaggaggccgaggccttcgcctactacagaagaacccacaccgccaacgagagaagaagaagaggcgagatgagagacctgttcgagaagctgaagatcaccctgggcctgctgcacagcagcaaggtgagcaagagcctgatcctgaccagagccttcagcgagatccagggcctgaccgaccaggccgacaagctgatcggccagaagaacctgctgaccagaaagagaaacatcctgatcagaaaggtgagcagcctgagcggcaagaccgaggaggtggtgctgaagaagctggagtacatctacgccaagcagcaggccctggaggcccagaagagaaagaagaagatgggcagcgacgagttcgacatcagccccagaatcagcaagcagcaggagggcagcagcgccagcagcgtggacctgggccagatgttcatcaacaacagaagaggcaagcccctgatcctgagcagaaagaaggaccaggccaccgagaacaccagccccctgaacaccccccacaccagcgccaacctggtgatgaccccccagggccagctgctgaccctgaagggccccctgttcagcggccccgtggtggccgtgagccccgacctgctggagagcgacctgaagccccaggtggccggcagcgccgtggccctgcccgagaacgacgacctgttcatgatgcccagaatcgtgaacgtgaccagcctggccaccgagggcggcctggtggacatgggcggcagcaagtacccccacgaggtgcccgacagcaagcccagcgaccacctgaaggacaccgtgagaaacgaggacaacagcctggaggacaagggcagaatcagcagcagaggcaacagagacggcagagtgaccctgggccccacccaggtgttcctggccaacaaggacagcggctacccccagatcgtggacgtgagcaacatgcagaaggcccaggagttcctgcccaagaagatcagcggcgacatgagaggcatccagtacaagtggaaggagagcgagagcagaggcgagagagtgaagagcaaggacagcagcttccacaagctgaagatgaaggacctgaaggacagcagcatcgagatggagctgagaaaggtgaccagcgccatcgaggaggccgccctggacagcagcgagctgctgaccaacatggaggacgaggacgacaccgacgagaccctgaccagcctgctgaacgagatcgccttcctgaaccagcagctgaacgacgacagcgtgggcctggccgagctgcccagcagcatggacaccgagttccccggcgacgccagaagagccttcatcagcaaggtgccccccggcagcagagccaccttccaggtggagcacctgggcaccggcctgaaggagctgcccgacgtgcagggcgagagcgacagcatcagccccctgctgctgcacctggaggacgacgacttcagcgagaacgagaagcagctggccgagcccgccagcgagcccgacgtgctgaagatcgtgatcgacagcgagatcaaggacagcctgctgagcaacaagaaggccatcgacggcggcaagaacaccagcggcctgcccgccgagcccgagagcgtgagcagcccccccaccctgcacatgaagaccggcctggagaacagcaacagcaccgacaccctgtggagacccatgcccaagctggcccccctgggcctgaaggtggccaaccccagcagcgacgccgacggccagagcctgaaggtgatgccctgcctggcccccatcgccgccaaggtgggcagcgtgggccacaagatgaacctgaccggcaacgaccaggagggcagagagagcaaggtgatgcccaccctggcccccgtggtggccaagctgggcaacagcggcgccagccccagcagcgccggcaagtag

SEQ ID NO: 62525 - protein, 663 aa, Artificial Sequence
  derived and/or modified sequence
MALCYGTFWGYPKMLEAANLMEGLVDIGPWVTLPRGQPEVLEWGLPKDQDSVAFEDVAVNFTHEEWALLGPSQKNLYRDVMRETIRNLNCIGMKWENQNIDDQHQNLRRNPRCDVVERFGKSKDGSQCGETLSQIRNSIVNKNTPARVDACGSSVNGEVIMGHSSLNCYIRVDTGHKHRECHEYAEKSYTHKQCGKGLSYRHSFQTCERPHTGKKPYDCKECGKTFSSPGNLRRHMVVKGGDGPYKCELCGKAFFWPSLLRMHERTHTGEKPYECKQCSKAFPVYSSYLRHEKIHTGEKPYECKQCSKAFPDYSSYLRHERTHTGEKPYKCKQCGKAFSVSGSLRVHERIHTGEKPYTCKQCGKAFCHLGSFQRHMIMHSGDGPHKCKICGKGFDFPGSARIHEGTHTLEKPYECKQCGKLLSHRSSFRRHMMAHTGDGPHKCTVCGKAFDSPSVFQRHERTHTGEKPYECKQCGKAFRTSSSLRKHETTHTGEQPYKCKCGKAFSDLFSFQSHETTHSEEEPYECKECGKAFSSFKYFCRHERTHSEEKSYECQICGKAFSRFSYLKTHERTHTAEKPYECKQCRKAFFWPSFLLRHERTHTGERPYECKHCGKAFSRSSFCREHERTHTGEKPYECKECGKAFSSLSSFNRHKRTHWKDIL

SEQ ID NO: 62526 - protein, 637 aa, Artificial Sequence
  derived and/or modified sequence
MALCYGTFWGYPKMLEAANLMEGLVDIGPWVTLPRGQPEVLEWGLPKDQDSVAFEDVAVNFTHEEWALLGPSQKNLYRDVMRETIRNLNCIGMKWENQNIDDQHQNLRRNPRCDVVERFGKSKDGSQCGETLSQIRNSIVNKNTPARVDACGSSVNGEVIMGHSSLNCYIRVDTGHKHRECHEYAEKSYTHKQCGKGLSYRHSFQTCERPHTGKKPYDCKECGKTFSSPGNLRRHMVVKGGDGPYKCELCGKAFFWPSLLRMHERTHTGEKPYECKQCSKAFPVYSSYLRHEKIHTGEKPYECKQCSKAFPDYSSYLRHERTHTGEKPYKCKQCGKAFSVSGSLRVHERIHTGEKPYTCKQCGKAFCHLGSFQRHMIMHSGDGPHKCKICGKGFDFPGSARIHEGTHTLEKPYECKQCGKLLSHRSSFRRHMMAHTGDGPHKCTVCGKAFDSPSVFQRHERTHTGEKPYECKQCGKAFRTSSSLRKHETTHTGEQPYKCKCGKAFSDLFSFQSHETTHSEEEPYECKECGKAFSSFKYFCRHERTHSEEKSYECQICGKAFSRFSYLKTHERTHTAEKPYECKQCRKAFFWPSFLLRHERTHTGERPYECKHCGKAFSRSSFCREHERTHTGEKPYE

SEQ ID NO: 62527 - DNA, 1992 bp, Artificial Sequence
  derived and/or modified sequence
atggccctgtgctacggcaccttctggggctaccccaagatgctggaggccgccaacctgatggagggcctggtggacatcggcccctgggtgaccctgcccagaggccagcccgaggtgctggagtggggcctgcccaaggaccaggacagcgtggccttcgaggacgtggccgtgaacttcacccacgaggagtgggccctgctgggccccagccagaagaacctgtacagagacgtgatgagagagaccatcagaaacctgaactgcatcggcatgaagtgggagaaccagaacatcgacgaccagcaccagaacctgagaagaaaccccagatgcgacgtggtggagagattcggcaagagcaaggacggcagccagtgcggcgagaccctgagccagatcagaaacagcatcgtgaacaagaacacccccgccagagtggacgcctgcggcagcagcgtgaacggcgaggtgatcatgggccacagcagcctgaactgctacatcagagtggacaccggccacaagcacagagagtgccacgagtacgccgagaagagctacacccacaagcagtgcggcaagggcctgagctacagacacagcttccagacctgcgagagaccccacaccggcaagaagccctacgactgcaaggagtgcggcaagaccttcagcagccccggcaacctgagaagacacatggtggtgaagggcggcgacggcccctacaagtgcgagctgtgcggcaaggccttcttctggcccagcctgctgagaatgcacgagagaacccacaccggcgagaagccctacgagtgcaagcagtgcagcaaggccttccccgtgtacagcagctacctgagacacgagaagatccacaccggcgagaagccctacgagtgcaagcagtgcagcaaggccttccccgactacagcagctacctgagacacgagagaacccacaccggcgagaagccctacaagtgcaagcagtgcggcaaggccttcagcgtgagcggcagcctgagagtgcacgagagaatccacaccggcgagaagccctacacctgcaagcagtgcggcaaggccttctgccacctgggcagcttccagagacacatgatcatgcacagcggcgacggcccccacaagtgcaagatctgcggcaagggcttcgacttccccggcagcgccagaatccacgagggcacccacaccctggagaagccctacgagtgcaagcagtgcggcaagctgctgagccacagaagcagcttcagaagacacatgatggcccacaccggcgacggcccccacaagtgcaccgtgtgcggcaaggccttcgacagccccagcgtgttccagagacacgagagaacccacaccggcgagaagccctacgagtgcaagcagtgcggcaaggccttcagaaccagcagcagcctgagaaagcacgagaccacccacaccggcgagcagccctacaagtgcaagtgcggcaaggccttcagcgacctgttcagcttccagagccacgagaccacccacagcgaggaggagccctacgagtgcaaggagtgcggcaaggccttcagcagcttcaagtacttctgcagacacgagagaacccacagcgaggagaagagctacgagtgccagatctgcggcaaggccttcagcagattcagctacctgaagacccacgagagaacccacaccgccgagaagccctacgagtgcaagcagtgcagaaaggccttcttctggcccagcttcctgctgagacacgagagaacccacaccggcgagagaccctacgagtgcaagcactgcggcaaggccttcagcagaagcagcttctgcagagagcacgagagaacccacaccggcgagaagccctacgagtgcaaggagtgcggcaaggccttcagcagcctgagcagcttcaacagacacaagagaacccactggaaggacatcctgtag

SEQ ID NO: 62528 - DNA, 1914 bp, Artificial Sequence
  derived and/or modified sequence
atggccctgtgctacggcaccttctggggctaccccaagatgctggaggccgccaacctgatggagggcctggtggacatcggcccctgggtgaccctgcccagaggccagcccgaggtgctggagtggggcctgcccaaggaccaggacagcgtggccttcgaggacgtggccgtgaacttcacccacgaggagtgggccctgctgggccccagccagaagaacctgtacagagacgtgatgagagagaccatcagaaacctgaactgcatcggcatgaagtgggagaaccagaacatcgacgaccagcaccagaacctgagaagaaaccccagatgcgacgtggtggagagattcggcaagagcaaggacggcagccagtgcggcgagaccctgagccagatcagaaacagcatcgtgaacaagaacacccccgccagagtggacgcctgcggcagcagcgtgaacggcgaggtgatcatgggccacagcagcctgaactgctacatcagagtggacaccggccacaagcacagagagtgccacgagtacgccgagaagagctacacccacaagcagtgcggcaagggcctgagctacagacacagcttccagacctgcgagagaccccacaccggcaagaagccctacgactgcaaggagtgcggcaagaccttcagcagccccggcaacctgagaagacacatggtggtgaagggcggcgacggcccctacaagtgcgagctgtgcggcaaggccttcttctggcccagcctgctgagaatgcacgagagaacccacaccggcgagaagccctacgagtgcaagcagtgcagcaaggccttccccgtgtacagcagctacctgagacacgagaagatccacaccggcgagaagccctacgagtgcaagcagtgcagcaaggccttccccgactacagcagctacctgagacacgagagaacccacaccggcgagaagccctacaagtgcaagcagtgcggcaaggccttcagcgtgagcggcagcctgagagtgcacgagagaatccacaccggcgagaagccctacacctgcaagcagtgcggcaaggccttctgccacctgggcagcttccagagacacatgatcatgcacagcggcgacggcccccacaagtgcaagatctgcggcaagggcttcgacttccccggcagcgccagaatccacgagggcacccacaccctggagaagccctacgagtgcaagcagtgcggcaagctgctgagccacagaagcagcttcagaagacacatgatggcccacaccggcgacggcccccacaagtgcaccgtgtgcggcaaggccttcgacagccccagcgtgttccagagacacgagagaacccacaccggcgagaagccctacgagtgcaagcagtgcggcaaggccttcagaaccagcagcagcctgagaaagcacgagaccacccacaccggcgagcagccctacaagtgcaagtgcggcaaggccttcagcgacctgttcagcttccagagccacgagaccacccacagcgaggaggagccctacgagtgcaaggagtgcggcaaggccttcagcagcttcaagtacttctgcagacacgagagaacccacagcgaggagaagagctacgagtgccagatctgcggcaaggccttcagcagattcagctacctgaagacccacgagagaacccacaccgccgagaagccctacgagtgcaagcagtgcagaaaggccttcttctggcccagcttcctgctgagacacgagagaacccacaccggcgagagaccctacgagtgcaagcactgcggcaaggccttcagcagaagcagcttctgcagagagcacgagagaacccacaccggcgagaagccctacgagtag

SEQ ID NO: 62529 - DNA, 1992 bp, Artificial Sequence
  derived and/or modified sequence
atggccctgtgctacggcaccttctggggataccccaagatgctggaggccgccaatcttatggaaggcctcgtggatattggtccctgggtgactttgcctagaggccaacctgaggtcctggagtggggcttacctaaagaccaggacagtgtggcttttgaggatgtggccgtgaacttcacccatgaggagtgggcattgctcgggccctcccagaaaaacttgtaccgggatgtgatgcgagagacgattcggaacctgaactgtatcgggatgaagtgggagaaccaaaacattgacgatcagcaccagaatctcaggaggaatcctcgatgtgacgttgtggagaggtttggtaagagtaaggatggttctcagtgcggggaaaccctcagtcagattcgaaatagtattgtgaacaagaatactcccgcccgggtggatgcgtgtgggagttcagtgaatggagaggtcattatggggcacagttctcttaattgctacattagagtggatactggtcacaaacatagggaatgccacgaatacgcagagaaatcttacacacacaaacagtgcggcaagggcctctcctacaggcactcctttcagacctgtgagcgacctcacacgggcaagaagccctatgactgcaaggaatgcggaaagacctttagtagccctgggaacttgcgccgccatatggttgtcaaggggggagacggcccatacaaatgcgaattgtgtgggaaggctttcttttggcctagtttgttgcgtatgcacgagcgaactcacactggagagaagccttacgagtgtaagcaatgcagcaaagcattcccagtatactcctcttatctccgccacgaaaagatacacaccggggagaagccttacgaatgcaaacagtgttctaaagcatttccggactattccagctacctgcgacacgagagaacgcacaccggggaaaagccgtataagtgcaaacagtgcgggaaagccttttcagtgtcaggttcgctgagagtgcacgagaggatccacactggagaaaaaccatatacttgcaagcagtgcggaaaagcgttttgtcacctcggaagcttccagcgccacatgatcatgcactctggcgatggtccacacaagtgtaagatctgcgggaaaggttttgatttccccggcagcgcacgaatacatgagggtacgcacacactcgaaaaaccttacgaatgtaagcaatgcggaaagctcttgtcccacagatccagtttccggcgccatatgatggcccataccggcgacgggcctcacaaatgtactgtgtgtggaaaggcctttgattcaccatcagtgtttcagaggcatgaacgaacccatactggggagaaaccttatgagtgtaagcagtgcggtaaagcctttcgaacaagtagttccttgagaaagcacgagactacacacactggcgagcagccttataagtgtaaatgtgggaaggccttctccgacctattcagctttcaatctcatgagaccacccacagcgaggaggagccatatgaatgcaaagaatgcgggaaagccttttcctcttttaaatatttctgtcgacacgagcgcactcattccgaagagaagagctacgaatgtcagatctgcggcaaagcgttcagccgcttcagttaccttaaaactcatgaacgaactcacactgctgaaaagccttatgagtgcaaacagtgccgtaaagcctttttttggccatctttccttctgcgccatgagcgtacccacacaggggagaggccatacgaatgcaagcactgcgggaaggctttttcaagatcatcattttgtcgggagcacgagcgtacgcacactggcgagaagccatatgagtgcaaggaatgtggcaaggcattcagctccctgtccagttttaaccgccataagaggacacactggaaagatatactctag

SEQ ID NO: 62530 - DNA, 1914 bp, Artificial Sequence
  derived and/or modified sequence
atggctctgtgctatggcaccttctggggctacccaaagatgctggaagctgcgaatctgatggagggactggtcgatatcgggccctgggtgacgttgcccagaggtcaaccagaagtgcttgagtggggcttaccaaaggatcaggacagcgttgcattcgaggacgtggctgtgaattttactcatgaggaatgggccctactgggccccagccagaagaatctgtacagggacgtgatgcgagaaaccatccgtaacctcaattgtatcgggatgaagtgggagaaccagaacattgacgaccagcaccagaacctaagaagaaatccccggtgtgacgtagtggagaggttcggcaagagtaaagacggctctcaatgtggggagactttgagtcagatcaggaactccatcgtcaacaagaacaccccagctcgcgtagacgcctgcggaagcagtgtgaacggcgaagtgataatggggcattcttctctaaactgctacattcgggtggacaccggccataagcacagggaatgtcatgaatatgctgaaaagagttatacccataagcaatgtgggaaaggactaagttatcgccacagttttcagacctgtgagagacctcacactggcaaaaagccttatgattgcaaagagtgtggtaagacattctcaagtcccgggaacctccgcaggcacatggtcgtgaagggaggcgacggcccttacaaatgcgaactgtgtggaaaggcgtttttctggccatccctcctgagaatgcacgagagaactcatacaggagaaaagccatacgaatgcaaacagtgttctaaagctttcccggtgtactctagctatctgcgacacgagaagattcacacgggagaaaaaccctacgagtgcaagcaatgttctaaggcctttccagactactcttcttatctgagacatgagcgcactcataccggggagaaaccttacaagtgtaagcagtgcggcaaagcatttagtgtgagcggctcgctgagggttcatgagagaatacacactggagagaagccctacacatgcaagcagtgcgggaaggcattttgtcacttggggtcttttcagcgtcacatgatcatgcactctggagatggcccacataaatgtaagatatgcggaaagggattcgattttcccggaagcgcccggatccacgagggcacccatactctggaaaagccctatgaatgtaaacagtgtggaaagctgctttcccacaggtctagctttcgtcggcacatgatggcccacacaggagacggcccacataagtgtaccgtgtgcggcaaggctttcgactccccctccgtgttccagcgccatgaaaggactcataccggggagaagccttatgaatgcaagcagtgtggcaaagccttccgcacctcgagctctctgcgcaagcatgagacaacacacacaggcgagcaaccttacaaatgcaagtgcggcaaggctttttcagatttgttctcattccagtctcacgagaccacacattcagaagaagaaccatacgagtgcaaagagtgcggtaaagcattctccagcttcaaatacttctgtcgccatgagcgtacccactccgaagagaaaagctacgagtgccagatctgcgggaaggccttctctcggttttcgtacttaaaaactcatgaaaggacgcatacagccgaaaagccgtatgagtgtaagcagtgccggaaagcgttcttttggccctcattcttattgaggcacgagcgtacacacacaggggagcgaccttatgagtgtaagcattgtggcaaggcattcagccggtctagtttttgtcgagaacacgaacggacacatacaggagagaagccctatgagtag

SEQ ID NO: 62531 - DNA, 1992 bp, Artificial Sequence
  derived and/or modified sequence
atggccctgtgctacggcaccttctggggctaccccaagatgctggaggccgccaacctgatggagggcctggtggacatcggcccctgggtgaccctgccccggggccagcctgaggtgctggagtggggcctgcccaaggaccaggacagcgtggcctttgaagatgtggccgtgaacttcacccatgaggagtgggccctgctgggccccagccagaagaacctgtacagagatgtgatgagggagaccatccggaacctgaactgcatcggcatgaagtgggagaaccagaacattgatgaccagcaccagaacctgcggaggaacccccgctgtgatgtggtggagagatttgggaagagcaaggatggcagccagtgtggggagaccctgagccagatccggaacagcatcgtgaacaagaacaccccagcccgggtggatgcctgtggcagctctgtgaatggagaggtgatcatgggccacagcagcctgaactgctacatccgggtggacaccggccacaagcaccgggagtgccacgagtatgcagagaagagctacacccacaagcagtgtgggaagggcctgagctaccgccacagcttccagacctgtgagcggccccacacaggcaagaagccctatgactgcaaggaatgtgggaagaccttcagcagccctggcaacctgcggcggcacatggtggtgaagggaggagatggcccctacaagtgtgagctgtgtgggaaggccttcttctggcccagcctgctgaggatgcatgagaggacccacactggagagaagccctatgagtgcaagcagtgcagcaaggccttccctgtgtacagcagctacctgcggcatgagaagatccacactggagagaagccctatgagtgcaagcagtgcagcaaggccttcccagactacagcagctacctgcggcatgagaggacccacactggagagaagccctacaagtgcaagcagtgtgggaaggccttctctgtgtctggcagcctgcgggtgcatgagcgcatccacactggagagaagccctacacctgcaagcagtgtgggaaggccttctgccacctgggcagcttccagaggcacatgatcatgcacagcggagatggcccccacaagtgcaagatctgtgggaagggctttgacttccctggcagcgcccgcatccacgagggcacccacaccctggagaagccctatgagtgcaagcagtgtgggaagctgctgagccacaggagcagcttcagaagacacatgatggcccacactggagatggcccccacaagtgcaccgtgtgtgggaaggcctttgacagccccagcgtcttccagagacatgagaggacccacactggagagaagccctatgagtgcaagcagtgtgggaaggccttccgcaccagcagcagcctgaggaagcatgagaccacccacactggagagcagccctacaagtgcaagtgtgggaaggccttcagtgacctcttctccttccagagccatgagaccacccacagcgaggaggagccctatgagtgcaaggaatgtgggaaggccttcagcagcttcaagtacttctgcagacatgagaggacccacagcgaggagaagagctatgagtgccagatctgtgggaaggccttcagccgcttctcctacctgaagacccatgagaggacccacacagctgagaagccctatgagtgcaagcagtgcaggaaggccttcttctggcccagcttcctgctgcggcatgagaggacccacactggagagcggccctatgagtgcaagcactgcggcaaggccttcagccgcagcagcttctgccgggagcacgagaggacccacactggagagaagccctatgagtgcaaggaatgtgggaaggccttcagcagcctgagcagcttcaacagacacaagaggacccactggaaggacatcctgtag

SEQ ID NO: 62532 - DNA, 1914 bp, Artificial Sequence
  derived and/or modified sequence
atggccctgtgctacggcaccttctggggctaccccaagatgctggaggccgccaacctgatggagggcctggtggacatcggcccctgggtgaccctgccccggggccagcctgaggtgctggagtggggcctgcccaaggaccaggacagcgtggcctttgaagatgtggccgtgaacttcacccatgaggagtgggccctgctgggccccagccagaagaacctgtacagagatgtgatgagggagaccatccggaacctgaactgcatcggcatgaagtgggagaaccagaacattgatgaccagcaccagaacctgcggaggaacccccgctgtgatgtggtggagagatttgggaagagcaaggatggcagccagtgtggggagaccctgagccagatccggaacagcatcgtgaacaagaacaccccagcccgggtggatgcctgtggcagctctgtgaatggagaggtgatcatgggccacagcagcctgaactgctacatccgggtggacaccggccacaagcaccgggagtgccacgagtatgcagagaagagctacacccacaagcagtgtgggaagggcctgagctaccgccacagcttccagacctgtgagcggccccacacaggcaagaagccctatgactgcaaggaatgtgggaagaccttcagcagccctggcaacctgcggcggcacatggtggtgaagggaggagatggcccctacaagtgtgagctgtgtgggaaggccttcttctggcccagcctgctgaggatgcatgagaggacccacactggagagaagccctatgagtgcaagcagtgcagcaaggccttccctgtgtacagcagctacctgcggcatgagaagatccacactggagagaagccctatgagtgcaagcagtgcagcaaggccttcccagactacagcagctacctgcggcatgagaggacccacactggagagaagccctacaagtgcaagcagtgtgggaaggccttctctgtgtctggcagcctgcgggtgcatgagcgcatccacactggagagaagccctacacctgcaagcagtgtgggaaggccttctgccacctgggcagcttccagaggcacatgatcatgcacagcggagatggcccccacaagtgcaagatctgtgggaagggctttgacttccctggcagcgcccgcatccacgagggcacccacaccctggagaagccctatgagtgcaagcagtgtgggaagctgctgagccacaggagcagcttcagaagacacatgatggcccacactggagatggcccccacaagtgcaccgtgtgtgggaaggcctttgacagccccagcgtcttccagagacatgagaggacccacactggagagaagccctatgagtgcaagcagtgtgggaaggccttccgcaccagcagcagcctgaggaagcatgagaccacccacactggagagcagccctacaagtgcaagtgtgggaaggccttcagtgacctcttctccttccagagccatgagaccacccacagcgaggaggagccctatgagtgcaaggaatgtgggaaggccttcagcagcttcaagtacttctgcagacatgagaggacccacagcgaggagaagagctatgagtgccagatctgtgggaaggccttcagccgcttctcctacctgaagacccatgagaggacccacacagctgagaagccctatgagtgcaagcagtgcaggaaggccttcttctggcccagcttcctgctgcggcatgagaggacccacactggagagcggccctatgagtgcaagcactgcggcaaggccttcagccgcagcagcttctgccgggagcacgagaggacccacactggagagaagccctatgaatag

SEQ ID NO: 62533 - DNA, 1992 bp, Artificial Sequence
  derived and/or modified sequence
atggccctgtgctacggcaccttctggggctaccccaagatgctggaggcagccaatctgatggaggggctggtcgacataggcccttgggtgacgcttccccgtggccagccagaggtacttgagtggggcctgcctaaagatcaggatagtgtcgccttcgaggacgtcgcagtgaattttacccacgaggaatgggcgctattggggccttcacagaagaacctctaccgtgacgtcatgagagagacgatccgtaatctgaattgcattggcatgaaatgggagaatcaaaatatcgatgaccagcatcagaatttgaggagaaaccccaggtgcgacgtggtagagagattcggtaaatccaaagacggttctcagtgtggcgaaaccctgtctcaaatccggaattccatagtgaacaagaatactccggccagggttgacgcctgcggttcttctgtgaatggggaggtcattatgggccacagctcactgaactgctatatccgagttgatacgggtcacaagcatcgagagtgtcacgagtacgctgagaaaagttatacccacaaacagtgcggtaagggactgtcttatcgtcatagctttcagacctgcgagaggccacataccggcaaaaaaccttacgactgcaaggagtgtggcaagacattttcgtctcccggcaacctccggcggcacatggtcgtcaaagggggcgacggaccctacaaatgcgagctttgtggcaaggcttttttttggccttctctactaaggatgcatgaacggactcataccggggagaaaccctacgaatgcaaacagtgttcaaaggcctttcccgtatattctagttatctgcgccatgaaaagatccatacaggtgaaaagccttacgagtgcaagcagtgcagtaaggccttccccgattactcctcttatctccgccatgagagaactcatactggagagaaaccttacaagtgtaagcagtgtgggaaggcctttagcgtgagtggctcattaagagtgcacgaaagaatccatacaggtgaaaagccctatacgtgcaagcagtgtgggaaggctttctgccatctgggatctttccagcggcacatgatcatgcactctggggatggaccacacaaatgtaaaatatgtggcaaaggcttcgacttcccaggcagcgctcggattcacgagggaacccacacactggagaaaccatatgagtgtaagcagtgcggcaagctactctcacatagatcttctttccgtagacacatgatggctcataccggtgatggtccgcataagtgcacagtgtgtgggaaggcgtttgactcaccaagcgtgttccagcgtcatgaacgaactcataccggagagaagccctacgaatgtaagcagtgcggcaaagcgttcagaaccagctcgtcgctgcgaaaacatgaaacgactcacactggcgaacaaccatacaagtgtaaatgtggtaaagcgttttccgatctgttttctttccagtcacacgagactacccactctgaggaggagccttacgaatgcaaggaatgcggcaaggctttctcatccttcaagtacttttgtaggcatgagagaactcacagcgaggaaaagtcgtacgaatgtcagatttgcggaaaagcattttcccggttctcttacctcaaaactcatgaacggacacatacagccgaaaaaccatacgagtgtaagcaatgtaggaaggcttttttttggccaagctttctgctccggcatgagagaactcacacaggggaacgaccttatgaatgtaaacattgtggcaaggcctttagccggagttcgttttgcagagagcatgagcggactcataccggggagaaaccttatgaatgcaaagaatgcggcaaagcgttttcctctctgagctcattcaatagacacaaacggacccactggaaagacatattatag

SEQ ID NO: 62534 - DNA, 1914 bp, Artificial Sequence
  derived and/or modified sequence
atggccctgtgctacggcaccttctggggctaccccaagatgctggaagctgctaatctcatggaaggcttggtcgatatcgggccttgggtgacccttccacgcggccagcccgaagtcctggaatggggcctccccaaggaccaggattctgtcgcctttgaggatgttgcagtgaattttacacacgaagaatgggccctgctgggcccctctcaaaagaatctttatcgcgatgtgatgcgggagacaattagaaatctcaactgtatcgggatgaagtgggagaaccagaatatcgacgatcagcatcagaatcttcgaaggaatccccgctgtgatgtggtggaaaggtttggcaagagtaaggatgggtcccagtgcggtgaaactctcagccagataaggaatagcatcgtgaacaaaaacacacctgcccgcgtggacgcctgcggttcctctgtcaacggagaggttatcatggggcattcatcactgaattgctacataagggtggacactggccataagcatcgtgaatgtcatgagtatgcggagaaatcctacacacacaagcagtgcggaaaagggctgtcttataggcattcctttcagacctgcgaacgcccacataccggcaagaaaccctatgactgtaaagagtgcggaaaaacctttagcagcccagggaacctaaggcgccatatggtagtcaaagggggcgacggaccttacaagtgtgagctctgtggcaaggcctttttttggccctctctgttacggatgcacgaaaggacacataccggcgagaagccatatgaatgcaaacagtgtagtaaggcgttcccagtgtattccagttacttgcgtcatgagaagattcacactggcgagaagccatatgagtgcaaacagtgcagcaaggccttccccgactactcatcctatcttcgtcatgaaaggacccataccggggagaagccctacaagtgtaagcagtgtgggaaagcgttctcagtgagcggaagtcttagggttcatgagaggatacatactggggagaagccttacacctgcaaacagtgcggcaaggcattttgccacctaggctcatttcagaggcacatgataatgcattctggcgatggaccccacaaatgtaagatctgtggaaagggattcgactttccaggctccgctcgtatccacgagggaactcacacactcgaaaagccctacgagtgtaagcagtgcggaaaacttttgtctcatcgttcctccttcaggcgacacatgatggctcacacaggcgatggtccacacaaatgcaccgtgtgtgggaaggcattcgacagcccaagcgtcttccagcggcatgagcggacgcacaccggcgaaaaaccatacgagtgcaaacagtgcggtaaggccttccgtacttcaagcagcttacgtaagcacgaaacgacacacacaggagaacagccatataagtgtaagtgcggaaaggccttcagcgacctgttcagcttccaatctcatgagaccacccactctgaggaagagccatacgaatgcaaggagtgtgggaaggcattctcttctttcaagtacttttgcagacacgagcggacacattccgaagagaaatcgtacgagtgccagatctgcggcaaagcgttctccaggttcagttatctgaaaacccatgagcggacccacacagcagagaagccatatgaatgcaaacagtgtcgcaaggccttcttctggccatctttcttgcttcgccatgaaagaacgcacacaggcgagaggccatacgagtgcaaacattgcggaaaagccttttcccggtcatccttctgtcgtgaacatgagcggacgcacacaggagagaaaccttacgagtag

SEQ ID NO: 62535 - DNA, 1992 bp, Artificial Sequence
  derived and/or modified sequence
atggctctctgctacggaaccttttgggggtacccaaaaatgctagaagctgccaacttaatggaaggtctcgtggacatcggaccgtgggtaactcttcctcgaggccagccagaggtgctcgaatggggacttccaaaagatcaggactcggtggccttcgaagacgtggcagtgaactttacccacgaggagtgggctctccttggtccatctcagaaaaatctgtaccgcgatgtgatgcgcgagactattcgcaatcttaactgtattggaatgaagtgggaaaaccagaacatagatgatcagcaccagaacctgcgtcggaatccccgatgcgacgtggtggagcggtttgggaagagcaaggatggctctcagtgcggggaaaccctgtcccagattcggaacagcattgtcaacaagaacaccccagccagagttgacgcctgtggttcctccgtgaacggggaggttattatgggccattcgtctcttaactgttacattcgcgttgatacagggcataaacatcgtgaatgccatgaatacgctgagaaatcatatacccacaagcagtgtggaaaaggcctgtcttacaggcatagctttcagacatgcgaacgtcctcacacaggtaaaaaaccatatgactgcaaggagtgcgggaaaaccttttcatctccgggtaaccttcgtaggcacatggtcgtcaaagggggagatggaccctacaaatgcgaactgtgtggtaaagctttcttctggcccagccttctgagaatgcatgaacgcacccataccggggagaaaccttacgagtgcaaacagtgctccaaggccttcccagtttactctagctatctcagacatgaaaagatccacacgggagagaaaccctacgagtgcaagcagtgtagcaaggcttttcccgattattccagctatctccggcatgaacggacgcacaccggcgaaaaaccctacaagtgcaaacagtgtggaaaagctttctctgtgtctgggtccttaagggtgcatgagaggatccacaccggagagaaaccttacacgtgtaagcagtgtggtaaagctttttgtcacctgggaagttttcaaaggcacatgattatgcattcgggcgatggaccacataaatgtaagatttgcggtaaaggattcgacttccccggtagcgccagaattcatgagggtacgcacacactcgaaaagccctacgagtgtaaacagtgcggcaagcttctttctcaccggagcagctttaggcgacacatgatggcccacacaggggacggcccacataagtgtactgtctgtggtaaagcctttgacagcccttccgtttttcagagacatgaacgcacccacactggggagaagccttatgagtgcaagcagtgcgggaaagcgtttcgtacgagttctagtttaaggaaacacgagactacgcacaccggagaacagccgtacaagtgcaagtgtggtaaagcctttagtgatctgtttagctttcaaagccatgaaacgacacatagcgaagaagagccatatgagtgcaaagaatgtggcaaggctttcagtagtttcaagtacttttgccggcacgaacgcacacactctgaagaaaaatcctatgaatgtcagatttgcgggaaggccttttctcgcttcagttacttgaaaacccatgaacgtacccacacagccgaaaaaccctatgagtgtaagcaatgtaggaaagcgttcttttggccctcatttcttctgcgccatgaaaggacgcacacaggggaacgcccttacgagtgtaaacattgcggaaaggctttctcaaggtcgtctttctgcagggaacacgagagaacgcacactggtgagaagccgtatgaatgtaaagaatgtggaaaggccttcagctccctgagctcgtttaacagacacaaaagaacccattggaaggacattctatag

SEQ ID NO: 62536 - DNA, 1914 bp, Artificial Sequence
  derived and/or modified sequence
atggccctttgttacggtactttctggggataccctaaaatgttggaggccgctaatctcatggagggcctggtggacattgggccttgggtcaccctgccgcgaggccagccagaggtactcgagtggggccttcctaaggaccaagacagcgtcgccttcgaggatgtggctgttaattttacccatgaagagtgggcgctgcttggaccatcacagaaaaatctttacagggacgtgatgagggagaccattcgtaatctgaattgtatcgggatgaaatgggaaaaccagaacatcgacgatcaacatcagaatctgcggcgtaacccaaggtgcgacgtcgtagagcgtttcgggaaaagcaaggacggcagccagtgcggagaaaccctgagccagataaggaactcaattgttaacaagaatactccggcaagagttgacgcttgtggtagctccgtgaatggtgaggtgatcatgggacattcttcactgaactgttatattcgcgtggataccgggcacaaacaccgggaatgccacgaatatgctgagaagtcttacacccataaacaatgtgggaagggactgtcgtaccgacactcattccagacatgcgagcgccctcatactggaaaaaagccatacgattgtaaggagtgcggcaagaccttctcgagcccaggcaatttgcgacgccacatggtggtaaagggcggagacggaccctacaagtgtgaactctgcgggaaggcattcttttggccttcactgttgcgtatgcacgaaaggacacacacaggtgaaaagccatatgagtgcaaacagtgcagcaaagcctttcctgtgtatagctcttacctgagacatgagaaaattcacactggggaaaaaccttatgaatgcaaacagtgttccaaggccttccccgactattcttcctatctgcgacatgaacgcacacataccggcgagaaaccctacaaatgcaaacaatgcgggaaagccttctctgtatccggttctttgagagttcatgagagaattcatacgggggagaaaccctacacgtgcaaacaatgcggcaaggctttctgccacctaggttccttccaacgccatatgatcatgcactccggtgacggccctcacaagtgcaagatctgtggtaagggattcgattttcccggaagcgctaggatccacgagggcacccatacgcttgagaaaccatacgagtgtaagcagtgcggaaaacttctgtctcatcgctctagttttcggcgacacatgatggcccatacaggagacgggcctcacaagtgtaccgtgtgtggaaaggcattcgactccccaagcgttttccagcgacacgagcggacccataccggcgagaagccatacgaatgtaagcagtgcgggaaagccttccgtacctcttcatcactgagaaagcatgaaactacacatacaggggagcagccatacaaatgtaagtgcggcaaggcgttcagcgatctgtttagcttccaaagccacgagactacacacagcgaggaggagccatatgaatgtaaggagtgtggaaaggcattctcttcgttcaaatatttctgccgccacgagaggacccactctgaggaaaagtcttacgagtgccagatttgcggaaaggcattctctcggttttcatatctgaagactcacgagaggacgcatacagctgagaaaccatacgaatgcaagcaatgtcggaaagcattcttctggccatcatttctgctgagacatgaacgtactcacaccggagaacgaccttacgaatgtaaacactgtggtaaggcgtttagccgcagttcattttgccgtgaacacgaaagaacccataccggggagaaaccatacgaatag

SEQ ID NO: 62537 - DNA, 2706 bp, Artificial Sequence
  derived and/or modified sequence
ctctgttccgtattctgtcactgagagacgccctgggacatctgtggtggcttttgtcgcgctgggacctaccctgactacgggagttgggaggacccgggacaccgcacagccgggaaatggccctgtgttatggaactttctggggctaccctaagatgctggaagctgccaatctcatggagggcctagtggatatcggcccttgggtcactcttcccagaggacagcctgaggtgttggagtggggcctcccaaaggatcaggactcagtggcctttgaggatgtggctgtgaacttcacccatgaggagtgggctttgctgggtccatcacagaagaatctctacagagatgtgatgcgagaaaccattaggaacctgaactgtataggaatgaaatgggaaaaccagaacattgatgatcagcaccaaaatctcaggagaaatccaaggtgtgatgtggtagagagatttggtaaaagtaaagatggtagtcagtgtggagaaaccttaagccagattcgaaatagtattgtaaacaagaacactcccgccagagtagatgcatgtggaagcagtgtgaatggagaagtcataatgggtcattcatccctgaattgctacatcagagttgatactggacacaaacaccgggagtgtcatgaatatgcagagaagtcatatacacataagcagtgtgggaaaggcttaagttatcgccactcctttcaaacatgtgaaaggcctcacactggaaagaaaccctatgattgtaaggaatgtggaaaaaccttcagttctcctggaaaccttcgaagacatatggtagtaaaaggtggagatggaccttataaatgtgaattgtgtgggaaagcctttttttggcccagtttattacgtatgcatgaaagaactcacactggagagaaaccatatgaatgtaagcagtgttctaaagccttccctgtttacagttcctatctaagacatgaaaaaatacacactggggagaaaccgtatgaatgtaagcagtgttctaaagccttccctgattacagttcatatctaagacatgaaagaactcacactggagagaaaccctacaaatgtaaacaatgtgggaaagccttcagtgtttccggttcccttcgagtacatgaaagaattcacactggagagaaaccctatacatgtaaacagtgtgggaaagcgttttgtcatcttggaagctttcaaagacacatgataatgcacagtggagatggacctcataaatgtaagatatgtgggaaaggctttgattttcctggttcagcacgaattcatgaaggaactcacactctagagaaaccctatgaatgtaagcaatgtgggaaattgttatctcatcgctcaagctttcgaagacacatgatggcacacactggagatggccctcataaatgcacagtatgtgggaaagcctttgattctcctagtgtatttcaaagacatgaaaggactcacactggagagaaaccctatgaatgcaagcaatgtgggaaagccttccgtacttccagttcccttcgaaaacatgaaacaacacacactggagagcaaccctataaatgtaaatgtggaaaagcttttagtgatttattttcctttcaaagtcatgaaacaacacacagtgaagaggagccttatgaatgtaaggagtgtgggaaagcatttagttcttttaaatacttttgtcgccatgaaaggactcacagtgaagaaaaatcttatgagtgtcaaatttgtggcaaagccttcagtcgtttcagttacttaaaaactcatgaaaggactcacacggcagagaagccatatgaatgtaagcaatgcaggaaagcattcttttggccctctttccttctaagacatgaaaggactcacactggagaaagaccctatgaatgtaaacactgtggtaaagccttcagtcgttccagtttctgtcgagaacatgaaagaactcacactggagagaagccctatgaatgtaaggaatgtgggaaagccttcagttctctcagttcctttaatagacataaaaggacacactggaaggatattctataagtgtatggaatgtgggaaagcattcattggttttatcacattcagatacttgaaagaaataaatcctgtgaatgtaaacgtggtaaagccttaagaagtttccaggctgggcgcagcggctcacacctgtaatcccagcactttgagaggccgaggagggcagatcacgaggccaggagatcgagaccagcctggctaacatgggaaaccctgtctctactaaaaatacggaaaaaaaaaaaaatagccaggcatagttgctcacacctgtagtcctagctactcaggaggctgaggcaggagaatcccttgaacccgggaggtggaggttgcagtgagccgagattgcactactgcactccagcttgggtgctagagcgagactccatctcaaaaaaaaaaaaaaaagtttccatttctttcaaatagagttgctgcctgctatatgcaagaagattggttccagtacaccctgagtatacctaaatccacagatgccagctcttttataaaatggaatattcgcatgtacctacccacattctcctgtatactctataaatgtctagattaattaaaatatctcatgcattgt

SEQ ID NO: 62538 - DNA, 3236 bp, Artificial Sequence
  derived and/or modified sequence
actgagagacgccctgggacatctgtggtggcttttgtcgcgctgggacctaccctgactacgggagttgggaggacccgggacaccgcacagccgggaaatggccctgtgttatggaactttctggggctaccctaagatgctggaagctgccaatctcatggagggcctagtggatatcggcccttgggtcactcttcccagaggacagcctgaggtgttggagtggggcctcccaaaggatcaggactcagtggcctttgaggatgtggctgtgaacttcacccatgaggagtgggctttgctgggtccatcacagaagaatctctacagagatgtgatgcgagaaaccattaggaacctgaactgtataggaatgaaatgggaaaaccagaacattgatgatcagcaccaaaatctcaggagaaatccaaggtgtgatgtggtagagagatttggtaaaagtaaagatggtagtcagtgtggagaaaccttaagccagattcgaaatagtattgtaaacaagaacactcccgccagagtagatgcatgtggaagcagtgtgaatggagaagtcataatgggtcattcatccctgaattgctacatcagagttgatactggacacaaacaccgggagtgtcatgaatatgcagagaagtcatatacacataagcagtgtgggaaaggcttaagttatcgccactcctttcaaacatgtgaaaggcctcacactggaaagaaaccctatgattgtaaggaatgtggaaaaaccttcagttctcctggaaaccttcgaagacatatggtagtaaaaggtggagatggaccttataaatgtgaattgtgtgggaaagcctttttttggcccagtttattacgtatgcatgaaagaactcacactggagagaaaccatatgaatgtaagcagtgttctaaagccttccctgtttacagttcctatctaagacatgaaaaaatacacactggggagaaaccgtatgaatgtaagcagtgttctaaagccttccctgattacagttcatatctaagacatgaaagaactcacactggagagaaaccctacaaatgtaaacaatgtgggaaagccttcagtgtttccggttcccttcgagtacatgaaagaattcacactggagagaaaccctatacatgtaaacagtgtgggaaagcgttttgtcatcttggaagctttcaaagacacatgataatgcacagtggagatggacctcataaatgtaagatatgtgggaaaggctttgattttcctggttcagcacgaattcatgaaggaactcacactctagagaaaccctatgaatgtaagcaatgtgggaaattgttatctcatcgctcaagctttcgaagacacatgatggcacacactggagatggccctcataaatgcacagtatgtgggaaagcctttgattctcctagtgtatttcaaagacatgaaaggactcacactggagagaaaccctatgaatgcaagcaatgtgggaaagccttccgtacttccagttcccttcgaaaacatgaaacaacacacactggagagcaaccctataaatgtaaatgtggaaaagcttttagtgatttattttcctttcaaagtcatgaaacaacacacagtgaagaggagccttatgaatgtaaggagtgtgggaaagcatttagttcttttaaatacttttgtcgccatgaaaggactcacagtgaagaaaaatcttatgagtgtcaaatttgtggcaaagccttcagtcgtttcagttacttaaaaactcatgaaaggactcacacggcagagaagccatatgaatgtaagcaatgcaggaaagcattcttttggccctctttccttctaagacatgaaaggactcacactggagaaagaccctatgaatgtaaacactgtggtaaagccttcagtcgttccagtttctgtcgagaacatgaaagaactcacactggagagaagccctatgaatgactcagtgacctttgaagatgtggctgtgaacttcacccaggaggaatggactttgctggatccttcacagaaaaaactctacagagacgtgatgtgggaaaccttcaggaacctggccactataggaacaaaacaaaaagaatggaacattgaagagcagtacaaaaaccaggggagaaatctcagaaatcatatggtagagagactctgtgaaagtaaagaaggtagtcatggcggagaaggtttcagccagattgcaaatctcagtctgaacaagaaaactccttctggaggaaagctttgggaaagcagtgtatgtggaaaagtcttgagccatcattcatcccttaacaggcacattagatcttacaccagacacaaactgtataagtgtcaggaatatggagagaagccatataaatgtaagaaatgtgggaaacccttcagttatctgcagtcttttaaaaaacataaaagaacacacagtgcagggatagtctacaaatgtaaggcctgtgggaaagccttcagttgtcaacgttctttccaaatacatggaaggactcacactggagataaaccctttaagtgtaaagaatgtggaaaagcattccgataccaccaatctgctcaaaaacatgaaaaggctcatactggagagaaaccctacaaatgtaaggaatgtgggaaacccttcatttaccgccattctgctcgagcacatgaaaggaatcacactgtacagaaacgctatgaatgtaaacaatgtggaaaaacctacatatcttctgtaggttttcaagcacatgaaagaactcacactggagaaaaaccctatgaatgtaaaaaatgtgggaaagtgttcgtatatcacaactctgctcaaagacatgaaaagactcatactggagagaaaccctacaaatgcaaggaatgtgggaaagccttcagttaccactgtactgctcaaaaacatgagaggaatcacactgcacagaaacactatgaatgtaaactgtgtgggaaaacttacttgtctcctttaggttttcaagcacatgaaagtactcacactggagataaaccctttgagtgtaaaaaatgtggaaaagcatttagatactactactcagctcaaagacatgaaaggactcatactggagagaaaccctacaaatgtaaggaatgtgggaaagccttttattgttgcagttctgcccga

SEQ ID NO: 62539 - protein, 429 aa, Artificial Sequence
  derived and/or modified sequence
MAAQGYGYYRTVIFSAMFGGYSLYYFNRKTFSFVMPSLVEEIPLDKDDLGFITSSQSAAYAISKFVSGVLSDQMSARWLFSSGLLLVGLVNIFFAWSSTVPVFAALWFLNGLAQGLGWPPCGKVLRKWFEPSQFGTWWAILSTSMNLAGGLGPILATILAQSYSWRSTLALSGALCVVVSFLCLLLIHNEPADVGLRNLDPMPSEGKKGSLKEESTLQELLLSPYLWVLSTGYLVVFGVKTCCTDWGQFFLIQEKGQSALVGSSYMSALEVGGLVGSIAAGYLSDRAMAKAGLSNYGNPRHGLLLFMMAGMTVSMYLFRVTVTSDSPKLWILVLGAVFGFSSYGPIALFGVIANESAPPNLCGTSHAIVGLMANVGGFLAGLPFSTIAKHYSWSTAFWVAEVICAASTAAFFLLRNIRTKMGRVSKKAE

SEQ ID NO: 62540 - DNA, 1287 bp, Artificial Sequence
  derived and/or modified sequence
atggccgctcaaggatacggctactacagaaccgtaatcttttctgcaatgtttggtggatattccttgtattactttaatagaaagacattcagttttgtcatgccaagtctcgtggaggaaatacccctggacaaggacgatctgggattcattacgagcagtcagtccgctgcctatgcgatctccaaatttgtgagtggcgtactgagcgaccagatgtccgcccgatggttgttctccagtggactcctcctcgtcggtctggtcaatatatttttcgcgtggagttccactgtccctgtgtttgcggctttgtggtttctgaacgggctggcgcaaggacttggctggcctccctgcggcaaagtgctgcgcaagtggtttgagccaagccagtttgggacttggtgggcaatcttgtccaccagcatgaacctggccgggggactgggtcccatcctggccacaatcctggcgcaatcctatagctggcgaagcacattggcactttcaggcgctctgtgcgtggtggtctctttcctgtgtctgctgctgattcacaatgagcctgccgacgtcggcctgaggaatctcgaccctatgccctctgagggcaagaaaggcagcctcaaagaggagtctaccctgcaggagctgttgttgtctccctatctctgggtgctgtccacaggctatctggtggtatttggcgtgaagacctgctgcacggattggggacagttcttcctgattcaggaaaagggtcagtccgcactggtcggcagcagctacatgagcgcccttgaggtgggcgggctggtcggctccattgcagccggctatcttagcgatagggcaatggccaaggctggcctgagtaactacgggaacccgagacatggcctgttgttgtttatgatggctggcatgaccgtctctatgtacctgttcagggtgaccgtgactagtgatagccctaaactctggattctggtattgggggcagtcttcggattctcatcatacggacctatcgcactgtttggcgtaatcgccaatgagagcgctcccccaaatctgtgcggcacttctcatgcaatcgtaggcctgatggcaaatgtgggcgggtttcttgccgggctgccattcagcactatcgcaaagcactacagctggtctacagctttctgggtcgccgaagtcatttgtgccgctagtaccgccgcttttttcctcctcaggaatatccgaaccaagatgggtagagtctccaaaaaggcagag

SEQ ID NO: 62541 - DNA, 1287 bp, Artificial Sequence
  derived and/or modified sequence
atggcagcacagggctatgggtattaccgcacagtgatctttagtgcaatgttcggaggatactccctttattacttcaaccgaaagaccttcagtttcgttatgccgtccctagtcgaagagatacccctggacaaggatgatctagggttcatcaccagctctcagtccgccgcgtatgctatctccaagtttgtgtctggggtgctgtctgatcagatgagtgctagatggctgttcagttctgggttgcttcttgtggggctcgtaaacatcttttttgcctggtctagcacagttcctgtgtttgccgctctgtggttcctcaacggactggcgcagggtttggggtggccaccgtgtggcaaggttctgagaaagtggtttgaaccatcccagttcggcacatggtgggccattttgagcactagtatgaaccttgctggcgggctaggccccatcctggcaactatcttagcacagagttacagttggagatctactttggcattatccggagccctgtgtgtcgtcgtctctttcctatgcctgctcttgatccataacgagcctgccgacgtgggattacggaatcttgacccgatgccttccgagggcaagaaggggtccctaaaggaagagtctacactgcaggaactgctgctcagcccgtatctctgggtactgtcaactggctatctggttgtctttggagtgaagacctgttgcaccgactggggccagttcttcttgatccaagaaaagggtcagagtgctctggttggctccagctacatgtccgctctggaagtgggcgggctcgttggttccattgccgcagggtatctgtccgacagggccatggccaaggctggactatctaattatggtaaccctcggcacggtctgttgctgttcatgatggctggaatgacagttagcatgtatctctttcgggtcactgttacatcggactcgcccaagttatggatcctggtgctaggcgccgtcttcgggttctcatcctatggccctatcgctctttttggcgtgattgctaatgagtccgcacccccaaacctgtgcggcacctcacatgcaatagtcggcttgatggcgaacgtgggcgggtttctcgccgggttgcccttttctactatagctaaacactacagctggtcgacggccttttgggtggccgaagtcatatgcgccgcttctacggctgctttttttttactacgcaatatacgaacgaagatgggcagggtatcaaaaaaggctgag

SEQ ID NO: 62542 - DNA, 1287 bp, Artificial Sequence
  derived and/or modified sequence
atggcagcacagggttacggatactaccgtactgtcatctttagcgcaatgtttggaggatactccctgtactactttaaccggaaaactttctcgtttgtgatgccttccctggtggaggaaattcctcttgataaggatgaccttggtttcattacctcttcacagagtgcagcatacgctatcagcaagttcgtgtcaggtgtcctttccgaccagatgagcgccagatggctgttttcctccggcctgcttcttgtcggcctggtcaatatcttttttgcatggtcgtcgaccgtgcctgtgtttgcagcactttggttcctgaacggtttggcgcaaggactcggttggcctccttgcgggaaggtgctcagaaagtggtttgagccgagccagttcggtacctggtgggcaattctctcaacctccatgaacctggctgggggtctgggaccaattctggcaaccattctcgcgcaaagctacagctggcggtcgactctcgcgcttagcggcgccctgtgtgtggttgtgtcgtttctctgcctgctcctcatccacaacgaaccagccgatgtgggtctgcgaaacctggacccaatgccatctgaaggaaagaaggggtccctcaaagaagaaagcactcttcaagaactgcttctcagcccatacttgtgggtgctgagtactggataccttgtggtgttcggtgtcaaaacctgctgtactgattggggccaattctttcttatccaagagaaagggcagtctgcgcttgtgggatcctcctacatgtctgccctcgaggtgggcgggttggtcggatctatcgcggcaggctacctttcagaccgggcaatggccaaggcaggcttgtcgaactatggtaatcccagacacgggctgttgctcttcatgatggccggcatgaccgtttccatgtacctgtttagggtaaccgtgacgtccgattctcctaaactttggattcttgtgctgggagcggtgtttggttttagctcctacggccccatcgcccttttcggagtaatagcaaacgaatccgctcctccaaatctgtgtgggacgtcacatgcaattgtgggtctgatggccaatgtcggaggcttcctggcgggattgcccttttctaccattgccaagcattactcgtggtcgactgcattttgggtcgcagaggtgatatgtgcagccagcaccgcagcattctttctgctgcgtaacattaggactaaaatgggaagagtcagcaagaaggctgaa

SEQ ID NO: 62543 - DNA, 1287 bp, Artificial Sequence
  derived and/or modified sequence
atggcagcacaaggctacggctactaccgcactgtgatcttctccgcgatgttcggtgggtacagtctgtactacttcaacagaaaaactttctcgttcgtgatgccttccctcgtggaggagatcccgcttgacaaggacgacctggggttcatcacttccagtcagtccgccgcctacgctatctctaagtttgtgtcaggagtgctgagcgatcaaatgtcggcacgctggttgttcagctcggggctgctgcttgtgggacttgtgaacattttcttcgcatggagctccaccgtcccggtattcgctgccctctggtttctcaacggactggcccaaggactcggatggcccccttgtggaaaggtgctgcgcaagtggttcgagccgtcgcaattcggcacgtggtgggcgatcctgtccacctcgatgaatcttgctggagggctgggaccaatcctcgcgaccatcctcgcacagagctattcttggcgctccaccctggccctgagcggcgccctctgcgtggtggtttctttcctctgcctgctgctcatccacaatgaacctgcggatgtggggctgagaaacttggatcctatgccgtcggagggtaaaaagggatccttgaaagaagaatcaactctgcaagagctcctgctgagcccctacttgtgggtgctgtcgactggctacctcgtcgtattcggagtaaaaacctgttgcactgactggggacagtttttcttgattcaggagaaggggcagtcggcactcgtcggttcgtcttacatgagcgccctggaagtcggaggactggtcggtagcattgcggcgggctatctgtcagatagggcgatggctaaggcagggctctctaattacggcaacccgcgccatggcctcctgttgtttatgatggcaggaatgaccgtgagcatgtacttgttccgggtgaccgttacttcagactcgccgaagctctggatccttgtgctcggtgctgtgttcggatttagctcctacggtccgatcgccctcttcggcgtgatcgccaacgaatcggcgcctcccaacctgtgcgggacgagccatgctatcgtcggtctgatggcaaatgtgggagggtttctggccggtctgccattctcgactatcgcaaagcactactcatggtcaactgccttctgggtggccgaggtgatctgcgccgcaagcaccgcagcgttcttcctgcttcgaaatatccggaccaagatggggcgggtgtccaaaaaggcggag

SEQ ID NO: 62544 - DNA, 1287 bp, Artificial Sequence
  derived and/or modified sequence
atggcggcgcaaggttacggatactaccgcactgtgattttcagcgctatgttcgggggatactcactgtactacttcaaccgcaagaccttctcattcgtgatgccctcactggtcgaggaaatcccgcttgacaaggatgatctggggttcatcacctcgtcccagtcagccgcatacgcgatctcgaaattcgtgtccggtgtgctgtccgaccagatgtccgcccgctggctgttcagctccggactgctcttggtgggactggtgaacattttcttcgcctggtcctccaccgtcccggtgttcgcagcactgtggttcctcaacggattggctcagggcctgggttggcccccatgcggaaaggtgctgcgtaagtggttcgagcctagccagttcggcacttggtgggcgatcctttcgacttcgatgaacctggcaggaggactcgggccgatcctggccacgatcttggcgcaatcctactcctggaggtccacgttggcactgagcggagcgctgtgtgtggtggttagcttcctttgtctgctcttgattcacaatgaaccggccgacgtcggtcttagaaacctcgacccaatgccgtccgagggaaagaaaggttccctgaaggaagaatcgaccctgcaagagttgctgttgtcaccatacttgtgggtgctgtcgactggatacctggtcgtgttcggggttaagacttgctgcacggattggggccagttcttcctgatccaggagaaaggccagagcgccctcgtgggctcctcatacatgtcggctcttgaagtgggaggactggtcgggtcgatcgcagcaggctacctgtcagatcgagcaatggccaaagcgggactctcgaattacggaaaccccaggcatgggctcctgttgtttatgatggccggcatgactgtgtcgatgtacctcttccgggtcaccgtgacctccgactcgcccaagctgtggatcctggtgctgggagccgttttcggcttctcctcttacgggcccatcgcgctgttcggcgtgatcgcaaacgaatccgccccgcctaacctgtgcggaacgtcgcacgccatcgtgggactcatggcgaacgtcggtggtttcctggccgggctgccgttctccactatcgccaagcactactcatggtcaactgcgttctgggtcgctgaggttatttgtgcagctagtaccgctgcgttcttcctcttgcgcaatatcagaacgaaaatgggccgggtgagcaagaaggctgag

SEQ ID NO: 62545 - DNA, 1287 bp, Artificial Sequence
  derived and/or modified sequence
atggcggcgcagggttatggttactatcgcacggtgattttctccgctatgttcgggggctattcgctctattactttaatagaaagaccttttcgttcgtgatgccgtccctggtggaagaaattccacttgacaaggatgacttaggtttcatcacaagctcccagtcagcagcttacgccatctctaaatttgtctcaggagtactcagcgatcagatgtctgctcggtggctcttctcgagcggactgctgctggtcgggctcgtgaacattttctttgcatggtcaagcactgtgcctgtgtttgcagctctgtggttcctaaacgggctagcacaagggttggggtggccaccttgcgggaaggtgcttcgcaaatggtttgaacccagccagtttggaacgtggtgggccattctgtccacgagtatgaatttagccggcgggctgggtcccattctcgccacgatcttggcacaatcttattcatggagaagcacactggccttatctggggctctgtgtgtggtggtctcctttttgtgcctcctgcttattcataacgaaccggcagacgtgggactgcgcaatttggaccctatgccttcggaggggaagaagggctctctaaaggaggagtccaccctgcaggagcttctgctgtccccatacctttgggtcctcagtactggatacctcgtcgttttcggggttaaaacctgctgtaccgattggggccagttcttcttaatacaggaaaagggtcagagtgcactcgtgggcagttcatatatgagcgcactggaagtggggggtcttgttggaagtatcgccgccggatatcttagcgaccgcgccatggccaaggcaggtctgagtaactacggtaaccctaggcacggcttactgcttttcatgatggctgggatgactgtctccatgtatctcttcagagtaacagtgactagcgattcgcccaagctgtggatcctcgttcttggtgcagtgttcggtttctcctcttatggtccaattgccctgtttggcgtgattgccaacgaaagcgcgcctcctaacctttgtgggacgagccacgctatcgttggtttgatggcgaatgtaggagggtttctggccggactcccgttcagcacaatcgcaaaacactattcatggagcacagctttctgggtggccgaagttatctgtgccgcaagcactgccgcattctttctgcttaggaatatcagaaccaaaatgggaagggtgagtaaaaaggctgag

SEQ ID NO: 62546 - DNA, 1287 bp, Artificial Sequence
  derived and/or modified sequence
atggctgcacaggggtacggatactacagaaccgtcatctttagcgcaatgtttggaggttactcactctactactttaatcgaaagaccttttcgtttgtgatgccctcactcgtggaagagattccactggacaaggatgatctgggattcatcacttcctcccaatccgccgcatacgctatttcgaagtttgtgagcggagtgctttctgaccagatgtccgctcggtggctttttagcagcggcctgcttctggtgggattggtcaacatctttttcgcgtggtcaagcactgtcccagtattcgcagctctttggttcctgaacggacttgcacaaggtctgggttggccaccttgcggcaaggtcctcagaaagtggtttgaaccttcccaatttggtacttggtgggccattctttccacgtcaatgaatctggcaggaggcctcggcccaatccttgccactatcctggcacagagctactcatggagaagcaccttggcactttcgggtgccctgtgtgtggtggtttccttcctttgtctgctgctcattcataatgagccagcagacgtcggccttcgaaatcttgatccaatgccatcggaaggaaagaagggttcgctgaaagaagagtcgaccctgcaggaactccttctgtcaccctacctctgggtgctctccaccggttacctggtggtgttcggagtcaaaacgtgctgtaccgattggggtcagtttttcttgatccaagaaaagggccaatccgctcttgtcggttcctcgtacatgtcggcactggaagtgggagggctggtgggttccattgccgcaggatacctgtctgatagagcaatggcgaaggcaggactttcaaactacggtaatcctaggcatgggctccttctgtttatgatggcaggaatgaccgtgagcatgtatctgtttagagtgaccgtgactagcgattccccaaagctgtggatccttgtgcttggagcagtctttggctttagctcctacggtccaattgctctttttggcgtcatagccaacgaatcggcaccgcctaatctttgtggcacgtcgcatgccattgtgggtctgatggccaatgtgggcggattccttgcgggacttccattttccacgatagcaaagcactactcctggtccacggcattttgggtggccgaagtcatatgcgcagcatcgactgcagcattctttctgctgcggaacatcaggacgaagatgggacgggtgtcaaagaaagcggaa

SEQ ID NO: 62547 - DNA, 1287 bp, Artificial Sequence
  derived and/or modified sequence
atggctgcgcaaggctacggctactaccgcactgtcatattctccgccatgttcggcggatactcactgtactactttaaccgcaagaccttctcgttcgtgatgccgtcgctggtggaggaaatcccgctggacaaggacgacctgggcttcattacctccagccaaagcgccgcgtacgctatctcgaagtttgtgtctggcgtgctctccgaccagatgagtgcgcgatggctcttttcgtcgggacttctgctcgtcgggctcgtcaacattttcttcgcgtggtcgagcacggtgcctgtctttgcagctctctggttcctgaacggactggcgcagggcctcggatggcctccatgcggtaaggtcctgaggaagtggttcgagccgagccagttcgggacctggtgggcgatcctctcaacctcgatgaatctggctggaggactgggaccgatcctggccaccatacttgctcaatcgtattcatggcggtccactctcgctctgagcggagcgctgtgtgttgtggtcagcttcttgtgtttgttgctgatccataacgaacctgcagacgtgggccttcgcaatctggaccctatgccgtccgaaggtaaaaagggatcgctgaaagaggaaagcaccctgcaggaacttcttctttcgccatacctgtgggtcctcagcaccggttacctggtggtgttcggggtcaagacctgctgcactgattggggacaattctttctcatccaggagaaaggacagtcggcattggtggggtcgtcatacatgagtgccctggaggtcggaggactggttggatcaatcgcggccggatacttgtccgatcgggccatggccaaggccggattgtccaactacggcaatccccggcacggactccttctgttcatgatggccggcatgactgtcagcatgtatctgtttagagtgacggttacttccgattctccgaagctgtggattttggtgctcggagcggtgttcggattctcctcttacggtccaatagcattgttcggtgtgatcgccaatgagtcagctcccccgaacctctgcggtacttcgcacgcgattgtgggacttatggccaatgtgggcggcttcctcgccggcctgccattctcgaccatcgccaaacattactcgtggtcgacggctttttgggtggcagaggtcatctgcgctgcgagcactgccgcatttttcctcttgaggaacatcagaaccaaaatgggccgagtgtctaagaaagctgaa

SEQ ID NO: 62548 - DNA, 1287 bp, Artificial Sequence
  derived and/or modified sequence
atggccgcgcaaggctacggatactatcgcaccgtcatcttcagcgcgatgttcggcgggtactccttgtattacttcaataggaaaactttctcgttcgtcatgccttctttggtggaagaaatcccgttggacaaggacgatctgggcttcatcactagctcccagtcagccgcttacgccatcagcaagttcgtgtcgggtgtgctgagcgaccagatgagcgccagatggcttttctcctcgggactccttctggtcggactggtgaatatcttcttcgcctggtcctcaaccgtgccagttttcgctgccctctggtttctcaacggcttggcccaaggactgggctggccaccgtgcggcaaagtcctgcggaaatggtttgagccgtcccaattcggcacttggtgggcgatcctctccacctccatgaacctggcgggtgggctcggcccgattcttgcaactatcctggcccagtcctactcctggcggtcaaccctggccctctctggtgcactgtgtgtggtggtgtcgttcctttgccttttgctgatccacaacgagccggccgatgttggactgagaaacctggaccccatgccatcggagggcaagaaggggtccctgaaagaggaatcgacgctccaggaattgttgcttagtccttacctctgggtcctcagcactggctacctggtcgtctttggggtaaagacttgttgcaccgattggggacagttcttcttgatccaagagaagggacagtcagcactggtcgggtcaagctacatgtcggcgctggaagtcggaggactggtggggtctatcgccgccggttacctttcggaccgcgcgatggccaaggccggactgagcaattacggaaacccgcggcatggactcttgctcttcatgatggcgggaatgactgtgagcatgtacctcttccgcgtcaccgtcacctcggactcgccgaagctctggatcctggtccttggcgcagtgttcggattctcctcgtacggaccgatcgcactgttcggagtgatcgctaatgagagcgcccctccgaatctgtgcgggacttctcatgcaattgtgggactgatggcgaatgtgggaggcttcctggccggcctcccgttctccactatcgctaagcactactcgtggtcaaccgcgttctgggtcgccgaggtgatttgcgcagcctctaccgccgccttcttcctgctgcggaacatccgcactaagatgggccgtgtgtccaagaaagccgaa

SEQ ID NO: 62549 - DNA, 1287 bp, Artificial Sequence
  derived and/or modified sequence
atggccgctcagggatatggatattataggacagtcatcttttcagctatgtttggagggtatagtttatactactttaatcggaaaacattctcgttcgtgatgccttctctggttgaagaaatacccctcgacaaagatgatcttggatttatcacttcctctcagtcagctgcatatgcgatctccaaatttgtgtccggagtactttcagatcagatgtctgcaagatggctcttctcctctgggctcttgctcgtcggattggttaacatattcttcgcatggagttcaacagtgcccgtgtttgccgctttatggttcctcaatggattggcccagggactcggatggcctccctgcgggaaagtgttaagaaaatggtttgaaccttcccaattcggaacttggtgggcgatcctatctacatcaatgaaccttgccggggggctcggacccattctggctacaatcctggcacagagttattcatggcgatctacattggccttatcaggagctctttgcgtggtagtgtcctttctctgcctacttctcatacacaatgaacctgcagacgtggggctcagaaatctggacccaatgccaagtgaaggaaaaaaaggatccctgaaagaagaatccacacttcaggaattactgctttctccttatttatgggtgctgtccactggatatctcgtggttttcggagtgaaaacttgctgtacagattgggggcagttctttcttattcaggagaaagggcagagtgcacttgtcggatccagttacatgagtgcactcgaagtagggggactagtggggtccatagccgctggatatctaagtgatagagccatggccaaagctggattgtctaattatgggaatccgcggcatggattgctactcttcatgatggcgggaatgacagtgtctatgtacctgttccgagtgacagttacttctgattctcccaaactctggatactagttctcggggctgttttcggattctcctcttatgggccaattgcccttttcggggtaatagcaaacgaatctgccccccccaatttatgcgggacaagtcacgccattgtcgggctaatggctaacgtgggaggattcctcgctgggctccctttttccacaatcgccaagcattactcttggtctacagctttttgggtggccgaagttatctgtgccgcttcaacagcagctttcttcctcctacggaacattcggacaaagatgggacgggttagtaaaaaagctgag

SEQ ID NO: 62550 - DNA, 1287 bp, Artificial Sequence
  derived and/or modified sequence
atggctgctcagggctacggttattatcggacagtgattttcagtgctatgttcggcggttacagcctctactacttcaatcgtaagacctttagtttcgtgatgccatcactggtggaggaaataccactggacaaggacgatctaggatttattacaagttcacagtctgctgcgtacgccatcagtaagtttgtaagcggcgtgttaagtgaccagatgtctgctagatggttgttctcctctggcctgcttctggtgggtttagttaatatattttttgcctggagttcaacagttccggtgttcgctgctctgtggtttctaaatggcctggcccagggtctcggatggccaccctgcggcaaggtcctcaggaaatggtttgagcccagtcagttcggcacctggtgggctatactgtctacaagcatgaacctggccggaggcttgggacctattctggcaaccatcctcgcgcagtcctattcttggcgctccacactggccctttctggagccctctgcgtggtggtgtcttttctgtgtctgctgctgatacacaatgagccagccgacgtcggattgcgcaacctcgatccaatgccatcagaaggaaagaagggaagcttgaaagaggagtctacgctccaggaactgttgcttagcccctatctttgggtcctgtctaccggttacctcgttgtattcggagtgaagacatgttgtactgactggggacaatttttcctgatccaggaaaaaggtcagagcgctttggtgggcagtagctacatgtcggctctggaggtgggcggccttgtgggcagcatcgcagccggctatcttagtgatcgtgccatggctaaggctgggctttcaaactacggcaatccccggcatggtctgctgctctttatgatggccgggatgactgtctctatgtatctgttccgagtaacagtgacgtcggatagcccaaagctgtggattcttgtcctgggcgccgtgtttgggttctcctcttatggaccgattgccctctttggagttatcgcaaacgaatccgccccccccaacctctgcgggacctcacacgcgattgttgggttgatggctaatgtcgggggcttcctggcaggcctcccgttcagcaccattgctaaacactattcctggtccacggctttctgggtcgccgaagttatctgcgcggcttcaacagccgcgttcttcctcctgagaaatatccgaactaagatgggaagggtgtcaaaaaaggccgaa

SEQ ID NO: 62551 - DNA, 1287 bp, Artificial Sequence
  derived and/or modified sequence
atggctgcccagggatacggctattatagaacggtgattttctctgcaatgtttggcggatatagtctgtactacttcaataggaagacattctctttcgttatgccatccctcgtggaagaaatcccgcttgataaggacgacttgggattcatcacctcatcccagtcggcggcgtatgctataagcaagttcgtctcaggagtgctctcagatcagatgtccgctcggtggctcttttcctccgggctgttactggtgggacttgtgaatatcttctttgcctggtcctcaactgttcccgtgttcgctgccctgtggtttctgaatgggctggctcagggtttgggctggcccccatgtggaaaggtgctgagaaaatggttcgagcctagtcagttcggaacatggtgggcgattttatctacttctatgaatctggccggaggcttaggaccaatcttggcaactattctggctcaaagctattcatggcggtcaacccttgctctatcaggagccctgtgcgtggtcgtctcctttctttgcctcctgctgatccataatgaacccgcagacgtcggactccgaaatctcgatccgatgccatcagagggtaaaaaagggagtctgaaggaagagtctaccctgcaggagctcctgctgagtccctacttgtgggtgctgagtacaggctacctggtggtgtttggcgttaagacctgttgcactgactggggccagtttttcctcatccaggagaagggacagagcgcgcttgtgggctcgagctacatgtcagccctggaagttggcgggctggtggggagcatcgccgcggggtatctcagtgacagagccatggcaaaggccgggctttcaaattacggtaacccccgccatgggctgcttttgtttatgatggccggaatgaccgtcagtatgtacctgtttcgcgtgaccgttacaagcgactcccccaaattatggattttggtactgggggcagtgtttgggttttcctcatatggtccaattgccctctttggcgtgatcgccaatgagtccgccccaccgaacttgtgcgggacatctcacgcaatcgtggggctgatggcgaacgtcggcggcttcctcgccgggctacctttttctaccattgccaagcattactcatggtctaccgcattttgggtcgcagaagtgatttgcgcggcgagcaccgcagccttctttctactccgcaacatccgtaccaagatgggacgggtatcgaagaaggctgaa

SEQ ID NO: 62552 - DNA, 1287 bp, Artificial Sequence
  derived and/or modified sequence
atggcggctcagggatatggctattaccgaactgtgatctttagtgccatgtttggtggctactccctatactactttaaccggaagacttttagctttgtcatgccctctcttgtggaagagattccgctggataaggacgatttagggtttatcacctcaagccagagtgctgcatacgctatttccaagttcgtgagcggcgtgcttagcgaccaaatgtccgcccgatggttattctccagtggacttctgcttgtgggcctggttaacatttttttcgcatggtcgagcacagtacctgtgttcgccgccctgtggttcctgaatgggctggcacagggtcttgggtggcccccttgtggcaaggttttacggaaatggttcgaacccagccaatttggtacctggtgggctattttgagcacctctatgaacctagcgggcgggctagggccgatccttgcaactattctggcccagtcctactcttggaggtcaaccctagctttatccggcgccctgtgcgtggtggtatcctttttatgcctcctgcttatccataacgagccagccgatgtcggacttagaaatctggaccctatgccaagcgaagggaagaagggcagcttaaaagaggagagcactcttcaagagctgctcttgagcccctatctgtgggtgctaagtacaggctatctggtggtattcggcgtgaagacttgctgtacggattggggacaattcttcctgattcaggagaaggggcaatcggcgctggtgggctcctcttatatgtccgccctggaggttgggggcttggtgggctcaatcgccgccgggtatctttccgatagagccatggccaaagccggtctctctaattacggcaaccctcgacacggccttctgctgtttatgatggctggcatgaccgtgtcaatgtacctttttcgggttacagttactagtgattcaccgaaactctggattctagtgctgggcgcagtcttcgggttctcctcctacgggccaatcgcattatttggcgtaatcgcaaatgagagtgcccctcccaacctgtgtggcaccagccatgctattgttgggctcatggcaaatgtcggaggcttcctcgccgggctccccttcagcacaatcgcaaagcactactcttggtctacggccttttgggtggctgaggtgatttgtgctgcttccactgccgccttctttttgcttaggaatatccggaccaagatgggccgtgtttctaaaaaggcagaa

SEQ ID NO: 62553 - DNA, 1287 bp, Artificial Sequence
  derived and/or modified sequence
atggcagcccaaggatacgggtactatcgcaccgttattttctccgcaatgtttgggggctactcactctactacttcaaccgcaagaccttctctttcgtgatgccatcccttgtcgaagaaatcccacttgataaggacgatctcggtttcataacgtccagccagtctgctgcctacgccatttccaagtttgtctcgggtgttctcagcgaccaaatgtcggctcggtggctcttctcgtccgggctcctcctcgtcggcttagttaatattttcttcgcgtggagctcgacggtgcccgtcttcgccgccctttggttcttgaacggtttggcgcaaggtcttggatggcccccatgtggaaaggtgttgcggaagtggttcgaacctagtcagtttggcacttggtgggccatcctgagcacttctatgaaccttgccggcggccttggacctattctggcaacgattctggcccagtcatacagttggcgttctaccctggctctctccggtgcgctctgcgtggtcgtgagcttcctctgcctgctcctgatccacaatgagcctgctgatgtgggtctgcgcaacttggatcctatgccttcagaaggtaagaagggtagtctcaaggaagagagcacgcttcaggagctgctgctgtccccttatctctgggtcctgagtacaggttacctggttgtttttggagtcaagacctgctgcaccgactgggggcagttcttcctcatacaggagaagggtcagtccgccttggtgggcagctcgtacatgtccgccttggaggtaggaggtttggtcggctcgatagccgccggttacctgtccgaccgtgctatggctaaggccggtctaagcaattacggtaaccctaggcacggcctccttctgttcatgatggccgggatgactgtttccatgtacctgttccgtgtcaccgtcacatctgactcccctaagctgtggattctggtgctgggcgccgtattcggtttcagcagttacgggcctattgccctgttcggcgtcattgccaacgagtcggcgcccccgaacctgtgtggcacttcgcacgcgattgtcggacttatggcaaacgtcggtggcttccttgctgggttgccgttttcgaccatcgccaaacactactcctggtcgaccgccttctgggttgccgaagtcatctgtgctgcatccactgccgcctttttccttctgcgtaacattcgcaccaagatgggtcgcgtgtccaagaaggctgag

SEQ ID NO: 62554 - DNA, 1287 bp, Artificial Sequence
  derived and/or modified sequence
atggcagcccaggggtatggatattaccgtacagtaatcttttcagccatgtttgggggctactctctctactacttcaaccgcaagaccttctcttttgtaatgccgagcctagtggaggagatcccactggataaggacgatctcggattcattacctcatctcagagtgctgcctacgctatctctaagttcgtcagcggagttttgagcgatcagatgtctgcgagatggctgttttccagcgggctgctgctagtgggcctcgtgaacatcttcttcgcatggagctctactgtccctgttttcgctgcattgtggtttctcaacggtttggctcagggattggggtggccaccttgcggcaaggttttgcgcaagtggttcgagccatctcagtttggtacctggtgggccattctttcgacatctatgaatttggctgggggtctggggcctatcctggctaccatcctggctcagtcatactcatggcgatctaccctagccctgtccggggccctgtgcgtagtcgtaagctttttgtgtcttttactcattcacaatgagccagctgacgtcggtctgcggaatctagatccaatgccgtccgaggggaagaaaggatccctgaaggaggaaagcaccctgcaggaactgctcctctccccctatctttgggtcctcagcactggatacctggtggtgtttggggtcaaaacttgctgcaccgattgggggcagttcttcctgatacaagaaaaaggccagtctgccctcgtggggtcttcctatatgagtgccttggaagtcggcggactggtaggtagtattgctgcgggttacctgtccgatcgtgctatggcaaaagccggactcagtaattacggaaaccccaggcatggactactgctgttcatgatggcaggcatgacggtctctatgtacctgttcagggtaacggtaacgtccgactccccaaaactctggatactcgtgctcggagctgtgtttggcttctcctcttatgggccgatcgcattgttcggagtgatcgctaacgaatccgcacctccaaatctgtgtggcacaagtcacgctatcgtgggcctgatggccaacgtggggggattcttggccggactgcccttctctacaattgcaaagcattactcatggagcactgctttctgggtcgccgaggtgatctgtgccgcctccactgctgctttcttcctgctgcggaacatcagaacaaaaatggggagagtgagtaagaaagctgag

SEQ ID NO: 62555 - DNA, 1287 bp, Artificial Sequence
  derived and/or modified sequence
atggccgctcagggttacggctactatcgaacagtgatcttctccgcaatgttcggtggttacagcctctattacttcaaccgtaagacgttcagctttgtcatgccatcactcgtggaagagatccctctggacaaggatgacctagggtttattacgtcgtctcagtccgccgcttacgctatcagcaaattcgtctccggcgtgctttcggaccagatgtccgcacgctggctgttctcgtccggactgctcctcgtcgggcttgtgaatatttttttcgcatggtctagcacagtgcccgtttttgccgcactgtggtttttgaacgggttagcccaaggtctgggatggccgccatgcggcaaggtcctgcgcaagtggtttgaaccgagccagtttggaacatggtgggccatactctcaacatccatgaatctggcgggcggactcggcccaattctcgccacaattctggcgcagtcatacagctggagatcaactctggctctctccggagctctgtgcgtggtcgtttccttcctgtgcctgcttctgatccacaacgagccagccgacgttggcctcaggaatttagaccccatgccttctgagggcaaaaagggaagccttaaggaagaaagtactcttcaagagcttcttctctctccctacctttgggtgctcagtacgggctacctggttgtcttcggggtgaagacttgctgcaccgactgggggcagttcttcctaatacaagaaaaagggcaaagtgccctggtgggcagctcttatatgtccgccctcgaagtcggtggattggtcggcagcattgccgcgggctacctttccgatagggctatggcgaaagctggcctgtccaattatggaaatccccgccatggactgttacttttcatgatggctggaatgacagtgtctatgtatctattccgtgtgacggttactagcgacagccccaagttgtggattctagtgctcggggcggtctttggtttcagctcgtatgggcccatcgccctttttggagttatagcgaatgaatctgcccccccaaacctctgcggaacctctcatgctattgtgggtctaatggccaacgtaggagggtttctggcagggctgcctttttcgacgattgctaaacactactcctggagcaccgcattttgggtggctgaggtcatctgtgccgcgtccaccgcggcatttttcctgcttagaaacatccgtactaaaatgggcagggtgagcaaaaaggctgaa

SEQ ID NO: 62556 - DNA, 1287 bp, Artificial Sequence
  derived and/or modified sequence
atggcggcacagggctacggttactaccgcactgtgattttctcagccatgtttggaggatactcactgtactactttaaccgaaagacctttagtttcgtcatgccaagcctggtcgaagagattcctctcgacaaggacgatcttggtttcattaccagctctcaatctgcagcctacgcaatctcaaaattcgtctcaggggttctttcggatcagatgtccgcccgctggctttttagctcagggcttcttctcgtgggacttgtcaacatctttttcgcgtggtcatctacggtgcctgtgttcgcagcgttgtggtttttgaacgggctggcacagggactgggctggcccccttgtggaaaggtgctgagaaaatggttcgaaccgtcccagtttggcacctggtgggctattctttcgacgtcaatgaatttggccggtggtcttggtccgatcctcgcaaccattctcgcacaatcatattcatggagatcgaccctcgcactttccggtgcactctgtgtcgtggtgtcgtttctgtgtcttttgttgattcacaatgaaccagcggacgtcgggctgcgaaatttggatcctatgccttccgagggtaagaagggatccctgaaggaagagtcgaccttgcaggagctgctgctttcaccttatctctgggtcctgtccactggctacctggtggtctttggagttaaaacttgttgtactgactggggacaattcttccttattcaggagaaaggtcagtcggcccttgtgggttctagctacatgtcagccctggaggtgggtggtctggttgggtccattgcagcaggatacttgtcggatagagctatggcaaaggcagggctttccaactacggtaatcctcgtcacggtttgctgctgtttatgatggcaggcatgaccgtgtcaatgtacctgttccgagtgactgtcacctcggactccccaaagctgtggatccttgtgcttggagcagtgtttggattttcgagctacgggccaatcgcactgtttggggtgattgcgaacgaatctgcgcctccaaacctgtgcggtacctcccatgcaattgtgggactgatggcaaacgtgggaggattcctggcaggactccccttttcgacgatagcaaagcattactcctggtcgactgctttttgggtggcggaagttatttgcgcagcatccaccgccgccttttttcttctgagaaatatcagaaccaagatgggcagagtgtcgaaaaaggcagaa

SEQ ID NO: 62557 - DNA, 1287 bp, Artificial Sequence
  derived and/or modified sequence
atggcagcgcagggatacggatactaccgcaccgtgattttctcagccatgttcggcggctactccctgtactacttcaatcgaaagactttcagcttcgtgatgccgtcgctggtggaggagatcccactggacaaggatgacctcggttttatcacctcttcgcagtcggccgcttacgccatctcgaagttcgtgagcggcgtgctgagcgatcagatgtcggcgcgctggctcttctcgtccggtttgctgctggtagggctcgtgaatatcttcttcgcatggtcgtcgaccgtgccggtctttgctgccctctggtttctgaatggattggcccagggactgggatggccgccttgtggaaaggtgctgcgtaagtggttcgagccgtcacagttcggaacttggtgggccatcctcagcacctcgatgaacctggccggaggactgggcccaatactcgcaaccatcctggcgcagtcgtatagctggaggtccactttggcgctgtctggggcactctgcgtggtggtgtccttcttgtgccttctgcttatccataatgagcccgccgatgtgggacttagaaacctcgatccgatgccgtcggagggaaagaaaggcagtcttaaggaagaatcgaccctgcaggaactccttctgagcccgtacctgtgggtgctgagcacggggtacctcgtcgttttcggggtgaaaacttgctgcaccgactggggacagttcttcctgattcaagagaagggacagtcggcgctggtcggatcctcctacatgtccgcgttggaagtgggagggctcgtgggatccatcgccgccggatacctcagcgaccgggctatggccaaggctgggctgtcaaactacggcaatccgagacacggactgcttctgtttatgatggccggaatgactgtgtcaatgtacttgtttagggtgaccgtgacttctgactcgcccaaactgtggatccttgtgctgggagcagtctttggcttttcttcgtacggacctatcgcactgttcggagtgattgcgaacgaatcggcaccgccgaatctctgcggcacctcgcacgccatcgtggggctcatggctaatgtcggcggatttctcgccggactcccattctcaactattgcaaagcactactcgtggagcaccgcgttctgggtcgcggaggtgatctgcgccgcatccacggccgcgttttttctgctccggaatatcaggactaagatgggacgcgtgtccaaaaaagcggag

SEQ ID NO: 62558 - DNA, 1287 bp, Artificial Sequence
  derived and/or modified sequence
atggcagcccaggggtacgggtactatcgcaccgttatttttagcgccatgtttggtggatacagcttatactacttcaatcgcaaaacgttctcattcgtaatgccctctctggttgaggagatccctcttgacaaggatgatttgggcttcatcacttctagccaaagtgccgcctatgccatttccaagttcgtgtccggggtcctgtcagaccagatgagcgctcggtggctttttagcagcgggttactcttggtcggactggtgaacatcttctttgcttggtctagcacggtgcccgtctttgccgccttatggttccttaatggcctagcccagggcctggggtggcccccttgcgggaaagttctgcgcaagtggtttgagccttctcaatttgggacatggtgggccatcctcagtactagtatgaacctggctgggggccttgggcccattctcgccacgattctggcccaaagctatagttggaggtctactctcgcgctgtctggagccttgtgcgtcgtggtgtctttcctctgccttttgttaatccataatgaacctgcggacgtgggcctgagaaacctggatccaatgccctctgagggtaagaaagggtccctaaaggaggaatccactctacaggagctgctgctctccccatacctttgggtactttccaccggctatctggtggtattcggtgtgaagacctgttgcacagattggggccagttcttcctgatccaggaaaaaggccagtcggctctggtcggcagttcttatatgagcgcactggaagtgggcggcctggttggtagtatcgcagccggctacctgtcagatcgtgccatggccaaggccggcctttccaactacgggaatccgcgacatggtctgttgctgttcatgatggcaggaatgacagtctcaatgtacctcttcagggtcaccgtaacaagcgactcacctaaactctggatactcgtgttgggggccgtatttggtttttccagctacggtccaatcgcgttgttcggagtgattgccaacgagtcagccccacctaacctttgcgggaccagccatgcgatcgtgggactaatggcgaacgtcggcggcttcctcgcggggctgccttttagtactatagccaagcattactcatggtctacagcattctgggtcgctgaagtcatttgcgctgcatccactgcggcgttttttcttctcagaaatatcaggaccaagatgggccgcgtcagcaaaaaagcagag

SEQ ID NO: 62559 - DNA, 1287 bp, Artificial Sequence
  derived and/or modified sequence
atggcagcacagggctatgggtactaccgcaccgtcatcttttcggcaatgtttggaggttatagcctctattacttcaataggaaaacgttctccttcgtgatgccatcgcttgtggaagagattcctctggataaggatgatctggggttcataacctcgtcgcagtcggcagcttacgccatcagcaagtttgtgtccggagtcctttcggatcagatgtcagcacgctggctgttttcaagcgggctgcttcttgtgggtcttgtgaacatcttttttgcctggtcgtccaccgtgcctgtttttgcggcactttggtttctgaacggactggcgcaaggactgggatggcctccgtgtggtaaggtgctgagaaagtggttcgaacctagccaattcgggacctggtgggcaattctttctacctcgatgaatcttgcgggtgggttgggcccaattctcgcaactattctggcacaatcctactcatggcgctccacgctcgccctttcgggtgcactttgtgtggtggtgtcatttctgtgtctgctcctgatacacaatgaaccggcggatgtcggcctccgcaaccttgacccaatgccaagcgagggtaagaaaggttcactgaaggaggaatctactctgcaggaacttctgctttcaccttacctgtgggtgctgtcgactggatacctggtggtgtttggagtcaagacctgctgtaccgattggggacagttttttctcatccaagagaaaggacagagcgcactcgtcggatcatcatacatgtcagcgctggaagtgggtggcctggtgggatctatcgcagccggatacctgtccgatagagcaatggctaaggcaggattgtccaactacggaaatccaagacatgggctcctgctgtttatgatggcaggaatgaccgtgtccatgtacctttttcgggtcaccgtgacgtcagacagtcctaagctctggattctcgtgcttggggctgtctttggtttctcgtcgtacggtccgattgcattgtttggggtgattgccaacgagagcgcacctcccaatctttgcgggacttcccacgctattgtgggtctgatggcaaatgtgggcggattcctcgcagggctccccttttcgaccattgcaaagcactactcatggtccaccgcattctgggtggcggaagtgatctgtgcagcatcaaccgcagcattctttcttcttagaaacattcggaccaagatgggtcgcgtgtcaaagaaggcagaa

SEQ ID NO: 62560 - DNA, 1287 bp, Artificial Sequence
  derived and/or modified sequence
atggcagcgcagggatacggttactatcgcaccgtgatctttagcgcaatgttcggtggttacagcctgtactactttaatcggaaaaccttctcctttgtgatgccttcccttgtggaagaaattcctctcgataaggacgacctgggcttcataacttcaagccagagcgccgcatacgcaatttctaagtttgtctcaggggtgctttccgatcaaatgagcgcaagatggctgtttagctcaggactgctccttgtcggcttggttaacattttctttgcatggtcgtcgaccgtgccagtgtttgctgcgctctggttccttaatggacttgcacaagggcttggttggcctccctgtggaaaagtactccgaaagtggtttgagcccagtcaatttggaacctggtgggccatcctttctacttccatgaacctggccggtggcctgggaccaatcctcgctacgatactggcgcagagttactcctggcggtccaccctggcactctcgggagcactctgcgtggttgtgtcttttttgtgcctgctgttgattcataacgaacctgccgatgtggggcttagaaaccttgatccgatgccttcggaaggaaagaagggtagccttaaagaggaaagcactctgcaggaacttctgttgagtccatacttgtgggtgctgagcaccggataccttgtggtctttggggtcaagacttgttgcactgattggggacagtttttcttgattcaagagaagggtcaatctgcccttgtcggatctagttacatgtcagcacttgaagtgggcggactcgtgggctctatcgccgcaggatatctttcggatagggcaatggcgaaggctggtctttcaaattacggtaatcctcgacacggactcctgctgtttatgatggcgggcatgactgtgtccatgtacctgttcagagtcaccgtgacctcagactcaccaaaattgtggatcctggtgctgggcgctgtattcggattttcgtcgtacggtcccattgcactgtttggggtgatagccaacgagtcggcaccacctaacctttgtggcacctcgcacgcgattgtgggtctgatggccaacgtcggcggattcttggccgggctgccgttttcaactattgcaaagcattacagctggtccactgccttctgggtcgctgaggtcatctgtgcggcctcgaccgcagcattctttctgctgagaaatatccgcacgaaaatgggccgtgtgtcaaagaaggcagaa

SEQ ID NO: 62561 - DNA, 1287 bp, Artificial Sequence
  derived and/or modified sequence
atggcagcgcagggatacggatactaccgcactgtgatcttcagcgcgatgtttggcgggtatagcctgtactacttcaaccggaaaactttcagcttcgtgatgccgtcgctggtggaagagattccactggataaggacgacctgggattcatcacctcatcgcagagcgcagcttacgccataagcaaatttgttagcggagtcctgagcgatcagatgtccgccaggtggctgttctcgtcggggctgcttctggtgggactggtcaatatcttttttgcctggtcctcgactgtccctgtctttgcagcgctttggtttctcaacggcctggcgcaaggccttggttggcccccttgcgggaaggtgttgcgcaagtggtttgaaccatcgcaattcggcacgtggtgggcaatcctctcgaccagcatgaacctggcgggaggtcttgggccgatcctcgccaccatcctggcacagtcgtactcgtggaggtccactctggcgttgagcggggcgctgtgcgtggtggtgagcttcctgtgtttgctgctgatccacaatgagccggcagacgtcggcttgcggaatctcgatccaatgccctctgaaggaaagaagggatccctgaaggaggagtcgactctccaagaactgctgctgtcaccatacctgtgggtcctgtcgacgggctacctggtggtgttcggagtcaagacctgctgcaccgattggggacagttctttctgattcaggaaaagggtcagagcgccctggttggaagctcatacatgtcagctctcgaagtcggaggactcgtcggcagcatcgccgccggatatcttagcgacagagcgatggctaaggctggcctgagcaactacggaaacccccggcacggattgctgcttttcatgatggccggaatgactgtgtccatgtacctgttcagggtcaccgtgacgagcgacagcccgaagctgtggattctcgtgcttggcgccgtgttcggattttccagctacggaccgatcgccctgttcggcgtcattgctaacgaatccgccccgccgaacctgtgcggaacttcgcacgccatcgtgggtctgatggccaacgtgggaggcttcctggcaggactgcccttctccaccatcgccaagcattactcatggtctactgccttctgggtggcagaagtgatctgcgcagcttctactgcagcgtttttcctgcttcggaacattagaactaagatgggacgggtgtcgaagaaggccgaa

SEQ ID NO: 62562 - DNA, 1287 bp, Artificial Sequence
  derived and/or modified sequence
atggcagctcaagggtacggctactaccggacggtgatcttctccgccatgttcggtgggtactccctctactacttcaacaggaaaaccttctcattcgtgatgccaagtctggttgaagagatcccgctcgacaaggacgatctgggtttcatcactagctcacagtcggcggcctacgccatctcgaagttcgtctcaggagtgctgtccgatcaaatgtccgcaagatggctgttcagcagcggacttctgctcgtgggcctcgtcaatatcttttttgcctggtcgtcgacggtgcccgtgttcgctgcgctgtggttcctcaacggactcgcccagggcctcggctggcccccatgtggaaaggtcctgcgcaaatggtttgaaccttcgcagtttggtacctggtgggccatcttgtccacctccatgaatctggccgggggactcggcccgatcctggcaaccatcctcgcccagagctacagctggagatcgaccctcgcactgagcggtgcgctgtgtgtggtggtgtcatttctctgcctgctgctgatccacaatgagccagctgatgtggggctccgcaatctcgatcctatgccgtcagaggggaaaaaaggatccctgaaggaggagtcgacccttcaggagctgctgctctcgccgtacctctgggtgctgtccaccggttacttggtggtcttcggcgtgaagacttgctgcaccgattggggacaattctttctgatccaggagaaaggtcaatcggcgcttgtcggctccagctatatgtcggctctggaggtgggaggactggtgggatcaattgccgctggatacctgtccgatcgggccatggccaaggcgggactttccaactacggcaacccgagacatgggctcctgcttttcatgatggcggggatgaccgtctcgatgtacttgtttcgggtgactgtgacctcagattcaccaaagctgtggattctcgtgctcggagcggtgttcggattctccagctatggcccaattgccctgtttggagtgatcgccaacgaaagcgcgcctccgaatctgtgcgggacctcccatgccatcgtgggccttatggctaatgtcggaggattcctcgcaggtcttccgttctccactatcgcaaagcactattcctggtcaactgccttctgggtggcggaggtcatttgcgctgcatcaactgctgcgttcttcctcctgcggaacatccggaccaagatgggtcgcgtgtcgaaaaaggccgag

SEQ ID NO: 62563 - DNA, 1287 bp, Artificial Sequence
  derived and/or modified sequence
atggccgcgcaaggatacggttactaccggacggtgattttcagcgccatgtttggtggctacagtctttactactttaacaggaaaactttctcgtttgtgatgccatcgctggtggaagaaataccacttgacaaggacgacctggggtttatcacctcctcgcaatccgccgcatatgcaatttcgaagtttgtttcaggagtcctgtcagaccaaatgtctgccagatggcttttttcctcgggcctgctgcttgtgggtctggtgaacatcttttttgcctggtcaagcaccgtgccagtctttgcggcactctggtttctcaacggccttgctcaaggacttggatggcctccttgcggaaaagtgctccggaagtggtttgagccctctcagtttggtacctggtgggcaattctgtccacgtccatgaacttggcaggaggtctgggcccaatactcgcaaccatcctggcgcaatcgtacagctggagatcgacgctcgcactgtccggagcactctgtgtggtagtctcgttcctgtgtctgctccttattcataacgagccagcagatgtgggcctgaggaacctggatccaatgccttccgaaggaaagaagggctcgctgaaggaggagtcaactctgcaggaactgctcctctcaccgtacctctgggtgctgtcgaccggataccttgtggtgttcggtgtgaaaacctgctgcaccgattggggacagttttttctgattcaagaaaagggccagtcagcacttgtcggctcaagctacatgtccgccctcgaagtgggtggattggtgggtagcatcgcagcaggatacctctcggatagggctatggcaaaggcgggcctgagcaattacggaaatccacgtcatggactgttgctgtttatgatggcagggatgacggtgtccatgtacctgttccgcgtgaccgtcacctctgattcaccaaagctgtggatactggtgctgggggccgttttcggattctcgtcgtacggaccaattgccctgtttggtgtgatcgcaaacgagtccgccccacccaatctgtgtggtacctcacatgcaatcgtgggactgatggcaaacgtgggaggttttctggctggcctccctttttccactatcgcaaaacactactcgtggtcaaccgccttctgggtggcagaggtcatttgtgctgcatctactgcagcgttcttccttttgaggaacatccgcacgaagatgggtcgggtgagcaaaaaggcagaa

SEQ ID NO: 62564 - DNA, 1287 bp, Artificial Sequence
  derived and/or modified sequence
atggcagcacaaggatacgggtactaccggaccgttatttttagcgcaatgttcggggggtacagcctctactattttaatagaaaaaccttctcttttgtgatgccgtcacttgtggaagaaattcctctggacaaggacgatctgggttttatcactagctcccagagcgcagcatacgctattagcaagttcgtgagtggggtcctgagcgaccagatgtccgcgcggtggcttttttcgtcgggccttctattggtgggtctagtgaacatcttcttcgcctggagttctactgtgccagtatttgccgccctctggttcctgaatgggcttgctcaaggtctaggatggcctccctgcgggaaagtactgcggaagtggtttgagcccagtcagttcggtacgtggtgggccatactgagtacaagtatgaacttagcgggcggcctgggacctatacttgcaactatcttggcacagtcctactcctggcgaagcactttagctctttccggtgctctgtgcgtagtagtgtctttcctgtgtctgctactgatccacaatgaacctgctgatgtcggactcaggaacttagatccgatgcctagcgaagggaagaaaggtagtctcaaggaagaaagcaccctgcaggagctgctgttaagcccttatttatgggtgctgtccaccgggtatctggtcgtttttggtgtcaagacctgttgtacagactggggccagttttttcttatacaagagaagggtcaatcagctctcgttggttcttcctatatgtctgccctagaggtgggcgggctggtgggatccatcgcagccggctacctgagcgaccgagcaatggctaaggctggactcagcaattatggaaatcctcgccatggcctgctgttgtttatgatggccggtatgaccgtgtccatgtacctcttccgcgtgactgtgacatccgactcaccaaaactctggatcctagtgctcggagctgtgtttggtttctcctcttacggaccaatagccctgtttggcgtgatcgctaatgagagtgcgccgcctaacctctgcgggacctcccacgccattgtgggcctgatggcgaacgtcgggggctttctcgcagggctgccgttttcaaccattgccaagcactacagttggtctaccgcattctgggttgcagaagtcatctgcgccgcttcgactgctgcttttttcttgctacgaaatattaggacaaagatggggcgagttagcaagaaagccgag

SEQ ID NO: 62565 - DNA, 1287 bp, Artificial Sequence
  derived and/or modified sequence
atggctgcgcagggttatggctactataggaccgtgatctttagcgcgatgttcggcggctactcattatattatttcaacaggaaaactttcagctttgtgatgcctagcctcgttgaagaaattccactcgacaaagatgacttgggattcatcacctctagccagagcgcagcttacgccatcagcaaatttgtatcaggagttctgtcagaccagatgagcgccagatggttattcagctctggcttgcttctggtgggtctggtgaacatcttcttcgcttggtccagcactgtgcccgtgttcgccgcgctttggtttcttaatggattagcacaagggttgggctggcccccttgtggaaaagtgttgaggaaatggtttgagccaagtcagtttggtacatggtgggccatactgtcaacaagcatgaacctggccggaggcctggggcctatcctggccacaatactggcacagagttatagctggcggtctactctggctctgtccggagctctatgtgtcgtggtctcctttttatgccttctccttatccataatgaacccgcagatgtaggcttacgtaatttggatcctatgcccagcgagggtaagaaggggtccctgaaggaggaaagcaccctgcaggaattgctcctcagtccatatctgtgggtgctgagcactggctacctggttgtgttcggagtgaaaacctgctgtactgattggggtcagttttttttaatacaggagaaggggcagtccgccctcgtgggatcctcttacatgtctgccctggaagtcggcggcttggttggcagcatcgctgctggttatttgtcagaccgtgcgatggcaaaggccggactgagcaactacggaaaccctagacatgggttactgttgtttatgatggcgggaatgaccgtctctatgtacctcttccgagtgacagtaactagcgattcaccaaaactgtggatcttggtgttaggagccgtgttcggcttttcgtcatatggccctattgccctcttcggagtaatagctaatgagtccgctccccctaatttgtgcggtacttcccacgctatcgtggggctaatggctaacgtgggaggcttccttgctggattgccttttagcacgatcgccaaacattattcgtggagtacagcattctgggtggcggaggtgatctgtgctgcttccactgccgcctttttcctgttgcggaatataaggaccaaaatgggaagggtgagcaagaaagctgag

SEQ ID NO: 62566 - DNA, 1287 bp, Artificial Sequence
  derived and/or modified sequence
atggcagctcagggatatggatactaccgaactgtgattttttctgccatgttcggcgggtactctctttactattttaaccgcaagacatttagttttgttatgccatccctggtagaagagattccactcgacaaggacgatctgggtttcattacatcatcccagagtgcagcatacgctatatcaaagtttgtgtccggtgtgctttccgatcaaatgagcgctaggtggctgttttcaagtgggctgctcctggtgggcctcgtcaatattttttttgcttggtcttccaccgtgcctgttttcgctgctctgtggttcctaaacgggttggctcagggtctggggtggcctccctgcggtaaggtcttacgaaagtggtttgaaccttctcagttcgggacttggtgggctatcttgagcacttccatgaacctggctggcggcctgggtcctatactagctaccatactggcccagagttatagttggaggtcaaccctcgctctgagcggagccctatgtgtggttgtgagctttctgtgtctgctgctgattcacaatgaacccgctgatgtaggcctgcgaaacctggatcctatgccgtctgaagggaagaaggggagcctaaaggaagagagcaccctgcaggaactcttactatcaccatacctctgggtgctgtctaccggttatctggtggtgttcggcgtgaagacctgttgtaccgactggggccagttttttctaatccaggaaaaggggcagtctgccctggtgggctctagctacatgtctgccctggaggtgggcggattggtgggcagcatcgccgctgggtacttgtcagatagggctatggccaaggctgggctgtccaactatggcaatcctagacatggcctgctgctgttcatgatggcagggatgacagtcagcatgtacttattccgggtgactgtgacaagcgactcccctaaactctggatactggttctgggcgcagttttcggtttttccagctacgggcctatcgctctgttcggcgttattgccaacgaatccgcaccacctaacctgtgcgggacctcccacgctatcgttgggttaatggccaatgtaggaggcttcctggccggtctacctttcagtacaattgccaaacactacagttggagtaccgctttttgggttgcagaggtcatatgcgccgccagtaccgcagctttttttttactacggaatattagaaccaaaatggggcgggtgtctaagaaagcagag

SEQ ID NO: 62567 - DNA, 1287 bp, Artificial Sequence
  derived and/or modified sequence
atggccgcacagggttacgggtactaccgcaccgtgatcttcagcgccatgttcggcggatactccttgtactacttcaaccggaaaaccttctcgttcgtcatgccgtcgcttgtggaagagatcccgctcgacaaggatgacctgggcttcatcacctcctcccagtcggcggcatacgcgatctcgaagttcgtttcaggtgttctgtcggatcaaatgtcggcgcgatggctgttctcgtccggacttctgctggtcggactggttaacatctttttcgcatggtcatcaacggtgccggtgttcgcggcattgtggttcctcaatggactggcacaggggctgggatggccgccatgcggaaaagtgctgcggaagtggttcgaacctagccaattcggaacctggtgggccatcctctccaccagcatgaacctcgcaggtggcttggggcccatcctggccactatcctggctcaatcctactcctggcggtcgaccctggcgctgtcgggcgccctttgtgtcgtggtttcatttctgtgcctcctgctgatccataatgagccggccgatgtgggactccggaacctggacccgatgccgagcgagggaaagaagggaagcctgaaggaagaaagcaccctgcaggaactgctcctgtctccgtacttgtgggtgctgagcactgggtatcttgtggtgtttggcgttaaaacctgctgtactgattggggacagttctttctgatccaggaaaaggggcaatcggcactcgtgggttccagctacatgagcgcactcgaggtgggcggacttgtcgggtccatcgccgcgggataccttagcgacagggctatggccaaggcgggactgtccaactacggaaatccacgccacggactgctcctgttcatgatggccggaatgacggtgtcgatgtacttgtttagagtgactgtgacctcggactcaccgaagctctggatcctggtcctcggagccgttttcggattctctagctacggaccaatcgcgctgtttggcgtgatagccaacgaaagcgcaccgccgaacctgtgcgggacctcccatgcgatcgtcggactcatggccaacgtgggaggattccttgcagggctcccattctctaccatcgctaagcactactcgtggagcaccgcgttttgggtcgctgaggtgatttgcgccgcttcaacggctgctttctttctgctccgcaacatccggaccaaaatgggacgagtgagcaaaaaagcggag

SEQ ID NO: 62568 - DNA, 1287 bp, Artificial Sequence
  derived and/or modified sequence
atggccgctcaggggtacggctactaccgcacagtgatttttagcgctatgtttggtggatatagtctgtactactttaacagaaaaactttcagttttgtgatgccctcacttgtggaagaaatacctctggataaagacgatcttggtttcattacctcctcgcagtctgcggcttacgcgatatcaaaatttgttagcggcgttctaagcgatcagatgagtgcccggtggctgttcagttccgggttgcttcttgtgggtctggtgaatatcttttttgcctggtctagcacagtgccggtctttgcagctctgtggtttttgaacgggttggcacaaggactgggttggcccccatgcggcaaggtcttgaggaaatggtttgaaccatcacagttcggaacatggtgggccattttgtcaacatccatgaatctggcgggcggcctgggtcccatcttagctaccattctcgcacagtcttactcctggcgatctaccctggccttgagtggagctttatgcgtcgtggtctccttcctctgtctcttgctgatccacaatgagcccgctgatgtagggctgcgtaatcttgatcccatgccctcagaagggaaaaagggctccctcaaggaagagagtacactccaggaactgctgctctcaccgtatctgtgggtgttatcgaccggctatctcgtggtctttggtgtgaagacatgttgcaccgactggggacaatttttcttgatccaggagaaggggcagtccgcattggtgggatccagttacatgtccgctctcgaggtgggagggttggtggggagcattgcagccgggtacctgtcggatcgcgccatggccaaagccggattatctaactacggcaatccaaggcacggccttctgctgtttatgatggcggggatgactgtatctatgtatctgttccgggtcaccgttacatccgacagccctaagctctggatccttgtactgggagcggtttttggattcagctcgtatggccctattgctctgtttggggtcatagcaaacgaaagcgcaccaccaaacctttgtgggacaagtcacgccatagtcggtctgatggctaatgtggggggctttctggccggcttgccattcagcactatcgctaagcactactcctggagtacagcattttgggtcgcagaagtaatctgcgctgccagtactgccgcattcttcctgttgaggaatattcgaacaaagatgggcagggtgtcaaaaaaggccgaa

SEQ ID NO: 62569 - DNA, 1287 bp, Artificial Sequence
  derived and/or modified sequence
atggctgctcagggatacggttattatcgtactgtcattttctcagctatgtttggaggatactctttgtattatttcaataggaaaacgttctcatttgttatgccatctcttgtggaagaaattccattagataaggacgatctgggattcattacctcttcacagagtgcagcttatgcgatcagtaaatttgtttctggtgttctttctgatcagatgtccgcacgctggctcttcagttcaggtttactgttggttggcttggtgaatatcttctttgcctggtcgtcaactgtccctgtattcgcagcactgtggtttttgaacggacttgctcaaggtttgggatggccaccatgtggaaaagttctgcgaaaatggtttgagccgtcacagtttggaacgtggtgggcaatcctttccacgtcgatgaacctagcgggaggacttggaccaatcctagctacaatacttgcccaatcttactcatggcgctcaacattagcacttagcggtgcactctgcgtcgttgtcagttttttatgcctgttactcatacataacgaaccggccgatgttggattgcgtaaccttgatccaatgccttccgaaggtaagaaaggttcattaaaagaggaatccacattgcaagagctacttctatccccatacctttgggttctctcgacaggataccttgttgtattcggagttaaaacttgttgtacggactggggacaattcttcttaatacaagagaagggtcaatcagccctcgtaggatcgtcttatatgtctgcccttgaagtaggaggactggttggctcaatagcagcaggatatctcagtgacagagctatggcaaaggcgggactgtctaattacggaaatccacgtcatggtttactgctgttcatgatggctggaatgacagtttctatgtacttatttcgtgttaccgtcacatcagatagtccgaagctctggatattggtccttggagctgtatttggcttctcttcttacggaccaattgcattattcggagtcattgctaacgagtctgcacccccgaatctctgcggaacatctcatgcaattgtggggctaatggctaatgttggaggattcttggcaggtcttcccttttcaacgattgcaaaacattattcttggtccactgcattttgggttgcagaggtaatttgcgcggcaagtactgcagcattctttctcttgcgtaacatcaggacaaagatgggccgtgtctcaaagaaagccgaa

SEQ ID NO: 62570 - DNA, 1287 bp, Artificial Sequence
  derived and/or modified sequence
atggcagcacagggttacggctactaccgcactgtaattttcagcgccatgttcggtgggtactcgctctactatttcaatagaaagaccttttctttcgtgatgccttctctggttgaggagatccccctcgacaaggatgatctggggttcatcacctcctcccaaagcgccgcctacgctatctctaaatttgtgagcggagttctcagcgaccaaatgtcagctaggtggctgttttcttccggactcctcctggtggggctagtgaacatcttctttgcttggagtagtaccgtgcctgtgttcgcagctctgtggttcctgaacggtctggctcagggcctggggtggcccccatgtggcaaggttctgcgaaaatggttcgagccaagtcagtttggtacctggtgggccatcttgtcgacgagcatgaatcttgccgggggtttgggtcctattctagccacaatcttggctcagagctactcctggagaagtactcttgccctgtcaggagccctgtgtgtggtggtgtcgtttctgtgtcttctcctcatccacaacgagcctgctgacgtgggactacgcaatttggaccctatgcctagtgaggggaagaaggggagcctgaaggaggagagtacattgcaagaactactgctcagtccctacttgtgggtattaagcaccggctacctcgtggtgtttggcgttaaaacttgctgcactgactgggggcagttcttcttaatacaggagaaagggcagtccgcactcgtaggaagcagttacatgtccgctttagaagtgggagggctagtgggcagcattgctgccggctatctatcagatagggcgatggccaaagccggacttagcaattacgggaatcccaggcatggtctgctactgtttatgatggcaggaatgaccgtgagcatgtacctattcagagtgactgtcacatctgattcgcccaagctatggatcctggtgctgggcgcggttttcgggttttctagttatgggcctattgcgctgtttggagtcatcgccaatgagtcagcccctcctaacctttgcggtacatctcatgcaatcgtgggtttaatggctaacgtgggtggcttccttgctggcctgccctttagcactatagctaagcattactcttggagtaccgctttctgggtggctgaggtgatttgtgcagcgtccacagccgcattcttcctccttcggaacattaggaccaagatgggcagggtatcaaagaaggcagag

SEQ ID NO: 62571 - DNA, 1287 bp, Artificial Sequence
  derived and/or modified sequence
atggccgcacagggatacggatactaccggactgtgatcttttcggcaatgttcggaggatactcgctctattacttcaataggaaaacctttagctttgtgatgccgtccctggtggaggagatccctctcgataaggatgacctcgggttcataacttccagccaatcagcggcatacgcaatctcgaagttcgtgtccggagtgctgagcgatcagatgtccgcccgttggctgttttcaagcggactcctcctggtgggactcgtgaacatcttcttcgcctggtcaagcaccgtgccggtctttgcggcactgtggttcctcaatggcctggcgcaaggtttgggctggccgccgtgtggaaaggtgctcaggaaatggttcgagccttcccaattcggaacctggtgggccatcttgtccaccagcatgaatctggccggagggctcggcccaatcctcgcgacgattttggcgcagtcttactcgtggcgctccaccctggccctgtctggcgcactctgcgtggtggtgtcctttctgtgcctgctcctcatccataacgagcctgcggacgtcggactcagaaacctggatccaatgccttcggagggaaagaagggaagcctgaaggaggaatcgactctccaggaactgttgctctccccgtatctttgggtcctgtccacgggatacttggtggtctttggagtgaaaacttgctgcactgactgggggcaattcttccttatccaagaaaagggccagtccgcccttgtcggatcaagctacatgagcgcactggaggtgggaggacttgtggggagtatcgcggctggatatctttcagaccgcgcgatggccaaggccggactctcgaactacggaaacccgagacacggtctgttgctgttcatgatggcggggatgaccgtgtcaatgtatctgtttagagtcaccgtgacttccgactcgccaaagctctggatcctcgtgctgggagcggtgttcggcttttcatcctatggaccgatcgcgctgttcggggtgatcgctaacgagtccgcacctcctaatctgtgcggcacctcgcatgctattgttggcctcatggcaaacgtgggaggatttcttgcgggactgcccttctccactatcgccaagcattactcgtggtcgactgcgttctgggtggccgaagtcatttgcgccgcctcaaccgccgcgttcttcctgctgagaaatatccggacgaaaatgggccgcgtgtcgaaaaaggccgaa

SEQ ID NO: 62572 - DNA, 1287 bp, Artificial Sequence
  derived and/or modified sequence
atggcagcacaaggctacggatattatagaactgtgatctttagcgccatgttcggtggctacagtctgtattatttcaataggaagaccttctctttcgttatgccaagcctggtcgaggagatcccattggataaggatgatctcggcttcattaccagctcccagtccgctgcttatgccatctcaaaattcgtaagcggcgtcctttcagaccagatgtccgctagatggctgttctcctctggtctgctcctcgttggcctggtcaacatattcttcgcttggtcttccacggtacctgttttcgccgccctctggttcttgaatggtcttgcccagggtttgggctggccaccatgcggcaaggtgctgaggaaatggttcgagccatctcaattcggcacctggtgggccatcctctccacgtctatgaacctcgctggtggactgggccctattctcgccacaattttggcacagtcttactcatggagaagcaccttggctcttagcggcgccctgtgcgtggttgtgtctttcttgtgtcttctgttgatacataacgagccagctgacgttggtttgagaaacctcgatcccatgccatcagaaggaaaaaaaggtagtttgaaggaggaatcaacactgcaggagttgttgctctctccatatctttgggtgttgtctactggatacctggtggtatttggcgtcaagacatgctgcaccgattggggccaattcttcctgattcaggagaaaggacagtcagcactggtgggcagtagctatatgagtgccctggaggtcggcggcctggtcggcagtatagcagctggctatttgagtgatagggctatggccaaggctggactctccaactacggcaacccgaggcatggcttgctgttgttcatgatggctggaatgactgtctctatgtacctgttcagagtgaccgtgaccagcgactcccccaagctctggattctcgtcctcggagcggtgttcggtttttcatcatatggaccgattgcattgtttggcgtaatcgcaaatgaatcagccccgccaaacctttgcggtacatctcacgctattgtgggcctcatggcgaacgtgggaggcttcctggccggcctcccattctcaactatcgccaagcactactcttggagtacggccttctgggtggctgaggtcatatgcgcagcgagcactgcggctttcttcctgctgaggaacattagaacaaaaatgggtagagtgtccaagaaagccgag

SEQ ID NO: 62573 - DNA, 1287 bp, Artificial Sequence
  derived and/or modified sequence
atggcagcacagggatacggatattaccggaccgtcatcttctcagcaatgtttggtggatactccctttactactttaaccgaaagactttctcatttgtcatgccttcgctcgtcgaggaaattccacttgacaaggacgatcttggtttcattacctcctcgcaatccgcggcatacgcaatttcaaagttcgtgtccggagtgctcagcgatcagatgtcggcacgatggctgttttcgtccggactgctgctggtcggtcttgtgaatatctttttcgcctggtcgtccaccgtgcctgtgtttgcagccctttggttcctcaatggacttgctcaaggattgggatggcccccatgtggtaaagtgctgcgaaagtggtttgaaccctcacagtttggtacctggtgggcaattctgtcaaccagcatgaacctggcgggagggctgggacctatcctggcaactattctcgcacagtcgtactcgtggagatcgacgctcgcactgtccggagctctgtgtgtcgtggtgtcgtttctgtgtcttttgcttatccataacgagccagcagatgtgggacttcggaacctcgacccaatgccatcagaaggcaagaagggctcacttaaggaggagtcaaccctgcaagaactgcttctgtcaccctacctctgggtgttgtctactggatacctggtggtgtttggagtcaaaacctgttgtactgattgggggcagttcttccttatccaagaaaaaggccagtcggcactcgtgggatcgtcgtacatgtctgcactggaggtgggcgggctggtcggctcaattgctgcaggctaccttagcgatcgtgcaatggcaaaggcggggctttcaaactacggtaaccctcgccatggtctgcttctgtttatgatggcaggtatgactgtgagcatgtacctgttccgcgtcaccgtgacctccgactccccaaaactttggatcctggtgctcggagcagtgtttgggttttcgtcgtacggacctatcgcactgtttggcgtcattgcgaacgagtccgcacctccgaatctgtgtggcacctcccacgccattgtgggactgatggcaaacgtggggggatttcttgcgggtttgcctttcagcaccattgcaaagcactactcgtggtcgacggccttttgggtggctgaagtgatctgtgcggcgagcactgcagcgttcttcctcctccggaacattaggaccaagatgggccgggtgtccaagaaagcagaa

SEQ ID NO: 62574 - DNA, 1287 bp, Artificial Sequence
  derived and/or modified sequence
atggctgcacagggctatggatactataggaccgtaatcttcagcgccatgttcggcggatatagcttatactatttcaacaggaagacgttctctttcgtgatgccatccctagtggaggaaatccctttggataaggacgatcttggcttcataacaagtagtcagtctgccgcatatgccattagcaagttcgtgagcggcgtgctgagcgaccagatgagcgcaaggtggctcttttcgtccggattgctgctcgtgggactggtgaacattttcttcgcttggtcctctaccgtgcctgtgttcgccgccctgtggttcctgaacggactcgctcaggggctgggctggcccccttgtggcaaagtcctgcggaagtggtttgagccatcccagtttggtacctggtgggcaattctgtcaacatctatgaacctggctggaggactggggcctattctggcaaccattctggctcagtcatactcctggagaagtacactggcattatccggggctctttgtgtagtggtgtccttcctctgcctcctgctgatacacaatgaaccagcagatgtgggcttgcgaaacttggatccgatgccctcagagggcaagaaaggatcccttaaagaagagtccaccctgcaggaactgcttctgagcccatatctgtgggtgcttagtactggatacctcgtggtgttcggggtcaagacctgctgcaccgactggggccagttcttcctcatccaggagaaaggacaaagtgccctcgtgggcagcagctacatgagtgctttggaggttggaggcctcgtgggctccattgccgccgggtacctgtcagatcgcgctatggccaaagccggactaagcaactatggcaacccccgccatgggctgcttctgttcatgatggccggcatgactgtgtccatgtatcttttccgcgtcacagtaacctcagatagtcctaagctgtggatcctggtgctcggcgccgttttcggcttctcctcctatggaccgatcgctctgttcggcgtgatcgctaatgagtcagcaccaccaaacctgtgcgggacctcccacgcgatcgtcggactcatggcaaacgtcggaggttttttggccggccttccgttctctacaatcgcgaagcattatagctggagcacggccttctgggtggcggaggtgatttgcgcagcctccactgcagcgttctttcttctgcgaaacatacggaccaagatggggcgcgttagcaaaaaggctgaa

SEQ ID NO: 62575 - DNA, 1287 bp, Artificial Sequence
  derived and/or modified sequence
atggccgcacaaggctacggatactacagaaccgtgattttctctgcgatgttcggggggtacagcctctactactttaaccgaaaaactttctcatttgtgatgccttcacttgtggaagaaattcccctggataaggacgatcttggttttatcacttcctcgcagtccgcagcttatgcaattagcaagtttgtctcgggcgtcctcagtgatcagatgtcggctcggtggctgttctccagcggtttgttgcttgtggggcttgtgaacatattcttcgcatggtcctctaccgtgcctgtctttgcagcattgtggtttctgaacggacttgcccagggattgggttggccaccatgtggtaaagtgctgcggaaatggtttgagccttcacaattcggaacttggtgggcaattctgtcgacctcgatgaaccttgccggaggactgggaccgatcctggctactattcttgcacaatcatactcttggagaagcacgctggcactttctggagccctttgcgtggtggtgtcatttttgtgtctcttgctcattcacaatgagcccgccgacgtcggactgcgcaaccttgatcccatgccgtcagaggggaaaaagggatcgcttaaggaggaatcgacccttcaggaactgctcctttcgccctacctttgggtcctcagtacgggatatttggtggtgttcggtgttaagacttgctgtactgattgggggcaattctttctgattcaagaaaaggggcagagcgcgctggtggggagctcctacatgtcggcactcgaggtggggggactcgtgggttccatcgccgccggctacctttcggaccgagcaatggcgaaggcaggacttagcaactacgggaacccacggcatggccttcttcttttcatgatggcgggaatgactgtgagcatgtacctgttccgggtcaccgtcacgtccgattcgccaaaactgtggatactcgtgttgggcgcagttttcggattttcatcctatggacctatcgccttgttcggagtcattgctaatgaatcggcaccacctaatctctgcggcacgtcacacgcgattgtgggactgatggcaaatgtgggaggttttcttgcaggcctgcccttttccaccatagcaaagcattactcctggtcaactgcattctgggtggcggaagtcatctgcgccgcctccactgccgccttttttctcctgcgcaatatccggaccaagatggggcgagtgtcgaaaaaggcagag

SEQ ID NO: 62576 - DNA, 1287 bp, Artificial Sequence
  derived and/or modified sequence
atggcggcgcaaggatacggctattacaggactgttatattcagtgccatgtttggagggtactcattgtattactttaacagaaaaacattctcttttgtcatgccctcactagtagaagaaatacctctggataaagacgatttgggattcataacatcctcccaatccgccgcctatgccattagcaagttcgtgagcggcgtcctctccgaccaaatgtctgcgaggtggcttttctcatcaggtctgctgctggttgggctcgtgaacattttctttgcctggtcaagcactgttccagtgttcgcagctctatggttccttaacgggctggcccagggcctgggatggcctccctgcggcaaggtactgaggaaatggtttgaaccatcccaatttggaacctggtgggccatccttagtactagtatgaacctggctggcgggctcgggccaatcctggctaccatactggcccagagttactcctggcgatctacattagccctttccggggcgttgtgcgttgttgtgtcatttctttgcctactcctgatccataacgaacctgcagacgtgggcttacgaaatctggaccctatgccgtctgaggggaagaagggaagcctgaaggaggagtctacactgcaggagctcttactttctccttacctctgggtcctgtccactggatatctggtggttttcggtgtgaaaacttgctgtactgactggggccagtttttcctcatacaagagaaaggccagagtgccctggtcgggtcctcctatatgtcagcactggaggtcgggggactcgtcggatcaatcgctgctggatacttgagcgaccgcgcaatggcaaaggcagggctgagtaattatggcaacccacggcacggacttctcctgttcatgatggctggcatgacagtgtccatgtacctttttcgtgtcactgtgactagcgactctcccaaactatggatcctggtgcttggagccgtgttcggcttttccagctacggccccatcgctctgtttggcgtgatcgcgaatgagtctgcacctccaaacctgtgtgggacaagtcatgcaattgtgggtctgatggcaaatgtaggtggctttctcgcaggactgcccttctctactatcgccaaacattactcctggtcgaccgctttttgggtagccgaggttatctgcgcggcatctactgccgcattctttctcctacgtaacatacggaccaagatgggccgcgtgtctaagaaagccgag

SEQ ID NO: 62577 - DNA, 1287 bp, Artificial Sequence
  derived and/or modified sequence
atggccgcccaggggtacgggtactaccggaccgtgattttctccgccatgttcggcgggtacagtctgtactactttaatcgtaagacattcagtttcgtgatgccctctctagtggaggaaatccctctcgataaagacgacctgggtttcatcacaagcagccagtccgcagcctatgccatttcgaagttcgtgtctggcgtgctcagcgaccagatgagtgccaggtggttgtttagttcaggcttgctattggtggggctggtgaacattttcttcgcttggtcttctactgttcctgtgttcgccgctctctggttcttgaatggtctggcgcagggtctgggctggcccccatgtggtaaggtcctccgaaaatggttcgaaccctcgcagttcgggacttggtgggcgatcctgagcacatcgatgaatctagccggagggttaggaccaatactggctactatacttgctcaatcctacagctggcggtctacgctggccctgagcggtgcattgtgcgtcgtggttagcttcctctgtctgctactcattcacaacgaacccgctgatgtggggctcagaaacctagaccccatgccttctgaagggaagaaaggatctctcaaggaggagtccacactgcaggaattgctcttatctccgtacctttgggttctcagtaccggctacctcgtggtgtttggagtcaagacgtgttgtaccgattggggacagttcttcctcatccaagagaagggccagtctgcattagtcggctcgagttatatgtcagcactcgaagtaggcgggctggtcgggtcaattgctgcaggctacctgtcagaccgggctatggcgaaagccggattaagtaactatgggaatcctagacatggactcctgctcttcatgatggcaggcatgactgtatccatgtacctctttagagttacggtcacgtctgattcacccaagctttggatcctcgtgctaggggccgtcttcggattttcctcatacggacctatagccttgtttggagtgatcgcaaacgagtcagcccctccaaatctgtgtggcacctcacatgctattgtagggttaatggccaatgttggcgggttcttagccggcttgcccttttcaactatagcgaagcattactcctggtcaacagccttttgggtcgccgaggtaatatgcgcggctagtacagccgcctttttcttgctgcggaacatacgcaccaagatgggccgagtctcaaaaaaggccgag

SEQ ID NO: 62578 - DNA, 1287 bp, Artificial Sequence
  derived and/or modified sequence
atggccgctcagggatacggatactacaggactgtcatattctcagccatgttcggggggtatagtctttattatttcaatcggaaaacattctcctttgttatgccatcactcgttgaagagatacctttagataaagatgatctggggtttatcacaagttctcagtctgctgcttatgctatatccaaattcgtttcgggagtactgtctgatcagatgtcagcaagatggcttttttcgagtggacttcttctggtgggacttgtgaacatcttttttgcatggtcttctacagtacccgttttcgctgctctttggtttctcaatgggctagcacaggggcttggatggccaccctgtggaaaagtgctcaggaaatggttcgagccctctcagttcgggacatggtgggcgatcctctccacatcaatgaatctagcaggggggctcgggccaatactcgccactatccttgcccagagttactcttggaggtccacacttgcattatctggggctctttgcgtggtggtgtcttttctgtgcttacttcttatacacaacgaacctgccgatgtagggctgagaaatctcgatccaatgccctccgaagggaaaaaggggtctctgaaagaagaatccacactgcaggaattactcctgtccccctatctttgggtgctttctacaggatatctagtggtattcggagttaaaacttgctgtacagattggggacagttcttcttaatccaggaaaaagggcagagtgcactagtgggatcttcatatatgtcagctctcgaagtgggaggacttgtgggatccatcgccgcaggatatctttcagatcgagcaatggccaaagctgggctttcaaactatgggaatcccaggcatgggcttcttcttttcatgatggcaggaatgactgtatccatgtatctattcagagtaactgtaacttctgattctcctaaactttggatactggtcctgggggctgtttttgggttttcctcatacgggcctattgcccttttcggagtaatcgccaacgaatcggcccccccaaacctctgcggaacttctcatgcaattgtggggttgatggccaacgtcggaggattcctcgcagggcttcctttctctacaatcgcaaagcactattcttggtctactgccttctgggtggccgaagtcatctgtgctgcatccactgctgcatttttcctactcaggaacatccgaacaaaaatggggagagtatcaaagaaagctgaa

SEQ ID NO: 62579 - DNA, 1287 bp, Artificial Sequence
  derived and/or modified sequence
atggccgcgcagggttacggctattatcgcaccgtgatcttctcggccatgttcggaggctacagcctctactactttaatcggaaaaccttctcattcgtgatgccttcccttgtggaagaaatcccgctggacaaggacgatctcggtttcatcacgtcatcccaaagcgcggcttacgcaatatcgaagttcgtgtcgggtgtgttgtcggatcaaatgtcggcccgctggttgttctcctcgggactgctcctggtgggactcgtgaatatctttttcgcctggtcctcgactgttccagtgttcgctgcgctgtggttccttaatggcctggcccaggggctgggctggcctccatgcggaaaggtgctgagaaagtggtttgaaccgtcgcaattcggcacctggtgggcaatcctctcgacctccatgaacctggcgggcggactgggtccgatcctggcaactatcctggcgcagtcctactcctggcgctcaaccttggccctgtcgggagctctgtgtgttgtggtcagcttcctgtgcttgctgctgattcataatgagccagccgatgtgggtctgcgaaacctggacccaatgccgtcagaaggtaaaaagggatcgctgaaggaggaatccacgttgcaggaactcctcctgtcaccttatctgtgggtcctgtcaactggatacctcgtggttttcggggttaagacgtgctgcaccgactggggacagttcttcctgatccaagagaagggccagtccgccctggtggggtcatcctacatgagcgcactcgaggtgggaggccttgtgggcagcatcgcagccggctacctgtccgaccgggcaatggccaaagctggactctcaaactacggaaatccgaggcacggactgctgcttttcatgatggcggggatgaccgtgtcaatgtacctctttcgggtcaccgtcactagcgactcgccgaaactctggattcttgtcttgggggcagtttttggattcagctcctacgggccaatcgccctgtttggcgtgattgccaacgaatcggctccccccaacttgtgtggaacctcgcacgcaatagtgggactgatggccaacgtgggaggctttctcgccgggttgccattttcgactatcgctaagcattactcctggtcgactgcattttgggtcgcggaagtcatctgtgcagcatcaactgcggccttcttcctcttgcggaacatccgcaccaaaatgggacgcgtgtcaaaaaaggcggag

SEQ ID NO: 62580 - DNA, 1287 bp, Artificial Sequence
  derived and/or modified sequence
atggccgcacagggctatggttactatcggacagtgatattttccgccatgttcgggggatactctctttactatttcaatcggaaaactttttcattcgtgatgcctagcttggtagaagaaattccactggataaggatgacctcgggttcatcactagttcacagtcggccgcttatgcaatctcaaaatttgtcagcggggtgttatctgatcagatgagcgctcgctggctgttttcctcgggcctgctgcttgtcgggctagtcaacattttttttgcctggtcttcaacagtgccggtctttgccgcactctggttcttgaacgggttggcacagggactgggctggcctccctgtgggaaggtgctcagaaagtggttcgaaccatcccagttcggcacttggtgggccatacttagtacatccatgaaccttgccggaggactcggaccaattctcgccaccatccttgcgcaatcttacagctggcgctccacactggcgcttagcggggcactgtgtgtggttgtgtcattcctttgcctcctgctgatccataatgaacctgctgatgtagggttgagaaacttagatcctatgccaagcgaagggaaaaagggctcactgaaggaagagtcaacactacaggagctgctcctgagcccatatctgtgggtcctgtcgacagggtacctggtggtgttcggggtgaaaacctgctgcaccgattggggacagtttttcctaatccaggaaaagggacagtctgcgctcgtgggatcttcctacatgtcggcactcgaggtgggcggtctggtcggttccatagccgccggctatctgagcgaccgggccatggccaaggctggactgtcaaattacggcaatcccaggcacggactgcttctgttcatgatggcgggaatgactgtcagtatgtacctctttagagtgacagtcacttccgattctcctaagctgtggattctggtgctgggcgctgtttttggattctcttcctatgggccaattgcactgttcggcgtgattgcaaatgagtccgccccacctaacctctgtgggacaagtcacgccatcgtgggacttatggccaacgttggcggcttcctagcaggcctgcccttctcaacgattgctaagcactactcgtggagtacagctttttgggtcgccgaagtgatctgtgccgccagtaccgcagccttcttcctcctgaggaatatccgcactaagatgggaagagtgagcaaaaaagcagag

SEQ ID NO: 62581 - DNA, 1287 bp, Artificial Sequence
  derived and/or modified sequence
atggccgcacagggatacggctactatcgcaccgtgatcttcagtgccatgttcggggggtactcactgtactactttaacaggaaaacttttagctttgtgatgcctagcctcgtggaggaaatcccgctcgacaaggacgatctcggattcattacgtcgtcccagtccgctgcatacgctatctcaaaattcgtctcaggtgtgctgtcggatcagatgagcgcacgctggctgttcagctcggggctgttgctggttggattggtgaacatctttttcgcctggtcgtccaccgtccctgtgtttgcagccctgtggtttttgaacggactggctcagggactgggctggcctccgtgcggaaaggtgctgagaaagtggttcgagccgagccagtttggaacctggtgggcgatcctgtcgaccagtatgaacctcgcaggaggactgggcccgatactggccaccatccttgctcagtcgtactcatggcgatcaaccctcgccctctcaggagcactttgcgtggtggtgagcttcttgtgccttctcttgatccacaacgagcctgcagatgtcgggttgagaaacctggatccgatgccgagcgaaggaaagaagggttccctgaaggaggagtctaccttgcaagaattgctgttgtcgccctacctgtgggtcctttccacggggtacttggtggtgttcggtgtaaagacctgctgtactgactgggggcagtttttcctcatccaagagaaaggacagtcagccctggtgggcagctcgtacatgtcggccctggaagtcggaggactcgtgggatccattgcagcgggctacctgtcagaccgcgctatggcaaaggcaggcctctcgaattacggcaatcctcgccatgggttgctcctgttcatgatggcaggcatgaccgtgtccatgtatttgttccgggtcactgtgacctctgacagcccgaagctgtggatcctggtgcttggtgcggtgttcgggttcagctcttacggaccaatcgcactcttcggcgtgatcgctaatgaaagcgcaccaccaaacctgtgtggaacttcccacgccattgtgggcctgatggccaacgttggtggctttctggcgggattgcctttctccaccattgcgaagcattattcctggtccaccgccttttgggtggcggaagtgatctgcgccgcgtcgactgcggctttcttcctcctgagaaatatccggacgaaaatgggccgggtatcgaaaaaggcagaa

SEQ ID NO: 62582 - DNA, 1287 bp, Artificial Sequence
  derived and/or modified sequence
atggccgcccaagggtatggttactacagaaccgttatcttctccgccatgtttggggggtatagcctgtactactttaatcgtaagactttctccttcgtaatgccttcacttgttgaggagatccctctggacaaggatgacctaggattcataacaagcagtcagtctgctgcctatgcaattagtaaattcgtgagcggagtgcttagtgaccagatgtccgctcggtggctgttttcgtcgggcttgttgctggttgggcttgtgaatatcttcttcgcatggtcatctacagtacctgtgttcgccgctctgtggtttctgaacggacttgctcagggactgggctggccgccatgcggaaaagtcttacgaaagtggtttgaaccctcgcagttcgggacatggtgggctattctttccacgtccatgaatctcgctggcggactgggtcctattctggccaccattctggcacagagctattcttggcggtctacactggccttatccggagccctatgcgttgtagtgtcattcctgtgtctcctattaatccataacgaacccgcagatgtgggcctcagaaatcttgacccaatgcctagtgaaggaaaaaagggaagcctcaaagaagaaagcaccctgcaggaacttctcttgtctccatacttgtgggtgctttctaccggatatctcgtcgtgtttggcgtcaaaacatgctgtaccgattgggggcagttcttccttatccaggaaaaaggacagagtgctcttgtaggttccagctacatgtctgccctcgaagttggcgggctcgtaggttcaatagctgccggctaccttagcgacagagccatggccaaggccggactatccaactacggcaatcctcggcatggactgctgctattcatgatggccgggatgacagtgagtatgtaccttttccgggtcactgtaacctccgatagccccaagctctggatcctggtgctgggagccgtgtttggattttcctcttatggtccgatcgcgttgttcggagtcattgccaatgaaagcgctccacctaacctgtgcggtaccagccacgcaatcgtaggattgatggctaacgtggggggattcctggccgggctgccattcagcaccatcgcaaaacactactcgtggtccactgccttctgggtagctgaggtcatttgtgccgctagtactgccgccttttttttactgagaaatattcggacaaagatgggtagggtgagcaaaaaggcagag

SEQ ID NO: 62583 - DNA, 1287 bp, Artificial Sequence
  derived and/or modified sequence
atggccgcccagggttacggttactaccgcaccgttatattcagcgctatgttcggaggatattcgctgtactacttcaacaggaagactttcagctttgtgatgcctagcctcgtagaggagattcccctcgataaagatgatctcgggttcattacaagttcgcagagtgccgcttatgccatttcaaaattcgtgtctggtgtactgtcagaccagatgagtgctcggtggttgttctcctcggggttgttactggttggtctagtcaacatcttttttgcatggtcctcaaccgtaccagtattcgccgccctttggttccttaatggcctggcccaaggccttggttggcccccttgtgggaaggtccttaggaaatggttcgaaccctcccagttcgggacttggtgggccattctgtctaccagcatgaacctcgcaggtgggctgggtcccatcctggccaccatactggcccagtcttactcttggcgttctacacttgcactttctggagctctctgcgttgttgtgtccttcctgtgtctgctgctaatccataacgagccagccgacgtaggcctccgcaatctggacccgatgccgtctgagggtaaaaagggctcactgaaagaggagagcactctgcaggaactgctcctgtccccatatctgtgggtcttaagtacaggatacctggttgtctttggcgtgaaaacctgttgtacagattggggacagttcttcctgatccaggagaagggccagagcgcgttagtagggagtagctacatgagcgctctcgaggtggggggacttgtgggcagcattgctgcgggctacctgagcgatcgcgctatggccaaagccggcctcagtaactacggcaaccccaggcatggcttgctgctcttcatgatggctggcatgacagtatccatgtacctcttcagggtgaccgtgacttccgattctccaaagttgtggatactggtcttgggagccgtgttcggtttctcttcatatggccccatcgcactgtttggtgtgatcgctaatgaatccgctccacctaatctgtgtggcacttcacacgctatcgtggggctgatggctaatgtcggcggcttccttgcagggcttcccttttccaccatcgctaagcactatagttggagcacagctttttgggtagctgaagtgatatgtgctgcctctactgccgctttcttcctgttacgcaacattaggactaagatgggacgggtgtccaagaaggctgaa

SEQ ID NO: 62584 - DNA, 1287 bp, Artificial Sequence
  derived and/or modified sequence
atggcggcccagggctacggatactaccgcactgtcattttctcggctatgttcgggggatattcgctgtattacttcaaccgcaagacttttagctttgtgatgcccagcctcgtggaggaaataccgctcgacaaagacgacctggggttcatcacgtcgagccaaagcgctgcatacgctatcagcaaattcgtgagcggggtgctctccgatcaaatgagcgccagatggctgttctcaagcggactcctgctggtcggtttggtgaacatcttctttgcttggtcgtccaccgttccagtgttcgccgccctttggttcctgaacggcctggcacaggggctcggatggccaccgtgtggaaaggtacttcggaaatggtttgaaccctcccagtttggtacttggtgggccatcctttcaacctcaatgaacctggcaggaggactgggtcctatcctggcgactattctggcacagtcctactcctggcgctccaccctcgccttgtcgggggcgctctgtgtggtcgtgtcgtttctgtgcctgctgctgatccacaatgaaccagccgatgtgggactccggaatctggaccctatgccatcagaaggaaagaagggatcgctcaaggaggagtccacccttcaagaactcttgctgtcgccgtacctctgggtgctgtctaccggctacctggtcgtgttcggagtcaagacctgctgcaccgattggggccaattcttcctgatccaggagaagggccagtctgcactggtgggttcctcatacatgagtgcccttgaggtcggaggattggtgggctccatcgcggcgggatacctctcggacagggctatggccaaggcgggactgtcgaactacggcaacccgcgccacggtctgctgctcttcatgatggcggggatgactgtcagcatgtacctcttcagagtgaccgtcacttcggattcacctaagttgtggatcctggtcctgggcgccgtgtttggattctcatcctacggtccgatcgccctcttcggagttatcgccaacgaaagcgccccaccgaacttgtgcggaacctcccatgccatcgtgggacttatggcaaatgtggggggcttcctcgcgggactgccgttctccactattgctaaacattactcatggagcactgcattttgggtggcggaagtgatctgcgcggcttcgaccgccgccttcttcctgctgcggaatatccgaacgaaaatgggccgggtgtcgaagaaggcagag

SEQ ID NO: 62585 - DNA, 1287 bp, Artificial Sequence
  derived and/or modified sequence
atggccgctcagggctacggatactataggacagttatcttcagcgctatgtttggtggatactcactgtactattttaatcgaaaaacgttctcattcgtaatgccctctctggtagaggagattccactcgataaagacgatttaggatttatcacctcatcacaatctgccgcctacgccatctccaaattcgtgtcgggagtcctctccgaccagatgtccgcgcggtggctgttttcttctggtttgttgctggttgggctggtaaacattttcttcgcctggtctagtacggttccggtgttcgccgccctctggttccttaacgggctggctcagggcttgggatggccgccatgcgggaaggtcctgcgcaagtggtttgagcccagccaatttggcacgtggtgggctatcctaagcacttcaatgaatctcgccggaggccttggacctatactcgctacaattctcgcacagagctactcctggaggagtaccttagcgctatctggggccttgtgtgtagtggtatccttcttgtgccttctcctcatccataacgaaccagccgacgtcgggttacggaatctggaccccatgccttctgagggaaagaagggttctctaaaagaggaatcaacacttcaagagctcctactttctccctacctctgggtgctatccaccgggtatctggtcgtgtttggggtgaagacctgttgcaccgactggggtcaattcttcttaattcaagaaaagggtcagtcagccctggtaggttccagctacatgtctgctctggaggttgggggcctcgtaggttctatagctgctggctatctgtccgatcgagccatggccaaagccggactcagcaactatggaaacccaagacatgggctgttattgttcatgatggccggcatgaccgtctccatgtatctcttcagagtgacggtgacctccgatagccccaaactgtggatattagtgctaggagcggtttttggattttcatcctacgggccaatcgcattgtttggggtgatcgctaacgagtctgcccctcctaacttgtgcgggacatcccatgcgattgtgggattaatggccaacgtgggaggatttttggctgggctgcctttcagcacaattgctaaacattactcatggagcaccgctttctgggtcgcagaggttatatgcgcggcctctacggcagctttcttcctactccgtaacattaggacaaagatgggtcgagtgtcaaagaaggcggag

SEQ ID NO: 62586 - DNA, 1287 bp, Artificial Sequence
  derived and/or modified sequence
atggcagcacaaggatacggatactaccgcaccgtgattttctcggccatgttcggcgggtactcgctttactacttcaaccgcaagactttctcgtttgttatgccctccctggtggaagaaatacctctggacaaagatgatctgggctttatcacttcgtcccaatcggctgcgtacgctatctccaaatttgtctcgggagtcttgtccgaccaaatgtcggcaagatggctgttttcaagcgggcttttgctggtcggattggtgaacattttctttgcctggtcgtcgaccgtgcctgtctttgcagccctctggttcctcaacggtcttgctcaaggcctcggttggcctccctgtggtaaagttctccgaaaatggtttgagccttcgcaatttggaacctggtgggcaattctctcaactagcatgaaccttgccggaggactgggacctatccttgcgaccattcttgcacagtcatactcatggagatcaaccttggcgcttagcggcgcactgtgcgtggtggtgtcgtttctgtgtctgctcctgatccataacgagcctgcggatgtgggactgcgtaaccttgaccccatgccatccgagggtaaaaagggttcgctcaaggaggagagcactctccaagaactcttgctgagcccttacctttgggtgctgtccacgggttaccttgtggtgtttggagtcaagacgtgttgtactgattgggggcagttttttctgattcaagagaaaggccagtcggcactcgtcgggagctcttacatgtcggccctcgaagtggggggactcgtggggagcattgcagccggttacctgtcggacagggcgatggctaaggccggtcttagcaattacgggaatcctagacatggccttctgcttttcatgatggcaggcatgactgtttccatgtacctctttagggtcacggtgacttcggattcgcctaagctgtggattctcgtcctcggagcagtgtttgggttctcttcgtacggaccgattgcactcttcggtgtaattgccaacgagagcgctccaccaaacctttgtgggactagccatgcaatcgttggcctcatggccaatgtgggagggtttctggcagggctgcctttctcgaccatagccaagcattactcgtggtccaccgcgttttgggtggcagaggtgatatgcgcagcatcgacggcagcatttttcctccttcggaatatcaggaccaagatgggacgagtctcaaaaaaggccgaa

SEQ ID NO: 62587 - DNA, 1287 bp, Artificial Sequence
  derived and/or modified sequence
atggcagcccaaggctatggctactaccggacggttatcttctcggcaatgttcggaggttattcactgtattatttcaaccgcaaaacattctctttcgttatgccgagcctcgtcgaggaaatccctctcgataaggatgatctgggctttattacgtcgtcccaaagcgccgcgtacgcaatttcgaagttcgtgtccggcgtgttgagcgaccaaatgagcgctcgttggctcttttcctctggactgcttctggtcggcttggtgaatatcttttttgcatggagctcgaccgtacctgtgtttgcagcactgtggtttctgaatggtcttgcgcaaggactgggttggcccccgtgcggaaaagtgctgcgtaagtggtttgaaccctcccagttcggcacctggtgggcaatcctgagcacttcaatgaacctggcaggcggcctcggtccaattctagccacgatcctggctcaaagctatagttggcgtagcaccctcgccctctcaggcgctctgtgtgtggtggtgtcgtttctatgtttgctgctaattcataatgagcccgccgatgtcggcctaaggaatcttgatcccatgccttcagagggaaagaagggaagcttgaaagaggaatctactttgcaggagttgctgctgtcaccatacctctgggtacttagtaccggatacctcgtggtttttggagtcaaaacctgctgcacagattggggccagttctttttgatacaagaaaaaggccagtcggcactggtcggatcctcatacatgagcgccttagaagtcggtggccttgtgggtagtatagccgctggatatctgtccgacagggcaatggctaaggccggactgtccaactatggaaacccgagacacggattgttgctgttcatgatggccgggatgaccgtgtcgatgtatctattccgcgtgacggtgacgtccgattcacccaaactttggattttagttctgggcgccgtgttcggcttttcgtcatacggcccgattgcactgtttggcgtcattgctaatgaaagcgcgccaccaaacctatgcggaaccagccacgccattgtgggactcatggccaatgtcggcggcttcctggccggattgcccttttctaccatcgctaagcattactcatggagtacagcattttgggttgccgaggtaatctgcgccgcctccacggctgctttcttcttattaaggaacatcaggactaagatgggcagagtgagcaaaaaggcggaa

SEQ ID NO: 62588 - DNA, 1287 bp, Artificial Sequence
  derived and/or modified sequence
atggcggctcagggttatggttattatcgtacggtaatcttcagcgcaatgttcggaggttatagcctttactatttcaaccgcaaaacctttagtttcgtcatgccaagtctcgtggaggagatacccttggacaaggacgatctgggattcatcaccagttcccagtctgccgcttatgcgatttccaaattcgtaagcggtgttctaagcgaccaaatgtctgccaggtggttgttctcctctggtcttctcctagttggtcttgtcaacatcttctttgcatggagctccaccgttccagttttcgcagctctttggttcctcaatggcttggctcagggtctcgggtggcccccctgcggtaaagtgctacgcaagtggtttgagccttctcagtttggcacctggtgggctatactgtcgacatcgatgaacctggcaggtggcttggggccaattctagccactatcctggcccaatcgtactcgtggcgaagtacgctggctctgagtggcgctctgtgtgtggttgtctccttcctttgcttgcttctaatacataatgagccggccgacgtcggtctaaggaacctggatccaatgccttcggaaggcaagaaaggcagcctcaaagaagagagtactctgcaggagctgcttttgagtccttacctttgggttctgtccactggttacttggtcgttttcggcgtgaaaacctgctgcaccgactgggggcaatttttcctaattcaagagaagggccaaagtgcactggttgggtcctcatatatgtccgcccttgaggtcgggggcctagtggggagtatcgcagctggctacctttccgacagggcgatggcaaaggccggtctctcgaactacggtaatcctcgtcacggcctgttacttttcatgatggctgggatgacagtcagcatgtatcttttcagagtcaccgtcactagtgatagtccaaagctgtggattttggtgctaggtgcggtgttcggttttagtagctatggcccaattgcgctttttggggttatcgctaacgaatctgcgcctccgaacctatgtggtacgagtcacgccatcgtgggattgatggcgaatgtgggtggtttcctggccggcttgcctttttcaactatcgctaagcattattcttggagcactgcattttgggtcgccgaggtcatctgcgccgcatcgacggcggcttttttcctcctccgtaacattcgaacgaagatgggtcgggtctccaagaaagcagag

SEQ ID NO: 62589 - DNA, 1287 bp, Artificial Sequence
  derived and/or modified sequence
atggccgctcaagggtacggctattaccggactgtcatcttctcagcgatgttcggcggctatagcctgtactacttcaaccgaaaaacgttctccttcgttatgcccagcttagtagaggagataccactagacaaggacgaccttggttttatcacgtcttctcagagcgcggcttacgctatctcaaaattcgtatcgggtgtcctgtccgaccagatgtcagctcggtggctatttagctctgggcttctcctggttggactggttaatatcttttttgcttggagctcgaccgtccccgtctttgcggctctgtggttcctaaacggactagcccagggtctgggctggccaccttgtgggaaagtcttgaggaaatggttcgaaccttctcaatttggaacatggtgggcaattctgtccaccagtatgaacttggccgggggtttgggacccatcctcgcaactattctggcccagtcctactcctggaggtccacgctagcactgtctggagcgctgtgcgtcgtggtgagcttcttgtgcttgttgctgatccacaatgagcctgccgacgtcggcctgcgaaacctcgatcccatgccatccgaaggaaaaaaggggtcactgaaggaagagtctactctgcaagagctgttgctgtctccgtatctgtgggttctgtcaacaggctacctggtagtgtttggggtgaagacctgttgtactgattggggccagttcttcctgatccaggagaaggggcagtcagctctggtgggtagttcctacatgagcgcccttgaggtgggtggactggtgggcagtatcgccgcaggctatctgtcagaccgggcaatggccaaggcgggcctctctaattatggaaaccccaggcacggactgctcctgttcatgatggcaggaatgacggtctctatgtacttgttcagagtgaccgtgacaagtgattccccaaaactctggatcctggtgctgggggctgtgtttggtttttcatcatatggccctattgccctgttcggagtgatcgctaatgagtccgccccacccaatctctgtggaacaagccatgctatcgtgggcctcatggcaaatgtgggaggattcctcgccggcctgcccttctcaacaattgctaagcattatagttggtcaactgccttttgggtggccgaagttatttgcgccgccagcactgcagcctttttcttactgcgtaacattagaactaaaatgggaagggtctctaaaaaggcagag

SEQ ID NO: 62590 - DNA, 1287 bp, Artificial Sequence
  derived and/or modified sequence
atggccgctcagggatacggatattaccggacagtcattttctccgcgatgttcggaggatattctctgtattatttcaatcggaaaactttcagttttgttatgcccagcctagtggaggaaattccgttggacaaagatgatcttggctttatcacctccagccagtctgccgcctacgctatctccaaatttgtgagcggggttctttctgatcaaatgagcgctcggtggttgttctcgtcaggactgctgctcgtgggtcttgtgaacatatttttcgcctggtccagtacagtccccgtgtttgccgcgctgtggttcctcaatggattagcccagggacttggctggcccccatgtgggaaagtgctgcgaaaatggtttgagccaagtcagtttggaacttggtgggcgatcttgagcacctcaatgaatttggcaggcgggctcggcccgatcttggcgacgattctggcacaatcctattcgtggcgtagtactctggcactgtccggcgctttgtgtgtggtggtgtcttttctctgcttgttgcttatacacaacgaacccgctgacgtaggcctccggaacctcgaccccatgcccagcgaaggcaagaaaggaagcctaaaggaggagtcaacattgcaggagctcctgctcagtccgtacttatgggtccttagtactgggtatctggtggtgtttggtgtcaaaacttgttgtaccgattggggacagtttttcctgatccaggagaaaggccagtctgcgcttgtcgggtccagctatatgagtgccctggaagtcgggggtctggtcgggagcatcgccgccggctacttgtcagaccgcgccatggcgaaggcaggcttatccaattatggcaacccccgtcatggactgttgctgttcatgatggccggaatgacagtgtctatgtatttgtttagggtgacagtaaccagcgattctccaaaactgtggatcctcgtactcggtgccgtttttggattttccagttatgggcccattgcactttttggcgtcattgcaaatgaatccgcaccacctaatctttgcggtaccagccatgcaatcgtgggtttgatggcaaatgtgggtgggtttcttgctgggctgccattttcaacgattgccaagcactattcttggtctacagctttttgggtggcagaggtaatttgcgccgcgagtacagcagctttttttctgctgcgcaatatccgaacaaaaatggggagagttagcaaaaaggccgaa

SEQ ID NO: 62591 - DNA, 1287 bp, Artificial Sequence
  derived and/or modified sequence
atggcggcgcaaggttatggttattatcgaacggtaatattttcggcgatgtttggtggttattcgctatattattttaatcgaaaaacgttttcgtttgtaatgccgtcgttagtagaagaaataccgttagataaagatgatctaggttttataacgtcgtcgcaatcggcggcgtatgcgatatcgaaatttgtatcgggtgtattatcggatcaaatgtcggcgcgttggctattttcgtcgggtctactattagttggtttagttaatatattttttgcgtggtcgtcgacggtaccggtatttgcggcgctatggtttctaaatggtctagcgcaaggtttaggttggccgccgtgtggtaaagtactacgtaaatggtttgaaccgtcgcaatttggtacgtggtgggcgatactatcgacgtcgatgaatttagcgggtggtttaggtccgatactagcgacgatactagcgcaatcgtattcgtggcgatcgacgctagcgttatcgggtgcgctatgtgttgttgtatcgtttttatgtctactactaatacataatgaaccggcggatgttggtctacgtaatctagatccgatgccgtcggaaggtaaaaaaggttcgctaaaagaagaatcgacgttacaagaattactactatcgccgtatttatgggttttatcgacgggttatttagtagtttttggtgttaaaacgtgttgtacggattggggtcaattttttctaatacaagaaaaaggtcaatcggcgctagtaggttcgtcgtatatgtcggcgctagaagtaggtggtttagttggttcgatagcggcgggttatctatcggatcgagcgatggcgaaagcgggtttatcgaattatggtaatccgcgacatggtttattactatttatgatggcgggtatgacggtatcgatgtatctatttcgtgttacggttacgtcggattcgccgaaactatggatattagtattaggtgcggtatttggtttttcgtcgtatggtccgatagcgttatttggtgttatagcgaatgaatcggcgccgccgaatttatgtggtacgtcgcatgcgatagttggtctaatggcgaatgtaggtggttttttagcgggtctaccgttttcgacgatagcgaaacattattcgtggtcgacggcgttttgggtagcggaagttatatgtgcggcgtcgacggcggcgttttttttattacgaaatatacgtacgaaaatgggtcgtgtttcgaaaaaagcggaa

SEQ ID NO: 62592 - DNA, 1287 bp, Artificial Sequence
  derived and/or modified sequence
atggctgcccagggatacgggtattatcgcactgtgattttttccgcaatgttcggcggctattccctgtactattttaatagaaagaccttcagcttcgtgatgccttcactggttgaggagattcctctggacaaggatgacctgggctttattactagctcgcaatctgctgcttatgccatctcaaaatttgtctcaggagtgctaagcgaccagatgagtgcccgctggctattcagcagcgggctcctgctggtgggtttggtgaacatttttttcgcctggtcatccacggtgcctgtttttgccgctctgtggttcttaaatgggttagctcaggggctcggatggcctccttgtggtaaggttctgagaaagtggttcgagcctagtcagtttggtacatggtgggccatcctatccacaagcatgaatcttgcaggcggactcggccccatactggcaaccatccttgcccagtcctattcctggagatcaacccttgccctgtcgggcgctctctgcgtggttgtgtctttcttgtgtctgcttctgatccacaacgagccggcggatgttggtcttagaaatctagatccaatgccttctgaagggaaaaagggctcactgaaggaagaatctactttgcaggaactcctgttgagtccatatctgtgggtcctaagcactgggtacctcgtggttttcggggtaaaaacgtgctgcaccgactggggccagttttttctaatccaggaaaagggacagtcagccttggtcgggtcctcttacatgagcgccttagaggtaggtggccttgttgggtccatcgcagcgggctacctttcggacagagctatggccaaggcagggctgtccaactacggcaacccccggcatgggctgctgttattcatgatggcaggtatgacggtctccatgtacttgttccgagtcaccgtcacttctgatagcccaaagctttggattctggtgttaggagccgttttcggcttcagctcatatggaccgatcgcattgtttggagtcatcgccaatgaatctgctccccctaatttgtgcgggacctctcacgcaatcgtgggcctgatggccaatgttggcggattcctagctggccttcctttctcaacaatcgccaaacactactcttggtccactgcgttctgggtggccgaagtcatctgcgcagcatctactgctgcgttcttccttctgcggaatatccgcacaaagatgggccgagtttcaaagaaggccgag

SEQ ID NO: 62593 - DNA, 1287 bp, Artificial Sequence
  derived and/or modified sequence
atggcagcacagggttatgggtattatcgaacagtaatctttagcgctatgttcggaggctactctctttactactttaataggaagactttctccttcgtgatgcccagccttgtagaggagattcctcttgataaggatgacttggggttcattacttcctcccaatccgccgcgtatgccatcagcaagtttgtgtctggagtgctctccgaccagatgtctgcaagatggctcttttcttcaggtctcctcctggttgggctggttaacattttcttcgcctggtcttctacagtgccagtgttcgccgcgctgtggtttctcaatggccttgctcagggtttaggttggcccccttgtggaaaggttttgagaaagtggttcgagccgagccagtttgggacatggtgggcgatactgtcaacctcaatgaacttggcagggggcttgggcccgattttggccactatcctggcccaatcgtacagttggcggtccacccttgcactcagcggcgcgttgtgcgtggtggtctctttcctttgtcttctgctaatacataacgaaccagccgacgtagggctccggaatctcgaccccatgccctcagagggtaaaaaggggagcctgaaggaagagtccacacttcaggaattgttgctgtcgccatatctgtgggtcctaagcacaggctacctggtagtgttcggggtcaaaacgtgttgtaccgactgggggcaattcttcctgatacaagagaaaggtcagagcgcgctcgtaggaagttcatatatgtcagccctcgaagtgggcgggctggtgggctctatcgccgccgggtacctaagcgacagagctatggctaaagcaggactgagtaattacggtaatccccgccacgggctgctcctgttcatgatggccggtatgaccgtgtccatgtatctatttagagtgacagtcacttccgattccccaaagctgtggatccttgtgctgggggccgtcttcggcttttcctcctacgggccgatcgctctctttggagttatagcaaacgaaagtgctccacctaacctgtgcgggacatcgcacgccatcgtggggctaatggccaacgttggcggttttctcgccggactcccattttcgacgatcgcaaagcactatagctggtccacagccttctgggtggctgaggtgatctgtgccgcgtcaacagcggccttcttcctgctgaggaacataagaacaaaaatgggccgggtgagcaagaaggctgag

SEQ ID NO: 62594 - DNA, 1287 bp, Artificial Sequence
  derived and/or modified sequence
atggctgctcaaggatatggatattatcgaacagttattttctctgctatgtttggtggatattcactttattattttaatagaaaaacatttagttttgttatgccatcattagttgaagaaattccacttgataaagatgatttaggtttcattacaagttctcaaagtgcagcttatgctatttcaaaatttgtcagtggagtacttagtgatcaaatgagtgctagatggttatttagttcaggacttcttttggtggggcttgttaatatattctttgcatggtcttctactgttccagtttttgcagcattatggtttcttaatggattagcacaaggattagggtggccaccttgtggaaaggttctaagaaaatggtttgaaccatctcaatttggaacttggtgggcaattctttcaacgtcaatgaatttagcaggagggttaggtccaattcttgcaacaattttagctcaaagttacagttggagatcaacacttgcattatctggagctttatgtgttgttgtttcgtttttatgtcttttacttattcataatgaaccagcagatgttggattaagaaatttagacccaatgccatcagaaggaaaaaaaggatctttaaaagaagaatctactcttcaagaacttttattaagtccatacttatgggtcttatcaactggatatttagtagtttttggagttaaaacttgttgtacagattggggtcaatttttccttattcaagaaaaaggtcaatctgcattagttggatctagttatatgagtgctcttgaagttggaggacttgttggatcaattgcagctggttatcttagtgatagagcaatggcaaaagcaggactttcaaattatggtaatccaagacatggactattattatttatgatggcaggtatgacagtttctatgtatctttttagagtaacagttacttctgattcaccaaaattatggattcttgttttaggagcagtttttggattcagtagttatggaccaattgcactttttggagtaatagcaaatgagagtgcacctccaaatctatgtggtacttcgcatgcaattgttggtttaatggctaatgttggaggatttttagcaggacttccattttcaacaatcgcaaaacattattcatggtctactgctttctgggttgcagaagttatttgtgctgcatcaactgcagctttttttttattaagaaatattagaactaaaatgggacgagtatcaaaaaaagcagaa

SEQ ID NO: 62595 - DNA, 1287 bp, Artificial Sequence
  derived and/or modified sequence
atggcagctcagggctacggatattacaggactgttatcttttctgctatgttcggaggctacagcctctactatttcaaccgtaaaacattctctttcgtgatgccaagcctcgtcgaagagattcctctggataaggacgacctgggcttcatcaccagtagccagtcggctgcatatgccatttctaaatttgtatctggagtcctgtccgatcaaatgtcagcaaggtggctcttctcctcaggcctgctgctggtggggcttgtcaacattttctttgcctggtcgtctaccgttcctgtcttcgcggctctgtggtttctgaacggcctggctcagggcctggggtggcccccatgtggtaaggtcctgcgcaaatggttcgagccgtcccagttcggaacgtggtgggccatcctgagcacatctatgaacctggcgggcggtttgggaccaattctggccactatcctcgcgcagtcctactcatggagaagtaccttggccctgagtggcgcactgtgcgtcgtcgtgtcattcctgtgtttgttactgattcacaatgagccagccgatgtggggctgcggaacctggatccaatgccgagtgaagggaaaaagggctcccttaaagaggaatccaccttgcaagagttactgttgtcaccgtatctgtgggtcctaagcactggttacctggtggtttttggggtgaagacatgctgcactgactggggtcaattcttcctaatccaggagaaagggcagtcagcgctggttggatctagttacatgtcggctttggaggtgggaggtttggtgggtagcattgccgccggctatctgtcagacagggcaatggcaaaggctggtctgtccaactacgggaatcctcggcatggcctccttctattcatgatggctgggatgacagtgagcatgtatctgttcagggttactgtgaccagcgactctcccaaactatggatcctcgtcctgggggcggtgttcgggttctcgtcatacggaccaatagcattgttcggcgtgatcgccaatgagtctgctccgcccaatttgtgtggcacaagccacgccatcgttgggctgatggcgaatgtaggaggcttcctagcaggactgcccttcagcacgattgccaaacactattcatggagtaccgcattctgggtggctgaagtgatctgcgccgcctccaccgccgcctttttccttctcaggaacatacgcaccaaaatggggcgcgtgagtaagaaagccgag

SEQ ID NO: 62596 - DNA, 1287 bp, Artificial Sequence
  derived and/or modified sequence
atggcagcacagggatacggatattaccgcacagtaatattttcagccatgtttggcgggtactcactttattactttaatagaaaaacctttagttttgtgatgccctccctggttgaagagatccccctcgataaggacgacctgggcttcatcacttcttcccaatctgccgcctacgccatctcaaagttcgtgtctggcgtcctgtctgatcagatgtcagctcggtggcttttctcatcagggctcctgcttgtgggtctggtgaatatctttttcgcttggagttccaccgtccccgtgttcgctgctttgtggttcctcaatggcctcgcgcagggacttgggtggccgccctgcgggaaagttttgagaaagtggttcgaacctagccagtttggtacctggtgggcgattctgtctacctcaatgaatctggctggcggtctcggccccatcctggccacaatcctggctcagtcatatagctggagatctactttggctctcagcggtgcactgtgtgtggtggtctctttcttgtgcttgctcctgatccacaatgagccggccgacgttggtctgcgcaatctggacccgatgccttccgagggtaagaaaggctcactcaaggaggaatctaccctgcaagaattgctgttgagcccttatctgtgggtgctcagcacaggctacctcgtcgtgttcggagttaagacctgctgtaccgattggggtcagttttttctcatccaggaaaagggccaatctgctctggtggggagctcctatatgagcgcccttgaagtgggcggactcgtggggtccatagctgctggttacctttccgatcgagccatggcgaaagcggggctgagcaactacggaaacccacggcacggactgctgctgtttatgatggctgggatgactgtgagtatgtatctgttcagagtgacagtgacgtcagacagcccaaagctgtggatcctggttctgggtgcggttttcggcttttcttcttatggcccaattgcccttttcggagttatcgccaacgaatcagcccccccgaatctgtgcggaacctcccatgcgattgtggggctcatggccaacgtcggcggatttctggccgggctgcccttctctaccatagctaaacactattcctggagtacagccttctgggtcgcggaagtcatatgcgccgcatctacggccgccttcttcctgttgaggaacattagaactaaaatggggagagtatccaagaaagctgaa

SEQ ID NO: 62597 - DNA, 1287 bp, Artificial Sequence
  derived and/or modified sequence
atggctgcccagggttacggctactataggacggtaatcttctctgccatgtttggcggatactcattatattacttcaatagaaagaccttcagctttgttatgccgtccttggtggaggaaattcctttggataaagacgatcttgggttcatcacctcatcacagtctgccgcttatgcgatcagtaaatttgtgagcggggtgttgagcgatcagatgtcagctcgctggctgttttcctctggcctgttgttggtgggcctggtgaacatattttttgcctggtccagcacggtccccgtgtttgccgctctttggtttctgaacggactggctcaggggttggggtggcctccctgcggtaaggtattgcgcaaatggtttgagccatcccagttcggaacttggtgggccattttgagtactagcatgaatcttgccggggggctgggccccattctggctacaattttagcacagtcatattcctggagatctacattggccttatctggagcactttgtgtcgttgttagctttctatgcttactgctgatccacaatgagcctgccgacgtggggttgaggaacctggatccaatgccttctgaaggtaaaaagggatctctgaaagaggagagtacacttcaagaactgttgttgtcaccgtacctgtgggtcctctccacgggctatctcgtagttttcggagtaaaaacgtgctgcactgattggggtcaatttttcctaatccaggagaaggggcagtcagctctggttggctctagttatatgagcgccctggaggtgggcgggctggtgggcagcattgccgcaggatatctgtccgatagagccatggccaaagctggcctgtctaactatggcaatccccgccatggcttactgcttttcatgatggccggcatgactgtgagcatgtacctcttcagagtcaccgtaacgtccgactcaccgaaactctggatcctcgtgttgggagctgtgtttggcttttctagttacggaccaattgccctcttcggtgtgatcgcaaatgaaagcgctccgccgaacctgtgcggaactagtcacgccatcgttgggctaatggcgaatgtcggtggattccttgcaggcctcccctttagtactatagctaagcactatagctggagcactgccttctgggttgccgaggtgatctgtgccgccagcactgccgctttcttcctgctcaggaatattagaacaaagatgggacgcgtgtctaaaaaagccgag

SEQ ID NO: 62598 - DNA, 1287 bp, Artificial Sequence
  derived and/or modified sequence
atggcggcacagggttacggctactacaggactgtgatcttttccgcaatgtttggaggttactcactttactacttcaacaggaaaactttcagctttgttatgccaagcctggtggaagaaattcctcttgataaggatgatctgggattcatcaccagctcgcagtcggcagcatacgctatcagcaaatttgtctccggcgtgctgtcagatcagatgtccgcccgctggctttttagctcaggactccttctggtaggactcgtcaacatcttttttgcatggtcctcgaccgtcccagtgttcgcagcactgtggtttttgaacggactggcacagggactgggctggcctccttgtggtaaggtgcttagaaaatggtttgagccatcgcaatttggtacctggtgggccattctgagcacctcgatgaatcttgccggcggtctgggcccgatactcgctactatcctggcgcagagctacagttggagatccacccttgccctttcaggtgcactttgcgtggtggtgtctttcctttgtctcctcctgatccacaacgagcccgcagatgtgggactgagaaacttggatccaatgccctccgaaggcaagaagggatcgctgaaggaggaatccactctgcaggagctgctgctgtccccatacctgtgggtgctctcgactggatacctcgtcgtttttggagttaagacttgctgtaccgattggggtcaattctttttgattcaagaaaaaggacaaagcgctctggtcggcagctcctacatgtcggcactggaggtcggaggtcttgtgggcagcatcgcagcaggatatctctccgaccgagcaatggcaaaggctggactttcaaactacgggaacccacgtcatgggctgttgctctttatgatggcaggaatgactgtgagcatgtacctcttccgcgtgactgtcactagcgattcaccaaagttgtggattctcgtgctcggtgccgtctttggtttttcgagctacggaccaattgcactttttggcgtgatcgcaaacgagtctgcaccacctaatctgtgcggaacgtcccacgcaattgtggggctcatggcaaacgtgggaggattcctggccggactgcctttcagcaccattgcgaagcattactcatggtccaccgcattctgggtggcagaggtgatatgtgccgcatccactgcggcgttcttcctgctgcggaatatcagaaccaaaatgggtagggtgtccaagaaggcagag

SEQ ID NO: 62599 - DNA, 1287 bp, Artificial Sequence
  derived and/or modified sequence
atggccgctcaaggctatggttattatagaactgtaatctttagcgcaatgtttggtggatacagtctatattattttaacaggaagacgttctcttttgtgatgccctcactggtcgaggagatccctcttgacaaagatgatctgggttttataacttcctcacagtcagctgcatatgccatatctaaatttgtgagtggcgtactgtccgaccagatgtcagctcgatggttgttcagtagcggtctcttgcttgtggggctagttaacattttcttcgcttggagctctacagtccccgtgttcgccgcgctctggttcctgaatggtctggctcagggactggggtggcccccttgcggcaaagtgcttaggaagtggttcgaaccatcccagtttgggacttggtgggcgatcctcagcacctctatgaacctcgcagggggactgggccccatactggcgaccattttagcacagtcctatagctggcgaagcacactggcgctatctggagctctgtgcgtggtcgtcagctttctgtgccttttgctgatccacaatgagccagcagatgtcggcttgcgtaatctcgaccctatgcccagcgagggcaagaagggctcattgaaagaagaaagtacactgcaggaactgttgctgtctccgtacctctgggtactcagtacaggttatctggttgttttcggtgtgaagacgtgctgcactgactgggggcagttctttctgattcaagagaagggacagtctgcactggtagggtcttcctacatgagcgcccttgaagtcggcggactggtgggctctattgcggcgggttacctctcggaccgggccatggctaaagccgggctgtctaactacggaaaccccagacatggcttgttattattcatgatggccgggatgaccgtttctatgtatctgtttcgggtgacagtgacttccgattctccaaagctgtggatcttagtcctgggcgctgtcttcggattttcaagctacggacccattgcactgttcggagtcatcgctaatgaaagcgctccacccaacctgtgtgggacgtctcatgcgatcgtcggccttatggccaatgtaggcggattccttgccggcttgccattcagcactattgctaagcattactcttggtccacagccttctgggtcgcggaagtgatttgtgctgcaagtacagcagccttttttctgctccgtaacatccgcacgaagatgggccgggtatcaaagaaggccgaa

SEQ ID NO: 62600 - DNA, 1287 bp, Artificial Sequence
  derived and/or modified sequence
atggctgcccagggctacggatattaccgcaccgtgatcttttcagcaatgttcggaggatactccctctactactttaaccgtaagactttttcgttcgttatgccatcgcttgtggaagaaataccactcgataaggacgacctgggattcatcactagctcccagtcggccgcatacgccatctcgaagttcgtgtcgggggtgctgtcagatcagatgtcggcgcgctggttgttctcatcgggattgctgctcgtcggtctggtcaatatcttcttcgcgtggtcatccaccgtgcccgtgttcgcagccctctggttcctcaatggactggctcagggtctgggttggccgccgtgtggaaaggtgctgcgcaagtggttcgagccctcccaattcggtacttggtgggcaatcttgagcactagcatgaacctggccggcggactgggaccaatcctggccaccatcctggcccagagctatagttggagatcaaccttggcgttgtcgggtgccctttgcgtggtggtgtcgttcctgtgtctgctgcttatccacaacgaacctgcagatgtgggactgagaaatctggatccgatgccgtccgaaggtaagaaaggatccctgaaggaagaatcaactctgcaggagctgctgctctcgccatacctgtgggtgctttctacggggtacctggtggtgttcggagtaaagacctgctgcactgactggggacagttttttctgattcaagagaaaggtcagtcagccttggttggttcgtcgtatatgtccgctctcgaagtgggaggactcgtcggtagcatcgcggctgggtacctctcagaccgcgcaatggcaaaggctggcctgagcaactacgggaacccaagacacggtctgctgctgtttatgatggccggtatgaccgtctcaatgtacctcttcagagtgactgtcacttcagattctccgaaactctggattctcgtgctgggagctgtattcggattttcctcgtatgggcctattgctcttttcggcgtcatcgccaacgagagcgcgccgcctaatctttgcggcacctcacatgccatcgtgggcctgatggctaacgtcggcggattcctcgccggacttccgttctccactatcgccaagcactactcgtggagcaccgctttctgggtcgccgaagtcatctgtgccgcgagcactgccgccttctttctgctgaggaacatcagaaccaagatgggacgggtgtcaaagaaagccgag

SEQ ID NO: 62601 - DNA, 1287 bp, Artificial Sequence
  derived and/or modified sequence
atggcagcccagggttatggatactacaggacagttatattcagtgctatgtttggaggatacagcctctactacttcaatcgaaaaacatttagctttgttatgccgagtttagtcgaggagatcccgcttgacaaagatgatctcggatttattacaagtagccagtcagctgcttatgctatctccaaatttgtcagcggggttctgtctgatcagatgagcgctagatggttgttctccagcggactcctgttggtgggcctcgtcaacatcttcttcgcgtggtcttccacagtgccggtattcgcagcgctgtggtttctgaatgggctggcccaaggactcggttggcctccctgtggcaaggtgctccgcaaatggttcgagccttctcagttcggaacatggtgggccattctgagcacctctatgaatttggcgggggggctcggccccatactggcgaccatcctggcccagtcgtactcatggcggagcactttggcattgtcgggggcactgtgtgtggtggtttctttcctctgtctccttctgatccacaacgagcctgcggacgtggggttgcgaaatctcgacccgatgccatcagaggggaaaaagggatctttgaaggaggagtctacgctgcaggagctgctgctgagcccctatctctgggtgttgtctacaggttatctggtagtatttggcgttaagacctgctgcactgattgggggcagttctttctcattcaggagaaaggtcagagtgctctggttggtagtagctatatgtcagcactggaggtggggggcctcgtagggtccattgcagccggatatctgagcgacagagcgatggcaaaggccggactgagcaattacggcaatcctaggcatggcttattgctctttatgatggccgggatgaccgtgtccatgtatctttttagagtcaccgttacctctgattccccaaaactttggatcctggtcctcggggccgtatttgggttctcaagttacggtcccatcgccctttttggtgttattgccaatgagtccgcccctcccaatctgtgcggtacatcccacgcaatcgtgggtctgatggccaacgtcggggggtttctggctggcctgcctttctcgacaatcgccaaacattatagctggtcaacagccttctgggttgctgaagtaatttgtgctgcaagtactgcagccttctttctactaagaaacatccgcactaagatgggtcgcgtgagcaaaaaagcagag

SEQ ID NO: 62602 - DNA, 1287 bp, Artificial Sequence
  derived and/or modified sequence
atggccgctcagggatacggatactaccggaccgtgattttctcggctatgttcggaggctactcgttgtactacttcaatcgcaagactttctcattcgtgatgccaagcctcgtggaagaaatcccactcgacaaggacgacctcggattcattacttcctcgcagtccgcggcttacgcgatctcgaaattcgtgtccggtgtgctctccgaccagatgtcggcccgctggctgttctcatcaggcctgctcctcgtgggactcgtcaatatcttcttcgcatggtcgagcactgtgccggtctttgcagccctgtggttcctgaacggactggcccagggtctgggatggcctccttgcggaaaagtgctcaggaaatggtttgaaccgtcccagttcggcacttggtgggctatcttgtctacctcaatgaacctggcaggcggcctgggcccaattctcgccaccatcctggcgcagtcctacagctggcggtcgaccctcgccctgtcaggtgccttgtgtgtcgtggtgagcttcctttgcttgttgctgattcataacgagccagcagacgtgggactgcggaacctggacccaatgccttccgaaggaaagaaaggaagtcttaaagaggagtcgaccctgcaagaactcctgctgtcgccatatctctgggtgctctcgacgggctacctcgtggtgttcggggtaaagacttgctgcaccgactggggacaattcttcttgatacaagaaaagggacagtccgcgctggtgggctcgagctacatgtccgccctcgaggtgggcggcctggtcggctccatcgcggcaggatacctgtccgaccgcgccatggccaaggccggactgagcaattacggcaacccaagacatggattgctgctcttcatgatggccggcatgaccgtttcgatgtacctgttccgcgtcaccgtgacctccgattcgccaaagctgtggatcttggtgctcggggctgtctttggcttctcgtcctacggcccgatcgctcttttcggagtcattgccaacgagtccgcgcctccgaatctgtgcggcacctcacacgccatcgtgggactcatggcgaatgtgggcggattcttggcgggtctgccgttcagcactatcgcgaagcattactcttggtcaactgccttctgggtagctgaagtcatctgtgccgcatcgactgccgcctttttcctcctgagaaatatccggacgaagatgggaagagtcagcaagaaggcggaa

SEQ ID NO: 62603 - DNA, 1287 bp, Artificial Sequence
  derived and/or modified sequence
atggcagcacaaggatacggatactacaggaccgtcattttctcagcaatgttcggagggtactcgctttactacttcaaccggaaaactttttcctttgtgatgccctccctggtggaggagatccctcttgataaggatgacctggggttcatcacgtcgagccagtccgctgcatacgccatttccaagtttgtctcgggcgtgctgtcggatcaaatgtccgcaagatggcttttttcgtcgggtctgcttttggtcggacttgtgaacattttcttcgcatggtccagcactgtgcctgtgttcgccgcattgtggtttctcaatggtcttgcccaaggcttgggctggccaccttgtggtaaggtccttcgcaaatggttcgagccttcacagtttggtacctggtgggcaatcctttccacttctatgaacctggcagggggactcggtccgattctcgcgaccattttggcgcagtcgtacagctggcgcagcactctggcactgtcaggagcactttgtgtggtggtgtcctttctttgtctgctgttgatccataacgaacccgcggatgtgggacttcgaaatctggacccaatgccctcggaaggaaaaaagggatcactcaaagaggaatccacgttgcaggagctgcttctgtcgccttacttgtgggtcctctcgaccgggtatctcgtggtgtttggtgtcaagacctgttgtaccgattggggccaattcttcctgattcaggagaaagggcaatccgcgcttgtgggctctagctacatgagcgcactggaggtgggcggtctggtcggttccattgcagctgggtacctctcggatcgcgcgatggcaaaggcggggctgtcgaactacggtaatccaagacatggccttctgctgtttatgatggccgggatgaccgtcagcatgtacctcttccgtgttactgtcacctcagactcccctaagctgtggattctcgtgcttggagcagtgtttggtttttcctcgtacggtcctatcgccctgttcggcgtgattgccaacgaatccgcacccccaaacctttgcggaacctcgcatgcaatcgtcggcctgatggccaatgtcggtggctttctcgctggcctcccattttcgacgatcgcaaagcactacagctggtccaccgcattctgggtggccgaggtcatttgtgctgcctcaaccgcagccttctttctgcttcgcaatatacgaactaagatgggtcgggtgtcaaaaaaggccgaa

SEQ ID NO: 62604 - DNA, 1287 bp, Artificial Sequence
  derived and/or modified sequence
atggccgcacagggctacgggtactaccggaccgtcatatttagcgcaatgtttggcggctattctctatactatttcaacagaaaaacgttttcctttgttatgccttcattggtagaagaaattcctttagacaaagacgatttggggtttataacttcgtcacaatctgccgcttatgccatctccaaattcgtttctggcgtcctgagcgatcagatgagtgcaaggtggctgttcagctcggggttattgcttgtgggcctggtgaacatctttttcgcctggtccagtaccgtcccagtcttcgcggccctttggttcttaaatgggctggcacagggattgggatggcccccctgtgggaaggttctgcgaaagtggttcgaaccatcccagttcggcacatggtgggccatcttgagcactagcatgaacctggcaggcggactcgggcccatactggcaaccattctggcccagtcctatagctggcggtcaaccctggcactctctggcgcactgtgcgtcgtggtaagcttcttgtgtctccttctaatccataacgagccagctgatgtcggcttaaggaacctcgatcccatgccgagtgaaggtaaaaagggatcgctgaaggaagaatcaaccctgcaggaactgttactgagcccttacctgtgggtcctttctaccggctacctagtcgtgttcggggtcaagacctgctgcacagactggggccagtttttccttatccaggaaaaagggcaaagcgcccttgtgggaagctcctacatgtccgccttagaggttggagggttggttggcagtatcgcagcgggttatctatcagaccgggctatggcaaaggctggcctgtccaattatgggaaccccaggcatgggctgcttctctttatgatggcaggtatgaccgttagcatgtatctgttccgagttacggtgacgagcgacagtccgaagctctggatcctcgtgctcggtgccgttttcggattctcatcctatggccctattgctctattcggggtcatcgctaacgagtccgcgccccccaacctgtgcggcacatcccacgctatcgtcggcctgatggcaaacgtagggggatttctggcgggtttaccatttagtacaattgccaagcactactcctggtccactgcgttttgggtggcggaggtaatctgtgctgcatccacggcagccttctttctgctccggaacatccgaacaaaaatgggtcgagtgtccaagaaggcagag

SEQ ID NO: 62605 - DNA, 1287 bp, Artificial Sequence
  derived and/or modified sequence
atggccgctcagggctatggctattaccggacagtcatcttctcagcgatgtttggaggttacagcctctattacttcaatcggaagactttctcatttgtgatgccttctctcgtcgaggaaatcccgctggataaagatgatttagggtttattacatctagtcaatctgccgcttacgccatctccaagtttgtctctggagtgttatcagatcagatgtctgcgagatggctgttctcttcaggcctcctcttggtagggttggtgaacatcttcttcgcctggagcagcactgtgcccgtgtttgccgccttgtggtttttgaacggcctcgcacagggactgggttggccaccatgcgggaaggtcttgcggaagtggttcgagccttcccaattcggaacttggtgggctatcttgagcacctccatgaacctcgctggaggcctagggccaattctggcgacaatactggcacagagctattcctggcgcagcactttagccttgtccggcgctttgtgcgtggtcgtgagttttctttgtttacttcttatccacaacgagccagcagacgtgggcctacgtaacctcgatcccatgccctcagagggcaagaaaggttctctcaaggaagagtccactctacaggaacttttattatccccttacctgtgggtgctgagtaccgggtacctagtcgtgtttggcgtgaagacctgctgcactgattgggggcagttctttctgattcaggaaaaaggacagagtgcacttgtgggcagctcctatatgagtgccttagaggtcggcgggttggtcggctcaattgccgctgggtatctctcggacagagctatggccaaggctgggctaagcaactacggcaatcccagacatggcctgctgctgtttatgatggctggaatgacagtgagtatgtacctcttcagggtgaccgtcacatcagactcgcccaagctttggatactggtgcttggagctgtgttcggattttcatcctatggccccatcgccctgttcggggtcatcgcaaacgagtctgctccccctaacctgtgtggcaccagtcatgctattgtgggcttaatggccaatgtgggcggatttctggcgggcctgcccttcagtaccatcgcgaaacattactcttggtccaccgccttctgggtggcagaggttatttgtgccgccagtacagccgctttttttcttttgcgcaacatccggaccaaaatgggccgtgtgtctaagaaggctgag

SEQ ID NO: 62606 - DNA, 1287 bp, Artificial Sequence
  derived and/or modified sequence
atggctgcccagggatatggatattataggaccgttatttttagcgctatgttcggcggttattcactatactattttaacaggaaaactttctcgtttgttatgccatctttggttgaggaaattcctctggataaggatgacctcggtttcatcacctcatcccagagcgcagcgtacgccatatccaaatttgtatctggggtcctgtccgatcaaatgtcggctagatggcttttcagctccggtttgctattagtggggttagtgaatatcttctttgcttggtcatctactgtcccggtttttgctgctttatggttcttgaacggactcgctcagggcctgggttggcccccatgcggaaaagtgttgcgcaaatggttcgagcctagccaatttggaacctggtgggctatactgagcacttcaatgaacctagcaggtgggctcggacccattctggccaccattcttgctcagtcttactcatggaggtcaactcttgcgttgtctggagctctctgtgtcgtcgtctcatttctatgtcttctgttaattcataacgagcccgctgatgtcggtcttaggaatcttgatccaatgccatctgaagggaagaagggctccctcaaggaagagtccacgcttcaagagctcctcctgagcccctatctttgggtcctgagtacaggctacttggtggttttcggtgttaagacttgttgtacagactggggacaatttttccttattcaagaaaaaggacagagtgctttggtgggatcttcatacatgtctgccctggaggttggtggccttgttgggtctatagctgctgggtacttatcagatagagcaatggctaaagcaggcttgtcaaattatggtaatccaaggcatggacttcttttgttcatgatggctggtatgacagtctcaatgtatttgtttagagtgacagttacctcagatagtccaaaattgtggattctagttctcggcgctgtgttcggtttttcatcatatggccctatagctttgtttggtgtcatagctaacgaatccgctccacctaatttatgtggaacgagtcacgccatagtaggtctgatggcaaatgttggtggtttcctcgcaggtctacccttctcgacgattgcaaaacattactcgtggtctacggccttctgggtggccgaagttatctgtgcagctagcacagctgccttcttcctgttgagaaatattagaaccaaaatggggcgtgtttctaagaaggctgaa

SEQ ID NO: 62607 - DNA, 1287 bp, Artificial Sequence
  derived and/or modified sequence
atggcggcccagggatatggctactaccggactgtgattttcagtgcaatgttcggcggctactcgctttactatttcaatcgtaagacttttagcttcgtcatgcccagcttggtggaagaaatcccattggacaaagacgacttgggtttcattacgtcatcccagagcgcggcctacgcaatttcgaagtttgtgtccggtgtgctctcagatcaaatgagcgcaaggtggctgttttcttcgggacttctgctggtgggtctggtcaacatctttttcgcgtggtcgtccactgtcccggtgtttgctgcgctttggttccttaacggacttgcacaagggctcggctggcccccttgcggtaaagtgcttcgaaagtggttcgaaccctcccaatttgggacttggtgggctattctctcgacctctatgaaccttgccggaggtcttggtcctatcctggcaactattctcgcgcagagctacagctggagaagcaccctggctctttcgggtgcactgtgtgtggtggtttcgttcctttgtcttttgcttatccataacgagccagccgatgtcggactgaggaacttggatccaatgccctccgagggaaaaaaggggagccttaaggaggaatcaacccttcaggagctgctgcttagcccctacctctgggtgcttagcactggttacttggtggtgtttggtgtgaaaacttgttgcaccgactggggtcagttttttctcattcaggaaaaaggccaatcggctcttgtcggctcatcgtacatgtccgcactggaggtgggaggcttggtgggaagcattgcagcaggatacctttcggatcgcgcaatggcaaaggcaggtctgtcgaattacggaaatccacgccacggactgctgctgttcatgatggctggaatgactgtgtcgatgtatctgtttagggtgaccgtcacttccgattcacccaaactctggattctggttcttggggcagtgtttggattctcctcatacggaccgatcgccctctttggggtgatcgctaacgagtcggcgcctcctaatctgtgtggaaccagccatgcaattgtggggctcatggccaatgtgggaggatttctggcagggcttccgtttagcacgattgcaaaacattactcatggtccactgccttttgggtcgcagaggtgatctgtgccgcgtccactgcagcgtttttccttctccgaaacatccgcaccaagatgggacgagtctccaagaaagcagag

SEQ ID NO: 62608 - DNA, 1287 bp, Artificial Sequence
  derived and/or modified sequence
atggccgcccaaggatacggctactacaggactgtcatcttctcagcaatgtttgggggttactcgctgtactatttcaacaggaaaactttctccttcgtgatgccgtccctggtggaagaaatccctctcgacaaggacgatctgggttttatcacttcatcccagtccgccgcatacgcaatctcgaaattcgtttccggagtgctgtccgaccagatgtcagcgcgctggctgttttcgtccggtctgttgctggtggggctggtgaacattttcttcgcctggtcatcaaccgtgcctgtgttcgccgcgctgtggttcctgaacggactggctcagggccttgggtggccgccatgtggaaaggtcctcaggaagtggttcgagccgtcgcaattcgggacctggtgggccatcctctccacttccatgaacctcgcagggggactgggcccaattctcgcgaccatcctggcacaaagctactcttggcgttcgactctggccctgtcgggagcactgtgcgtggtcgtgtcgttcctgtgcctccttctgattcataatgagccggccgatgtgggacttaggaacctggacccaatgccgtccgagggtaaaaagggttcgctgaaggaagagtcgaccctgcaggaactgcttctgagcccgtacctctgggtcctgagcactggatacctcgtggtgttcggggtcaagacgtgctgcaccgactggggacaattcttcctgatccaggagaaaggacagtcagccctggtcggttcgtcgtacatgagcgccctcgaggtcggaggcttggtggggagcatcgcagccggatacctgtccgatagagcgatggctaaggcggggctcagcaactacggcaacccacgacacgggctgctgcttttcatgatggcaggaatgaccgtgagcatgtacctgttcagagtcacggtgaccagcgacagccctaagctgtggatcctcgtcctgggagccgtctttgggttctcaagctacgggccgatcgccctgttcggggttatcgcaaatgagtcggccccacccaacctctgcggcactagccatgccatcgtgggactcatggcaaacgtgggcggctttttggccggccttcctttctcgaccatcgccaagcattactcatggtcaaccgcattctgggttgcagaagtgatctgcgctgcctccaccgccgcgttctttctgctccggaacatccgcacgaagatgggccgcgtgagcaagaaggcggag

SEQ ID NO: 62609 - DNA, 1287 bp, Artificial Sequence
  derived and/or modified sequence
atggccgcacaaggatacggttactacaggaccgtcattttcagcgcgatgttcgggggatactcattgtactactttaacagaaagacctttagcttcgtcatgccttcgcttgtggaagagattccacttgacaaggatgatcttgggttcattactagctcacagtccgcggcttatgcaattagcaagttcgtgagcggcgtgctctcggaccagatgtcggcccgctggctcttctcctcaggattgcttctggtgggccttgtgaatatcttcttcgcgtggtcgtcgactgtgccagtgttcgctgctctctggtttctcaacggactcgcgcagggacttgggtggccaccttgcggaaaagtgctgaggaaatggtttgagccatcgcaatttggaacctggtgggcaatcctgtcaacctccatgaatcttgcaggaggacttggacccatcctggcaactattttggcgcagtcgtactcctggcgctccactcttgctctgagcggggccctgtgtgtggtggtgtccttcctctgccttcttcttattcacaacgaaccagcagatgtgggactgagaaatttggaccctatgccatcggaaggaaagaagggttcccttaaggaagagtccaccctgcaggaacttctgttgagcccttacctgtgggtgctcagcaccggttacctcgtggtatttggagtcaaaacctgttgtaccgactggggtcagttttttcttatccaggaaaagggacaatcggccctggtcggttcctcttacatgtccgcactggaagtcggcggactggtgggctccatcgccgcgggttatctgtcagatcgggcaatggctaaggctggcctgtccaactacggaaacccccgacacggtctgctcctgttcatgatggcaggaatgactgtctcgatgtacctcttcagagtcactgtgacttcagactccccaaaactttggatcctggtcctcggagcagtgttcggcttttcctcatacggaccgattgcactgttcggggtgattgcaaatgagtccgcccctccaaacctgtgtggaaccagccacgcaatcgtcggactgatggcaaacgtgggaggattccttgcagggctgcctttttccaccattgcaaaacattactcctggtcgactgcattttgggtggccgaggtgatctgtgccgcttctactgcagcattcttcctgctcagaaacattagaaccaagatgggtcgtgttagcaagaaggccgag

SEQ ID NO: 62610 - DNA, 1287 bp, Artificial Sequence
  derived and/or modified sequence
atggcagcacaggggtacggttattacagaactgtgatcttcagcgctatgttcggaggctacagcctctactacttcaatcggaaaaccttttcctttgtcatgccgtcgttggtggaggaaatcccgcttgataaggatgaccttggctttatcaccagctcccagtccgccgcctacgcaatctccaaattcgtgtcaggagttctttcagatcagatgtcagcgcgctggctgttttcatcgggattgctcctggtgggccttgtgaacatattcttcgcctggtcctcgactgtgccggttttcgcggctctctggttcttgaacgggttggcccagggactgggctggccaccctgcggcaaagtgctgcgcaagtggttcgaacctagccagttcggtacctggtgggcgattctgtcgacctcgatgaatctcgctgggggcctcgggccgatcctcgcaaccatcctcgcccagtcctactcatggagatccacgctcgccctgtcgggagccctgtgcgtggtggtgagcttcctgtgcctgctgttgatccataatgagccagccgacgtcggactgcgcaacttggaccctatgccgtcagaagggaaaaagggatcattgaaggaagaatcgacgttgcaagagctgctgttgtcaccttacttgtgggttctttcgactggttacttggtggtctttggcgtcaagacttgctgcaccgattggggtcaattcttcctgatccaggaaaaaggccaatctgccctggtgggcagctcttacatgagcgccctcgaggtcggcggattggtgggatcaatcgcggccggatacctgtccgaccgggcgatggcgaaggcgggactctcgaactatggaaacccccgccacgggctgctcctgttcatgatggccggaatgactgtgagcatgtatctcttccgagtgaccgtcacctcagacagcccgaagctgtggattctcgtcctcggagcagtctttggcttctcatcatatggaccgatcgctctttttggtgtgatcgctaacgaatcggccccacctaacttgtgtggtacctcccacgcgattgtgggactcatggccaatgtgggcggattcctggctggcctgcctttctccactatcgccaagcactactcatggtccaccgcgttctgggtcgcagaagtgatctgtgcagcgtcaactgctgccttctttctccttcggaacatccggactaagatgggcagggtcagcaagaaggcagag

SEQ ID NO: 62611 - DNA, 1287 bp, Artificial Sequence
  derived and/or modified sequence
atggctgcgcagggctacggttattatcgcactgtgatttttagcgcaatgttcggcggttatagcctctactacttcaacaggaagaccttctccttcgtgatgccaagcttggtcgaggagatccccttggataaggatgatctgggatttataactagctcccagtccgcggcatacgcaatcagcaaatttgtcagcggtgtcctgagcgatcagatgagcgcgcgctggctctttagcagcggtctgttgttggtgggcctcgttaacatcttctttgcatggagctccaccgtgccggtattcgctgctctctggtttttgaacggtctggcgcagggtctgggttggccaccgtgcgggaaagttctgcggaagtggttcgagccgtctcaatttggcacgtggtgggctatcctcagcacaagcatgaacctggccggaggtcttggtccgatcttggcaacaatattggcgcagagctacagttggcgttccactttggcactgagcggtgccctgtgcgtggtggtttccttcctgtgcttactgctcatccataacgagcctgcggatgtcgggttgagaaatctggaccctatgcctagcgaaggtaagaagggtagcctgaaagaggagtctactttgcaggagctgctcctgagcccttatctttgggtgttgagcaccggttacctggtggtgttcggagtgaagacttgctgtacggattggggtcagttttttttgatccaagagaaaggccagtccgccctggtgggctccagctacatgagcgcccttgaggtgggcggcctggtgggcagtatagcggctgggtacctgtctgaccgcgcgatggcgaaggctgggttgagcaattatggtaaccctcgccacggtttgctcctctttatgatggccggcatgacggtcagcatgtatctctttcgggtgactgttacctccgacagccccaagctgtggattttggtcctgggcgctgtgtttggattctcgagctacggccctattgctctgtttggggtcatcgccaacgaatctgctccacctaatctgtgcggtactagccacgctattgtggggctgatggcgaatgttggcggctttctcgcaggtctgccgttcagcacaattgccaaacactacagctggtccaccgccttctgggtcgcagaggtcatctgcgcggcgtccaccgcggcgttctttctgctgcggaatattagaaccaaaatgggacgcgttagtaagaaggcagag

SEQ ID NO: 62612 - DNA, 1287 bp, Artificial Sequence
  derived and/or modified sequence
atggccgcccaaggctacggatactacagaaccgtgatcttctccgccatgtttggtggatactcgctgtactactttaacagaaaaactttctcgtttgtcatgccttccctggtggaagaaatcccactggacaaggatgatctgggctttatcaccagctcgcaatcggctgcatacgcaatttctaagtttgtgtctggagtcctgtccgaccaaatgagcgccaggtggctgttttcctccggactcctgttggtgggtctggtgaatatcttctttgcatggtcgtcgaccgtccccgtgtttgcggcactgtggttccttaacgggctcgctcaggggctgggttggccaccctgtggaaaagtgctccgaaagtggtttgaaccttcgcagtttggaacctggtgggcaattctgtccacttcgatgaatcttgccggcggacttggtccaatcctcgcaactatactggcgcagtcatactcgtggagatcgacccttgccctgtcgggggcactgtgtgtcgtcgtctcgttcctctgtctgctcctcattcacaacgaaccagctgacgtgggacttagaaacctggaccctatgccaagcgaaggaaagaagggaagtcttaaggaggagtcgacccttcaggaacttttgctcagcccatacctctgggtgctgtcgacgggatacctggttgtctttggagttaagacctgctgcaccgattgggggcagttttttctgatccaagaaaagggacaatccgcacttgtcggttcctcatacatgtcagcactggaggtgggaggcctggtcggctccatagcagcaggttacctctccgatcgcgcaatggcgaaggcaggcctgtccaactatggaaatccaaggcatgggctgctcctgtttatgatggctggcatgactgtcagcatgtacctttttagagtgactgtgacgtccgactcccctaagctgtggatcctggtgctcggtgcagtgtttggcttttcctcctacggtcctattgcactgttcggtgtgattgctaacgaatccgcccctcccaatctgtgtggcacctcccatgcaatcgtgggccttatggcgaatgtcggcggatttctggcaggactgccattttccactattgctaagcattactcatggtccactgcgttctgggtggcagaagtcatttgcgcagctagcactgcggctttctttcttctgagaaacatcagaacgaaaatgggacgggtgtcgaaaaaggcagag

SEQ ID NO: 62613 - DNA, 1287 bp, Artificial Sequence
  derived and/or modified sequence
atggctgcccaagggtatgggtactatagaactgtgatcttctcagctatgtttgggggctacagtctctactactttaataggaagacctttagcttcgtgatgccatcattagtggaagaaattcccctggataaggatgacctgggctttattacatcatcacagagcgccgcctacgccatttcaaagttcgtctccggcgtcctgtccgaccagatgagcgcccggtggctgttctcctcaggacttctcctggtaggcttggtaaatatcttcttcgcctggtcttctactgttccggtctttgctgctctttggtttctgaacggattggcacaagggttaggttggccaccctgcgggaaggttctacgtaagtggttcgaacctagtcagttcggcacgtggtgggccattctcagcacctctatgaatctggcaggtggcctgggcccaatattagctaccatccttgcccagtcgtatagctggaggtctacattggcgctgtcgggagctctgtgtgtggtcgtcagctttctgtgtttgctgctaattcacaacgagcccgctgacgtcgggcttaggaatctggatcctatgccttccgagggtaaaaaggggtcgctgaaggaagaaagtacactgcaggagttgctgcttagcccctacctttgggtcctcagcaccggttacctggtggtcttcggcgtcaagacgtgctgcactgactggggacagttcttcctcatacaggagaaggggcagtcagctttggtaggttcatcctacatgtcggcgctggaagtagggggattggtgggttcaattgctgcgggatacctatccgatcgagcaatggcaaaggctggcctgtccaattatggcaacccacggcatgggttgttattgttcatgatggcaggcatgacagtgtcaatgtacctcttccgagtgaccgttaccagtgactcaccaaagttatggattctagtgctgggggccgtgttcggcttttcctcttatgggcccatcgccctgtttggcgttatcgccaatgaatctgcacctcctaatctctgcggcacctcccacgccatcgtaggattgatggccaatgtgggcggctttcttgcaggtctaccattctcgaccattgccaaacactattcttggagtaccgccttttgggtggctgaggttatctgcgccgcaagtacagcggctttttttcttcttcgaaacatacgaactaagatggggcgtgtgtccaagaaagctgaa

SEQ ID NO: 62614 - DNA, 1287 bp, Artificial Sequence
  derived and/or modified sequence
atggccgcccagggatacgggtactaccggaccgtcatcttctccgcgatgtttggtggatatagcctgtactacttcaatcgaaaaactttcagcttcgtgatgccttcgctcgtggaggagatcccgctcgacaaggacgacttgggattcatcacctcatcgcaatcggccgcgtacgctatctcaaagtttgtgagcggcgtgctgtccgaccagatgtccgcacgctggctgttttcctcaggtctgctgctggtgggactggtgaacatcttcttcgcctggtcgtcaactgtgcctgtgttcgcggctctctggtttcttaacggtctggcacagggccttggatggccgccatgcggaaaggtgctcagaaagtggttcgaaccttctcagttcggcacttggtgggccatcttgagcacctccatgaacctggccgggggactgggacctatcctggcaaccatcctggctcaatcgtacagctggcggagcactctggccctctcgggcgccttgtgcgtcgtcgtctccttcctctgcttgctgcttatccacaacgagcccgctgacgtgggactgagaaacctggatcctatgccgtcagagggaaaaaagggctcgttgaaggaagagagcaccctgcaagaactgctgctttcaccatacctctgggtgctgagcactggatacctcgtggttttcggagtgaaaacgtgctgtactgattggggacagttcttcctgattcaagagaaaggccaatcggcgctggtgggtagctcgtacatgtcagcacttgaggtgggtgggctcgtcggaagcatcgcagcggggtacttgtccgatagggcgatggccaaggcaggactctcgaattatgggaacccgaggcacggcctccttctgttcatgatggccggaatgactgtttcaatgtacctgtttcgcgtgactgttacctccgattcgccgaagctgtggatcctcgtcctgggagcagtgttcggttttagctcatacggaccaatcgccctgtttggagtgatcgccaacgagtcggctccgccgaatctgtgcggcactagccatgcgatcgtgggactgatggccaacgtcggtgggttcctggccggactgccgttctcgaccatcgcaaaacactacagctggtcaaccgctttctgggtggctgaggtgatttgtgccgcgtccactgcagctttctttttgctgcggaacatccgcacgaagatgggaagagtgtcgaagaaggctgaa

SEQ ID NO: 62615 - DNA, 1287 bp, Artificial Sequence
  derived and/or modified sequence
atggccgcacaggggtacggttactaccggacggtcattttctcggcgatgtttggcggatacagcctgtactatttcaacaggaaaaccttctccttcgtgatgccgtcactcgtggaagaaattcccctggacaaagacgacctgggatttatcacctcctcacagtcggctgcatacgccatctccaagttcgtctccggtgtgctttccgaccaaatgtcggcccgctggctcttctcttcgggactcctgctggtgggcctggtcaacatcttcttcgcatggtcaagcactgtgccggtgttcgccgccctgtggtttctcaacggactcgcgcaaggactcggttggcccccgtgcggaaaagtgctgcgcaagtggtttgagccaagccagttcggcacctggtgggccatactctcgactagcatgaatctcgctggaggacttggaccgatcctggccactattctggcccaatcctattcctggcgcagcactctggcgctgtcgggagccctttgcgtggtggtgagcttcctctgcctgctgcttatccacaacgaaccggccgatgtgggactgagaaacctcgacccaatgccctccgaaggaaagaagggatctttgaaggaggagtcaactctgcaggaactcttgttgtccccatacctctgggtactgagcaccggctacctggttgtgtttggagtcaagacttgttgcactgactgggggcagttttttctgatccaagaaaagggacagtccgcgctggttggttcatcatacatgtccgcgctggaagtgggaggcctcgtcggtagcatcgccgctggatacctctcggatcgcgccatggctaaggccggactgtcaaactacggtaatccacgccatggactcctgttgttcatgatggccggcatgactgtgtcgatgtatctgttcagagtgaccgtgacctcggactcgcctaagctgtggattctcgtcctcggagctgtctttggattcagctcctacggacccattgctttgtttggggtaatcgccaacgaatcggcgccaccgaatctctgtgggaccagccatgcgatcgtgggtttgatggctaacgtgggcggattcctggcgggactgccattttcgaccatcgccaaacactactcctggagcaccgccttttgggtcgccgaagtgatctgtgcggcgtccaccgcagcgttctttctgctccggaacatcaggaccaagatgggaagagtgtcgaagaaggccgag

SEQ ID NO: 62616 - DNA, 1287 bp, Artificial Sequence
  derived and/or modified sequence
atggccgcgcaggggtacggctactaccggaccgtcatcttttccgcaatgtttggaggatactccttgtactacttcaaccgaaaaactttctcattcgtgatgccgtcgttggtggaggaaattccactggataaggacgacctgggcttcataacttcatcgcaatccgcagcatatgccatttcaaagttcgtgtcgggggtgttgtccgatcaaatgtccgccagatggctgttctctagcggcttgctcctggttggcctggttaacattttctttgcgtggagctcaaccgtcccagtctttgccgctttgtggttcctgaatgggctcgcacagggacttgggtggcccccttgcggtaaggttctcagaaagtggtttgaaccctcgcaatttgggacttggtgggctatcctcagcacgagcatgaatctggcaggcggtctgggacctatactcgcgactatccttgcccaaagctactcatggaggtcaacgttggccctgtcgggggcactttgcgttgtggtcagctttctctgtcttttgcttattcataacgagcctgccgatgtcgggcttcggaaccttgatcctatgccaagcgaaggcaagaagggatcgctgaaagaggaatcgacgctgcaggagctgctgctctcaccttatctttgggtgctttcgactggttacttggtggtgttcggagtgaaaacctgttgtaccgattggggacagttttttctgatacaggaaaagggtcaaagcgcgctcgtcggttcgtcctacatgtctgccctcgaagtcggaggtctggtgggaagcattgcggcggggtacctgtcagaccgcgcaatggcaaaagcaggactttcgaattacggaaatcctcgtcacgggcttcttttgtttatgatggcagggatgaccgtctctatgtacctttttcgcgtgactgttaccagcgactcgccaaagctctggatcctggtgcttggtgcagtgtttggattttcgtcctatgggccaattgccctgtttggtgtgattgcaaacgaatccgcacccccgaacttgtgtggaacttcccacgcgatcgtcggcctcatggcaaacgtgggcggtttcctggcaggactgccattttcgaccattgcaaagcattactcgtggtccaccgccttctgggtggcagaagtgatttgcgcagcctccaccgccgcgttctttctgctccggaatatccgaacgaaaatgggaagagtcagcaaaaaggcagag

SEQ ID NO: 62617 - DNA, 1287 bp, Artificial Sequence
  derived and/or modified sequence
atggccgcccagggctacggctactacagaacagtcatctttagcgctatgttcggtggctactcactgtattatttcaatcgcaagaccttttcatttgtgatgccaagtctggtcgaagagatacctctggacaaagatgacctgggctttattacatcttcccagagtgctgcctacgctattagtaagtttgtgtcaggcgtcctctcagatcagatgtcagctagatggttgtttagctcaggcctccttcttgtgggacttgtaaacattttctttgcttggagctcaactgtcccagtcttcgcagcgctgtggtttcttaatggtctggcacagggccttggctggcccccgtgtggaaaagtcctgaggaaatggtttgaaccttctcagtttggcacctggtgggcaatcctgagcacttccatgaacctggctggggggctgggaccaatcctcgccacaatccttgcacagtcttacagctggagatctacactggcactctctggcgctttatgcgttgtggtgtcctttctctgtctcctgctgattcacaacgaacccgcagacgtggggctgaggaatctggatcctatgccaagcgagggaaaaaagggcagcctgaaggaagaatccacactgcaagagctcttgttgagcccctacctctgggtgttgagtacgggctatcttgtcgtttttggagtaaaaacctgttgtaccgactgggggcagttctttctcattcaggagaaagggcaatctgcgcttgtgggctccagctatatgagtgctctggaagtgggaggcctggtgggttcgatcgcagctgggtatttgagtgaccgcgcaatggccaaagccggcctttctaactacggcaaccccaggcacggccttctgctgttcatgatggctggaatgacagtctccatgtacttgttcagagtaacagttaccagcgattctcctaaactttggatccttgtgcttggagccgtatttggcttttcttcttatgggcccattgctctgtttggagtcattgcaaatgaaagcgccccaccaaacctttgtggaacgagccatgcgatagtgggcctgatggcaaacgtgggtggatttctggccgggctgcctttcagtactatcgctaaacactacagttggtcaacggccttttgggtcgctgaggtaatatgtgctgcatccaccgcggctttcttccttcttcggaatataagaacaaagatgggaagagtcagtaaaaaggctgaa

SEQ ID NO: 62618 - DNA, 1287 bp, Artificial Sequence
  derived and/or modified sequence
atggctgcgcagggttatggctattaccgaacagtcattttttctgcaatgttcggaggctattccctttactactttaataggaaaacattcagctttgtcatgccgtcattagtggaagaaatccctttagacaaagatgatctcgggttcataacatcttctcaatctgcagcgtatgcaatctccaaatttgtttcaggcgttttgtctgatcagatgtctgcaaggtggctcttttcgagcggactgttactggtggggttagtgaatatttttttcgcttggtcatcaactgtcccggtgtttgctgctctttggtttcttaacggactcgcacaagggttaggatggccgccgtgtggaaaagttcttagaaaatggttcgaaccgtctcaatttggcacgtggtgggcgatcttgtcaaccagcatgaacctagcgggtgggttggggccgattctcgctacgattttagctcaaagctactcctggcgatcaacactggccttatcgggagcactgtgcgttgtcgtttccttcttatgcttgctattaatacataatgaaccggccgatgtgggacttcgtaacctcgacccaatgccttcagaaggcaaaaaaggctctttaaaagaagagagcaccctacaggaattgttactttctccttatctttgggttttatccacgggttacttggtcgtgtttggggtaaaaacatgctgtacagattggggccagtttttccttatccaagaaaaagggcaatctgctctcgttggatcgagctatatgtctgctcttgaagtgggcggtcttgttggttcgatagccgcgggatacttaagcgatcgggctatggcaaaggctggtctgtcaaattatggtaacccacggcatggacttttactttttatgatggcaggtatgaccgtatcgatgtatctatttcgcgtgacggtaacgagcgacagtcctaaattgtggatcctcgttttgggcgcagtttttggtttttccagctacggtccaatcgcactttttggtgtgattgccaatgaatctgctccaccgaacctctgtggaacgtcccatgcgattgtgggacttatggcgaacgtggggggcttcctcgccggcttaccgtttagcacaatcgccaaacattatagctggtcaacggccttttgggtggcagaagtaatctgcgctgcatctacagctgcgttttttctgctccgcaatatcagaacaaaaatgggacgcgtctctaaaaaagctgaa

SEQ ID NO: 62619 - DNA, 1287 bp, Artificial Sequence
  derived and/or modified sequence
atggctgcccagggatacggttactaccggaccgttatctttagtgccatgtttggggggtattccctgtactatttcaatcgcaagactttctcgttcgtgatgccatccctggtcgaagaaattcctctcgataaggatgatctcggattcatcactagctctcagtccgcggcgtacgcaattagcaagttcgtgtccggcgtgctgtccgatcagatgagcgcaagatggctgttctcctcggggttgctgttggtcggactggtgaacatctttttcgcttggtcgtcgaccgtccctgttttcgccgccctctggtttcttaacggactggcgcagggactgggatggccaccgtgcgggaaagtcctccgtaagtggttcgaaccttcacagttcggcacctggtgggctatcctctcaacctcaatgaacctggccgggggactggggcccatcctggcgacgatcctcgcccaatcgtacagctggagaagcactctcgcactctctggagcgctgtgcgtcgttgtgtcctttctgtgcctgttgctgatccataatgagccagccgatgtgggactccgaaacttggaccctatgccgtcggaaggaaagaaaggctcgcttaaggaggagtcaacccttcaggaactgctgctttccccatacctctgggttctgtccaccggttacctcgtggtattcggagtaaaaacgtgttgcacggactgggggcaattcttcttgatccaagagaagggacagtcggcactcgtcggctcctcatacatgtcggctctggaggtgggaggcttggtgggaagcatcgctgcgggctatctgtcggaccgggccatggccaaagccgggcttagcaactacggcaatccccggcatggtctgctcctgttcatgatggcgggtatgactgtctcaatgtacctgttccgcgtcactgtgacctcagactccccaaagttgtggatcctcgtgctgggcgccgtgtttggtttttcctcctacggtccgatcgcactgttcggggtgatcgctaacgagagcgcccctccgaacctctgcgggacttcgcacgcgattgtgggactgatggcgaacgtgggcggatttctggctggcctgccattctcgaccatcgcgaagcactactcgtggtccaccgccttctgggtggccgaggtgatctgcgccgcctccaccgccgctttcttcctgctgcgcaacattaggactaaaatgggaagagtctccaagaaggccgaa

SEQ ID NO: 62620 - DNA, 1287 bp, Artificial Sequence
  derived and/or modified sequence
atggccgctcagggctacggctactatcgcacagtgatattttccgctatgtttggaggatattcactgtattatttcaatcgcaaaacattctcatttgtgatgccttcactcgtagaggaaatcccactggataaagatgacctcggctttatcacctcctcacaatccgctgcctacgccatatctaagtttgtcagtggcgtactttctgaccaaatgtccgctaggtggctcttctcctcagggctgctgctagtggggcttgtcaacattttcttcgcctggagtagtaccgtgcccgtatttgccgctctttggtttctcaatgggctggcccaggggcttgggtggcctccgtgcggcaaggtgctccgcaagtggttcgaacctagtcagttcgggacctggtgggccattttgtcaaccagcatgaatcttgctggaggattaggccccatcctggcgacaattttagcccagtcctatagttggaggagcactctggccctgagtggcgctctgtgtgttgttgtttccttcctgtgcttgctgctcatccataacgagccagctgatgttggactgcgtaacctggaccccatgccttctgaggggaagaagggaagcctgaaagaggaatcaacactgcaggagctgcttctgtctccgtacctgtgggtgttaagtacaggttacctagtggtcttcggtgtgaagacctgttgtactgattggggacagttcttcctgatccaggagaaaggtcagtctgcgctcgtgggatcctcctatatgagcgctctggaagtcggaggcctggtgggctctattgccgcggggtatctcagtgaccgggctatggcgaaggcgggactgagtaattacggtaatccccggcacgggttactcttatttatgatggctgggatgacggtgagcatgtacttgttccgggtcactgtaacctcagacagtcctaagctgtggatactagtgctcggagcagtgttcgggttctcttcatacggcccaattgcattgttcggagtcatcgcgaatgaaagcgcacctccgaacctgtgtggaacctcccatgccatcgtcggactcatggcgaacgtgggcggctttctcgccgggctgcctttcagtaccattgccaagcactactcttggagtaccgcattttgggtggccgaggtgatttgtgcagcttctacggctgccttcttcctattgaggaacattcggaccaaaatgggcagggtttcgaagaaagcagag

SEQ ID NO: 62621 - DNA, 1287 bp, Artificial Sequence
  derived and/or modified sequence
atggctgcacaaggttacggctattacaggacggtcatcttttccgccatgttcggagggtacagcctgtactacttcaatcgcaaaaccttctccttcgtgatgcccagccttgtggaagaaatcccgcttgataaggatgatcttggtttcatcacttcctcgcagtccgccgcatacgccataagcaaatttgtctcaggtgtgcttagcgaccaaatgtctgcgcggtggcttttcagctcggggctgttgctcgtgggcttggtgaacatctttttcgcatggtcctctaccgttccggtgttcgcagcactttggtttcttaatggactggcccaaggcctcgggtggcctccgtgcggtaaggtgttgagaaagtggtttgaaccttcacagtttggaacttggtgggcaattctgagtacttctatgaacttggcaggtggccttggcccaattctggcgactatactggcccagtcgtactcatggcgaagcacgcttgcgctcagcggagccttgtgcgtggtggtcagcttcctgtgcctgctccttattcataatgagccggcagatgttggattgagaaacttggaccccatgccatcggagggcaagaagggctcactgaaagaggaatcaacccttcaagagcttctcctgagcccttacctgtgggtcctctctaccggatacctggtggtgtttggagtgaaaacttgctgtaccgattgggggcaattctttctgattcaggaaaaaggacagtccgctctggtgggtagcagctacatgagcgcccttgaggtcggaggcctggtcggatcgatcgccgcaggatacctgtccgaccgggccatggcgaaagcgggtctgagcaattatggtaacccacggcacggacttcttctctttatgatggcgggaatgactgtgtcaatgtaccttttccgagtcaccgtcacgtctgactcccctaaactgtggatcctggtccttggggcagttttcggattttcgtcctatggacccatcgccctgtttggagtcattgccaacgaatccgcaccaccaaacctctgtggaacctcccacgccattgtcggactgatggctaacgtgggaggctttctcgcgggtctgccattttcgaccattgcgaagcattactcctggtcaaccgcattttgggtggcggaagtcatctgtgcagcttccactgcggcatttttcctgcttaggaacattagaaccaagatgggccgtgtgagtaaaaaggccgaa

SEQ ID NO: 62622 - DNA, 1287 bp, Artificial Sequence
  derived and/or modified sequence
atggcagcacagggatacgggtattacagaaccgtgatcttctccgcaatgtttggcggctacagcctttactactttaaccgaaaaaccttttcctttgtcatgccttcgctggtggaagagattccactcgacaaggatgatctcggatttatcacctccagccagtcggccgcatacgcgatctccaaatttgtgtccggagtgctctctgaccaaatgtcggcaaggtggctgttctcgagcggtctgctgctcgtgggactggtgaacatcttttttgcctggtcctccactgtgcccgtgttcgcagctctttggttcctcaacggtttggcacagggtctggggtggccaccatgcgggaaggtgctgcggaagtggtttgagcctagccagttcggtacttggtgggcgatcctgtcgaccagcatgaatctcgcagggggccttgggccaatccttgcgactatacttgcacaatcgtactcatggagatccacccttgcactgtccggtgcattgtgtgtggtcgtcagttttctgtgtctgttgcttattcataatgaaccagcagacgtcggtctgcggaatctcgatcctatgccatccgagggaaagaagggatcattgaaggaagaatccactcttcaagaactgcttctctcaccttacctttgggtgctttcaactgggtaccttgtggtgttcggcgtcaaaacttgctgcaccgattggggtcagttttttctgattcaggagaagggacaatccgcactcgttggatcctcgtacatgtcagccctggaggtgggaggtttggtcggatccatcgcggccggttacctgtccgatagagcaatggccaaggcggggctctctaactacggcaatccccggcatggactgctgctgttcatgatggccggtatgaccgtgagcatgtacctttttagagttactgtgacgagcgatagcccaaagctctggatcctcgtcctcggagcagtgttcgggttctcgtcgtacggacctattgcactgttcggagtcatcgccaatgagtccgctcctccaaacttgtgcggtaccagccatgcaatcgtgggtctgatggcaaacgtcggggggtttctggccggtctgccttttagcactatcgcaaaacattactcctggtccacggccttttgggtcgcagaagtcatttgtgccgcttcaactgctgcgttttttcttcttcgaaacattcggactaagatgggtcgggtgagcaaaaaagcagaa

SEQ ID NO: 62623 - DNA, 1287 bp, Artificial Sequence
  derived and/or modified sequence
atggcagcccagggatatgggtactacaggaccgtgatatttagtgccatgttcgggggttatagtttatattactttaatcgaaaaacattctcatttgtcatgccctccctagtagaagaaatacccctggataaagacgaccttggattcatcaccagtagtcagtctgcggcctacgctattagcaagtttgtcagcggtgtgctgtctgatcagatgagcgcacggtggcttttctcaagtggcctcctgctggttggtctggttaacattttcttcgcctggagttcaactgtccctgtgttcgccgcactctggtttctgaacggcctggcacagggactgggctggcctccatgtggcaaggtgctgcgcaagtggtttgagccatcccagtttgggacctggtgggcaatattgagcacctctatgaacctggccggtggcctgggccccattctggcgaccatacttgcccagtcctattcctggagatcgacactggccctgagcggagctctgtgcgtcgtcgtatccttcctgtgtctcctgcttatacataatgaacctgccgatgtggggctgagaaatctggatccgatgcccagcgagggcaagaagggcagcttaaaggaagagtcaacactacaggagcttttgttgtccccctatttgtgggtgctgagcacggggtacctcgttgtctttggcgtgaagacctgttgcactgactggggccagtttttcctaattcaggagaaaggccagtcagctcttgtaggctcatcctacatgtccgcactcgaagttggaggccttgtggggagcatcgctgctggatacctctccgatcgcgcgatggccaaagccggactttcgaactacggcaaccctagacacggtctcctgctcttcatgatggcaggcatgacagtgtcgatgtatctgttccgtgtgaccgttacaagtgacagccctaaactctggatccttgtgcttggcgccgtgtttgggttctcctcctacggtcccatcgcacttttcggtgttattgccaacgagtcagcaccaccaaacctctgtgggacgtcccatgcaattgttggcctgatggctaacgttggcggttttctggccgggctacccttctccactattgccaagcactatagctggagcacggctttttgggtggctgaggtaatatgcgcagccagcacagccgccttctttttgctgcgcaatattaggacaaaaatgggccgggttagtaaaaaggctgaa

SEQ ID NO: 62624 - DNA, 1287 bp, Artificial Sequence
  derived and/or modified sequence
atggcagctcagggttacggctactaccgtaccgttattttttcagctatgttcggaggttactctctgtactacttcaatcgcaagaccttctctttcgttatgccatccttggttgaagaaattcctctcgataaggatgacctcggctttattacatcttcccagagtgccgcttacgctatttcaaaattcgtcagcggagtgctgtcagaccaaatgtcagctaggtggctgttcagtagcggactcctcctggtaggcctcgtgaacattttcttcgcctggtccagcactgtccctgtcttcgctgcattgtggtttctgaatggcttggctcagggcttgggctggccaccttgcggcaaagtgttgaggaagtggttcgagcccagccagtttggcacttggtgggctatcctctccacctctatgaatctggcaggaggccttggacccatcctggcaacaatcttggcccagagctatagttggcgctccactcttgccctgagtggcgctctctgcgtagtggtaagcttcctctgcttgctcctgatccacaatgagcctgcagacgttggactgaggaatctcgacccaatgccaagtgagggtaagaagggttccctgaaggaagagtctacacttcaggagctgcttctttctccttacctgtgggttctctccactggttaccttgtagtgttcggtgtgaagacctgctgcaccgactggggccaattctttctgatccaggagaagggacagagcgctctggtaggatcttcctatatgtctgccctggaagttggaggtctcgtcggatcaattgccgctggctatctgtctgatcgtgctatggccaaggccggtctgagtaactatggtaaccccaggcacggtctgctgctctttatgatggccggcatgacagtatctatgtacctcttcagagtcactgtgacatcagacagccccaagttgtggatactcgtgctgggtgctgtctttggattttcctcttacggaccaatagccttgttcggcgttatcgccaatgagtctgccccccctaacctttgcggaacatcccacgcaatcgtaggtttgatggccaacgtaggcggtttcctcgctggtctcccattctctactatcgcaaaacattacagttggtcaacagcattctgggtggctgaagtgatctgtgctgctagcaccgccgctttcttcctgctgcgcaacatcagaaccaaaatgggccgtgtgtccaagaaagctgaa

SEQ ID NO: 62625 - DNA, 1287 bp, Artificial Sequence
  derived and/or modified sequence
atggctgcgcagggctatgggtactaccgcaccgtgatattttccgccatgtttggtggatattccctctactactttaaccgcaaaactttctcatttgtgatgcctagcctggtcgaggagattcctttggataaagacgatctgggtttcatcacttccagccaatccgccgcttatgcgatcagtaaattcgtgtctggagtgctctctgaccaaatgtccgcgagatggctcttcagttcaggtctgctcctggtgggcctcgtcaacattttctttgcttggtcctccacagtgccggttttcgctgcattgtggtttctgaatgggctggcccaggggttgggatggcctccctgcggaaaggtcctgcgcaaatggttcgaaccttcacaatttggcacttggtgggccatcctgtctacttccatgaatcttgccgggggtctggggcccattttggctacaatcctcgcccagagctactcctggaggtctacattggcactgagcggagcattgtgtgtcgtggtaagtttcctgtgcttgctcctcatccataacgaaccagcggatgtgggcctcagaaatttggaccccatgccatccgaaggcaagaaaggatctctcaaggaggagtccaccctgcaggaattgctgctgagtccttatctgtgggtgctgagtactgggtaccttgtggttttcggggtcaaaacttgttgtacagactggggacagttcttcctgatccaggagaaggggcagtccgccttggtaggcagctcttacatgtccgcacttgaagtcggtggtctggtcggctccattgcagcgggttaccttagtgatcgggctatggcaaaggccggtttgtctaactacggaaatcctaggcacggattgctgttgtttatgatggcagggatgaccgtttctatgtacctgtttcgcgtgacagttacatccgacagccccaaactgtggatactggtcctgggcgcggtctttgggttctctagttatggccccatagcactgttcggggtcattgccaatgagagcgcccctccaaatttgtgcggcacttcccacgcgatcgtcggcctgatggctaatgtggggggattcctggccggcttgcccttttctactattgccaaacattactcatggagtaccgcattctgggttgctgaggtgatctgcgcggcttcaaccgcagccttcttcctgcttcgaaatatccgcacaaagatggggcgggtgtcaaaaaaggctgag

SEQ ID NO: 62626 - DNA, 1290 bp, Artificial Sequence
  derived and/or modified sequence
atggccgcccagggctacggctactacagaaccgtgatcttcagcgccatgttcggcggctacagcctgtactacttcaacagaaagaccttcagcttcgtgatgcccagcctggtggaggagatccccctggacaaggacgacctgggcttcatcaccagcagccagagcgccgcctacgccatcagcaagttcgtgagcggcgtgctgagcgaccagatgagcgccagatggctgttcagcagcggcctgctgctggtgggcctggtgaacatcttcttcgcctggagcagcaccgtgcccgtgttcgccgccctgtggttcctgaacggcctggcccagggcctgggctggcccccctgcggcaaggtgctgagaaagtggttcgagcccagccagttcggcacctggtgggccatcctgagcaccagcatgaacctggccggcggcctgggccccatcctggccaccatcctggcccagagctacagctggagaagcaccctggccctgagcggcgccctgtgcgtggtggtgagcttcctgtgcctgctgctgatccacaacgagcccgccgacgtgggcctgagaaacctggaccccatgcccagcgagggcaagaagggcagcctgaaggaggagagcaccctgcaggagctgctgctgagcccctacctgtgggtgctgagcaccggctacctggtggtgttcggcgtgaagacctgctgcaccgactggggccagttcttcctgatccaggagaagggccagagcgccctggtgggcagcagctacatgagcgccctggaggtgggcggcctggtgggcagcatcgccgccggctacctgagcgacagagccatggccaaggccggcctgagcaactacggcaaccccagacacggcctgctgctgttcatgatggccggcatgaccgtgagcatgtacctgttcagagtgaccgtgaccagcgacagccccaagctgtggatcctggtgctgggcgccgtgttcggcttcagcagctacggccccatcgccctgttcggcgtgatcgccaacgagagcgccccccccaacctgtgcggcaccagccacgccatcgtgggcctgatggccaacgtgggcggcttcctggccggcctgcccttcagcaccatcgccaagcactacagctggagcaccgccttctgggtggccgaggtgatctgcgccgccagcaccgccgccttcttcctgctgagaaacatcagaaccaagatgggcagagtgagcaagaaggccgagtag

SEQ ID NO: 62627 - DNA, 1290 bp, Artificial Sequence
  derived and/or modified sequence
atggcggcccaaggctacggttactacagaactgtaatattctctgccatgttcggcggctacagcctgtattacttcaacaggaaaaccttttcatttgtcatgccttcgctggtggaggagatccccctagacaaagatgatctcggctttattacatccagccaatcagcagcatacgcgattagcaaattcgtcagcggagtattgtcagatcagatgagtgccaggtggctgttctcctctggactgctgttggtgggcctagtgaacatctttttcgcttggtcatccaccgttccagtcttcgcagctctttggtttttaaatggactggcccaaggactgggttggccaccctgtgggaaggtactgcggaaatggttcgaaccatctcagttcgggacctggtgggccatcctctctacgagtatgaacctggccgggggcctaggacctatactggccactattttggcccagagctactcctggcggtccacgttggctttgtcaggggcgttatgcgtggtcgtgtctttcctgtgcctgctgttgatccacaacgagccagcggacgttggccttagaaacctggatccgatgccatccgagggcaaaaaggggtccctgaaggaggagagcacacttcaagagctgctgctgtctccatatttgtgggtgctctcaacaggttacctggtcgtgtttggagtgaagacgtgctgcacagactgggggcagttcttcctgatccaggagaaagggcagtctgcactagtgggatctagttacatgagcgctctggaagtgggcggcctggtggggtccatcgccgcaggatacctgtccgaccgcgccatggccaaggccggtctctccaactatggaaatcccaggcacggcctgctcctgtttatgatggccgggatgaccgtgagcatgtatctgtttcgtgtgaccgtcacatcagactcaccgaagctgtggatattggtcttgggagcggtattcggcttctctagctacggacccatcgctttattcggcgtgatagctaacgagagcgcccctcccaatctctgcggaacgtcacatgccatcgtagggctgatggccaatgtggggggattcctggctgggttgccgttttccacaatcgcaaagcactattcttggagtactgcgttctgggtagcagaagttatttgcgcagcgtcgactgccgcttttttcttgctgaggaacataagaaccaagatgggcagggtctctaaaaaggctgagtag

SEQ ID NO: 62628 - DNA, 1290 bp, Artificial Sequence
  derived and/or modified sequence
atggccgcccagggctacggctactacagaactgtcatcttcagcgccatgtttggaggctacagcctgtactacttcaacaggaagaccttctcctttgtgatgcccagcctggtggaggagatccccctggacaaggatgacctgggcttcatcaccagcagccagagcgctgcctatgccatcagcaagtttgtgtctggagtgctgagtgaccagatgtctgcccgctggctgttcagcagcggcctgctgctggtgggcctggtgaacatcttctttgcctggagcagcacagtgcctgtgtttgctgccctgtggttcctgaatggcctggcccagggcctgggctggccaccctgtgggaaggtgctgaggaagtggtttgagcccagccagtttggcacctggtgggccatcctgagcacctccatgaacctggccggcggcctgggccccatcctggccaccatcctggcccagagctacagctggaggagcaccctggccctgagcggggccctgtgtgtggtggtgtccttcctgtgcctgctgctgatccacaatgaaccagcagatgtgggcctgaggaacctggaccccatgcccagcgagggcaagaagggcagcctgaaggaggagagcaccctgcaggagctgctgctgagcccctacctgtgggtgctgagcacaggctacctggtggtgtttggagtgaagacctgctgcacagactggggccagttcttcctgatccaggagaagggccagagcgccctggtgggcagcagctacatgtctgccctggaggtgggcggcctggtgggcagcattgctgctggctacctgagtgaccgggccatggccaaggccggcctgagcaactacggcaaccccaggcatggcctgctgctcttcatgatggccggcatgacagtgtccatgtacctgttccgggtgacagtgaccagtgacagccccaagctgtggatcctggtgctgggcgctgtgtttggcttcagcagctatggccccatcgccctgtttggagtcatcgccaatgaaagtgccccacccaacctgtgtggcaccagccacgccatcgtgggcctgatggccaacgtgggcggcttcctggccggcctgcccttcagcaccatcgccaagcactacagctggagcacagccttctgggtggccgaggtgatctgtgccgccagcacagctgccttcttcctgctgaggaacatccgcaccaagatgggccgggtgtccaagaaggccgagtag

SEQ ID NO: 62629 - DNA, 1290 bp, Artificial Sequence
  derived and/or modified sequence
atggccgcccagggctacggctactaccggaccgtgatcttcagcgctatgttcggggggtatagcctttactatttcaacaggaagaccttctcttttgtcatgcccagcttggtggaggagatccccctggacaaagacgatctgggattcatcaccagcagccagagcgctgcctacgccatttctaagttcgtgtccggtgtgttgtccgatcaaatgagcgcaaggtggctgttcagcagcggtttgttgctggtgggcctggtgaacattttcttcgcatggtcctcaaccgttccagttttcgcagcactatggtttctgaacggcctcgcgcagggccttggctggccaccgtgcgggaaggtgctcagaaaatggttcgaaccctcacagttcgggacttggtgggctatccttagtacctccatgaacctggcaggaggtctggggcccattttggcgaccattctcgcccagtcctactcatggcggtctacacttgctctcagcggcgcactgtgtgtcgtggtctcgttcttatgcctgctgctgattcacaacgaaccagcagatgtaggccttcgaaacttggacccgatgcctagcgaggggaaaaaaggatcgttgaaggaagagagcaccctgcaggaactgctcctctccccctacttgtgggttttaagcacaggctatctggtggtgtttggagtaaagacttgctgcacagactgggggcagttttttttaattcaggaaaagggacagtctgccctcgtgggctcctcttatatgtccgcactcgaagtgggcgggctggtcggcagcatcgctgccggctacttgtctgacagagcaatggccaaggcgggcctgagcaattatggcaatccccggcacgggcttctactctttatgatggccggaatgaccgtctccatgtatcttttcagggtgaccgtgacttccgactcccctaaattatggatccttgttctaggagcagtgtttggtttctcttcctatggacctattgccctgtttggggtgattgctaacgagagtgcaccccccaacctatgtggcacatcccatgccattgtcggcctgatggcaaacgtgggcggatttctggccggcttgcctttcagtaccatcgctaaacattactcgtggtccacagcgttctgggtggctgaggtaatctgtgcagcatccactgccgccttcttcctgttaaggaatattaggaccaaaatgggccgtgtttccaaaaaggctgagtag

SEQ ID NO: 62630 - DNA, 1290 bp, Artificial Sequence
  derived and/or modified sequence
atggcggcacaaggctatggatattaccggactgttatttttagtgccatgttcggagggtactctttatattatttcaacaggaagacattcagttttgtcatgccttctttggtggaggagattccgctggataaagacgacctcggatttatcacatcatctcagagcgctgcctatgccatctcgaaattcgtctccggggtgttaagtgatcaaatgagtgcaagatggctgttctctagtggacttctgctcgttgggctggtgaacatcttttttgcgtggagttcaacagtgccagtgtttgcagcactgtggttcctaaatgggctggctcaaggcctgggatggcctccctgcggaaaggtactgagaaaatggttcgaacccagccaatttgggacatggtgggcgatcctctctacttctatgaacctggcaggcggtttaggcccaattcttgctactattctggcacagtcttactcatggcggtcgacattggcactcagtggcgctctgtgcgtggttgtgtcattcctctgcctcctcttgatacacaatgagccagccgatgttggcttaaggaatctggaccctatgccatctgaggggaagaaaggcagcttgaaggaagagagtacattacaggaattacttctctctccttacctgtgggtactctcaacaggctatctcgtggtgttcggagtcaagacttgttgtactgattggggccaattcttcctcatccaggaaaaggggcagagcgcgttggtggggagcagctacatgtcggccctcgaagtcgggggtctggtcggatccattgctgctggctacctgtctgaccgggctatggccaaggccggactttcgaattatgggaacccacgccacggcttactgctgttcatgatggctggtatgacggtttctatgtacctattccgcgttaccgttaccagcgactcgccgaaactgtggattctggtgctgggagccgtgtttggattttccagttacggtcccatcgctctgtttggggtgatcgccaatgagagcgcccctcccaacctgtgcgggacatctcatgctattgtgggtttgatggccaatgtagggggatttttggctggattgccgttcagtaccattgccaaacactactcatggagtacagccttctgggtcgctgaggtcatatgcgcagcttcaaccgctgctttcttcctccttaggaacatcaggacaaagatgggccgagtgtcaaaaaaggcagaatag

SEQ ID NO: 62631 - DNA, 2811 bp, Artificial Sequence
  derived and/or modified sequence
ctattcgggctcccgcctctgttcagttccagagacaattcatgggtcttggggccaccgaggcgctgtccctgaccaccagcacgagacccctttctatcgcgccagtcctgtggtctccgcacctctccagctcctgcacccccggcccccgtggttcccagccgcacagtagcgtgtcctgggtagcgtgaggacccacggggctgggcaggtgccacgagcccgccgcctcttcgccgcccgccgcctctcctcctctcccgcccgccgcctggccctcccctaccaggctgagcctctgggtgccagaagcgcggggcctccgggagaatacgtgcggtcgcccgctccgcgtgcgcctacgccttctgctccagttgctttcccaattgagcggaaaagccggggcatgttgccggggccctgggcgggacggttgtgccctgcagcccgaagcccgccggggcaccttcccgcccacgagctgcccagtccctctgcttgcggcccctgccaacgtcccacaggacactgggtccccttggagcctccccaggcttaatgattgtccagaaggcggctataaagggagcctgggaggctgggtggaggagggagcagaaaaaacccaactcagcagatctgggaactgtgagagcggcaagcaggaactgtggtcagaggctgtgcgtcttggctggtagggcctgctcttttctaccatggcagcccagggctatggctattatcgcactgtgatcttctcagccatgtttgggggctacagcctgtattacttcaatcgcaagaccttctcctttgtcatgccatcattggtggaagagatccctttggacaaggatgatttggggttcatcaccagcagccagtcggcagcttatgctatcagcaagtttgtcagtggggtgctgtctgaccagatgagtgctcgctggctcttctcttctgggctgctcctggttggcctggtcaacatattctttgcctggagctccacagtacctgtctttgctgccctctggttccttaatggcctggcccaggggctgggctggcccccatgtgggaaggtcctgcggaagtggtttgagccatctcagtttggcacttggtgggccatcctgtcaaccagcatgaacctggctggagggctgggccctatcctggcaaccatccttgcccagagctacagctggcgcagcacgctggccctatctggggcactgtgtgtggttgtctccttcctctgtctcctgctcatccacaatgaacctgctgatgttggactccgcaacctggaccccatgccctctgagggcaagaagggctccttgaaggaggagagcaccctgcaggagctgctgctgtccccttacctgtgggtgctctccactggttaccttgtggtgtttggagtaaagacctgctgtactgactggggccagttcttccttatccaggagaaaggacagtcagcccttgtaggtagctcctacatgagtgccctggaagttgggggccttgtaggcagcatcgcagctggctacctgtcagaccgggccatggcaaaggcgggactgtccaactacgggaaccctcgccatggcctgttgctgttcatgatggctggcatgacagtgtccatgtacctcttccgggtaacagtgaccagtgactcccccaagctctggatcctggtattgggagctgtatttggtttctcctcgtatggccccattgccctgtttggagtcatagccaacgagagtgcccctcccaacttgtgtggcacctcccacgccattgtgggactcatggccaatgtgggcggctttctggctgggctgcccttcagcaccattgccaagcactacagttggagcacagccttctgggtggctgaagtgatttgtgcggccagcacggctgccttcttcctcctacgaaacatccgcaccaagatgggccgagtgtccaagaaggctgagtgaagagagtccaggttccggagcaccatcccacggtggccttccccctgcacgctctgcggggagaaaaggaggggcctgcctggctagccctgaacctttcactttccatttctgcgccttttctgtcacccgggtggcgctggaagttatcagtggctagtgaggtcccagctccctgatcctatgctctatttaaaagataacctttggccttagactccgttagctcctatttcctgccttcagacaaacaggaaacttctgcagtcaggaaggctcctgtacccttcttcttttcctaggccctgtcctgcccgcatcctaccccatccccacctgaagtgaggctatccctgcagctgcagggcactaatgacccttgacttctgctgggtcctaagtcctctcagcagtgggtgactgctgttgccaatacctcagactccagggaaagagaggaggccatcattctcactgtaccactaggcgcagttggatataggtgggaagaaaaggtgacttgttatagaagattaaaactagatttgatactgaacactgtcagtgattcattttttcaaagtgagacagcttccttgggaaatattgtcaatacctgctctttccaccccaaaatggaaagacttcatttccctggaatggggaagctgaagtgtagatggactcctttaaaactcatgcctcctctgccttcacctgaacattgaatagttcaatgattattttagagataaagctattgggttgtggacagattaaataacttgatggaggg

SEQ ID NO: 62632 - protein, 451 aa, Artificial Sequence
  derived and/or modified sequence
MAAQGYGYYRTVIFSAMFGGYSLYYFNRKTFSFVMPSLVEEIPLDKDDLGFITSSQSAAYAISKFVSGVLSDQMSARWLFSSGLLLVGLVNIFFAWSSTVPVFAALWFLNGLAQGLGWPPCGKVLRKWFEPSQFGTWWAILSTSMNLAGGLGPILATILAQSYSWRSTLALSGALCVVVSFLCLLLIHNEPADVGLRNLDPMPSEGKKGSLKEESTLQELLLSPYLWVLSTGYLVVFGVKTCCTDWGQFFLIQEKGQSALVGSSYMSALEVGGLVGSIAAGYLSDRAMAKAGLSNYGNPRHGLLLFMMAGMTVSMYLFRVTVTSDSPKDVAFWTLALHPLAELTGFTEHELWILVLGAVFGFSSYGPIALFGVIANESAPPNLCGTSHAIVGLMANVGGFLAGLPFSTIAKHYSWSTAFWVAEVICAASTAAFFLLRNIRTKMGRVSKKAE

SEQ ID NO: 62633 - DNA, 1356 bp, Artificial Sequence
  derived and/or modified sequence
atggccgcccagggctacggctactacagaaccgtgatcttcagcgccatgttcggcggctacagcctgtactacttcaacagaaagaccttcagcttcgtgatgcccagcctggtggaggagatccccctggacaaggacgacctgggcttcatcaccagcagccagagcgccgcctacgccatcagcaagttcgtgagcggcgtgctgagcgaccagatgagcgccagatggctgttcagcagcggcctgctgctggtgggcctggtgaacatcttcttcgcctggagcagcaccgtgcccgtgttcgccgccctgtggttcctgaacggcctggcccagggcctgggctggcccccctgcggcaaggtgctgagaaagtggttcgagcccagccagttcggcacctggtgggccatcctgagcaccagcatgaacctggccggcggcctgggccccatcctggccaccatcctggcccagagctacagctggagaagcaccctggccctgagcggcgccctgtgcgtggtggtgagcttcctgtgcctgctgctgatccacaacgagcccgccgacgtgggcctgagaaacctggaccccatgcccagcgagggcaagaagggcagcctgaaggaggagagcaccctgcaggagctgctgctgagcccctacctgtgggtgctgagcaccggctacctggtggtgttcggcgtgaagacctgctgcaccgactggggccagttcttcctgatccaggagaagggccagagcgccctggtgggcagcagctacatgagcgccctggaggtgggcggcctggtgggcagcatcgccgccggctacctgagcgacagagccatggccaaggccggcctgagcaactacggcaaccccagacacggcctgctgctgttcatgatggccggcatgaccgtgagcatgtacctgttcagagtgaccgtgaccagcgacagccccaaggacgtggccttctggaccctggccctgcaccccctggccgagctgaccggcttcaccgagcacgagctgtggatcctggtgctgggcgccgtgttcggcttcagcagctacggccccatcgccctgttcggcgtgatcgccaacgagagcgccccccccaacctgtgcggcaccagccacgccatcgtgggcctgatggccaacgtgggcggcttcctggccggcctgcccttcagcaccatcgccaagcactacagctggagcaccgccttctgggtggccgaggtgatctgcgccgccagcaccgccgccttcttcctgctgagaaacatcagaaccaagatgggcagagtgagcaagaaggccgagtag

SEQ ID NO: 62634 - DNA, 1356 bp, Artificial Sequence
  derived and/or modified sequence
atggccgctcagggttacggctattaccgcaccgtgatcttttctgccatgtttggcgggtattctctgtactatttcaaccgtaagacattcagtttcgtgatgcccagtcttgtggaggagatcccactggacaaggacgatctgggattcatcaccagttctcagagcgctgcttacgccatttccaaattcgtgtctggtgtcttgagcgatcaaatgtccgccagatggctgttctcatcaggcctgctcctggttgggctggtgaatatcttttttgcctggagctctaccgtcccagtgtttgctgcgctgtggttcctcaacggactcgcgcagggcctgggctggcccccgtgtggcaaagtcctgcgtaaatggttcgaacctagccagtttggcacatggtgggccatcctctctacatctatgaatctcgccggcggcctgggccctattttggccacaatcctggcccaaagctattcctggcgctccactttggccctttccggggcactctgcgtggttgtgtccttcctgtgcctgctcttgattcacaacgaaccagccgacgttggtttgcgaaatctggatcccatgcccagtgaaggtaaaaagggatccctaaaagaggagtcaaccttgcaggaattactactgagcccctacctatgggtactgtcaacaggatatctggtcgtgtttggggtcaagacctgttgtactgattggggacagttctttctgattcaggagaagggtcagtccgctctggtgggttctagttacatgtccgcattggaagttggtggactggtcggaagcatagccgctggatatctcagcgaccgggccatggctaaagccggtctgagcaactatggcaatccccgccatggcctgttgctatttatgatggcaggcatgaccgtgagcatgtacctgttccgcgtgaccgtcaccagcgactctcctaaggatgtagcgttctggacccttgcgcttcacccactggccgaactgacagggtttactgaacatgaactctggattctggtccttggcgcagtctttgggttcagtagctatgggccaatcgctctgttcggagtcatcgccaacgaaagcgctcctccaaacctctgcgggaccagccatgccatcgtgggattgatggccaacgttgggggctttctagctggattgcctttttccaccatcgcaaagcattactcctggagcactgctttctgggtggcagaggtgatatgtgctgctagtacagctgctttttttctgctccggaacatcagaacaaagatggggagagtctctaaaaaggccgagtag

SEQ ID NO: 62635 - DNA, 1356 bp, Artificial Sequence
  derived and/or modified sequence
atggccgcccagggctacggctactacagaactgtcatcttcagcgccatgtttggaggctacagcctgtactacttcaacaggaagaccttctcctttgtgatgcccagcctggtggaggagatccccctggacaaggatgacctgggcttcatcaccagcagccagagcgctgcctatgccatcagcaagtttgtgtctggagtgctgagtgaccagatgtctgcccgctggctgttcagcagcggcctgctgctggtgggcctggtgaacatcttctttgcctggagcagcacagtgcctgtgtttgctgccctgtggttcctgaatggcctggcccagggcctgggctggccaccctgtgggaaggtgctgaggaagtggtttgagcccagccagtttggcacctggtgggccatcctgagcacctccatgaacctggccggcggcctgggccccatcctggccaccatcctggcccagagctacagctggaggagcaccctggccctgagcggggccctgtgtgtggtggtgtccttcctgtgcctgctgctgatccacaatgaaccagcagatgtgggcctgaggaacctggaccccatgcccagcgagggcaagaagggcagcctgaaggaggagagcaccctgcaggagctgctgctgagcccctacctgtgggtgctgagcacaggctacctggtggtgtttggagtgaagacctgctgcacagactggggccagttcttcctgatccaggagaagggccagagcgccctggtgggcagcagctacatgtctgccctggaggtgggcggcctggtgggcagcattgctgctggctacctgagtgaccgggccatggccaaggccggcctgagcaactacggcaaccccaggcatggcctgctgctcttcatgatggccggcatgacagtgtccatgtacctgttccgggtgacagtgaccagtgacagccccaaggatgtggccttctggaccctggccctgcaccccctggccgagctgaccggcttcacagaacatgagctgtggatcctggtgctgggcgctgtgtttggcttcagcagctatggccccatcgccctgtttggagtcatcgccaatgaaagtgccccacccaacctgtgtggcaccagccacgccatcgtgggcctgatggccaacgtgggcggcttcctggccggcctgcccttcagcaccatcgccaagcactacagctggagcacagccttctgggtggccgaggtgatctgtgccgccagcacagctgccttcttcctgctgaggaacatccgcaccaagatgggccgggtgtccaagaaggccgagtag

SEQ ID NO: 62636 - DNA, 1356 bp, Artificial Sequence
  derived and/or modified sequence
atggccgcccagggctacggctactaccggaccgtgatcttcagcgccatgtttggcggctactctttgtattacttcaataggaaaaccttctcgtttgtgatgcccagtcttgtggaagagattcccctggacaaagacgatctggggtttatcacctcctcccagtccgccgcttacgccatttcaaagtttgtgtctggggtgttgtctgatcagatgtcagcgcggtggctcttctccagtggtctcctgcttgtgggcctggtgaatatcttctttgcctggtcctcaacggttccggtttttgccgccttgtggttcttgaatggactggcacagggcctcgggtggcccccgtgtggcaaggtactccgtaaatggtttgaacccagccagtttggcacctggtgggccatcctatcaacgtctatgaatttggctggtgggttgggacccattctggccacaattctggctcagtcatactcctggaggtcaacgctggctttgtctggagctttatgcgtcgtagtgtcatttctgtgtctgctcctaatccacaatgaaccggcagatgttggattacgcaatctcgacccaatgcccagcgagggcaagaagggttccctcaaagaggaatccacactgcaggagctgctgctctccccctatctgtgggtgctgagtacaggttacctggttgtctttggcgtgaaaacctgttgtacagattggggccagttcttcctgatccaggagaaaggtcagtccgccctggtcggaagcagctacatgtcagccctggaggtagggggcctcgtaggctctatagccgcgggatatttgtctgatcgagccatggcaaaggccggattgtctaattatgggaatccacgacacggcctcttgctgtttatgatggccggtatgactgtgagtatgtatctgttcagagttacagtcacatccgattcccccaaggacgtggcgttctggacattggcgttacatcccctagctgagttgaccggatttacggaacatgagttatggattctggtacttggagccgtatttggattttcctcctatgggccgatagccctttttggcgttatcgctaatgagtccgctccccctaatctctgcggaacatcacatgccattgtcggtctgatggcaaacgtcggaggcttcttagccgggctccccttctccaccatcgctaaacactacagctggtccactgcattttgggtggctgaagtgatttgtgctgcatctaccgcagccttcttcttgttaagaaatatcagaacaaagatggggcgcgtatctaagaaagccgagtag

SEQ ID NO: 62637 - DNA, 1356 bp, Artificial Sequence
  derived and/or modified sequence
atggcggctcaaggatacggctattaccgcacagtcatcttctctgccatgttcgggggatactcgctttactattttaaccgcaagactttttcgtttgtcatgccgtcactcgtcgaagagattccactggataaagatgaccttggatttatcacttcaagtcagtccgccgcttacgccataagcaagttcgtgtctggcgtgctgagtgatcaaatgagcgccaggtggctttttagcagtggacttttgttagttggcctggtcaacatttttttcgcatggtcatcgactgtacccgtgttcgcagctctgtggttcctgaacggactggcacagggactggggtggcccccatgtggcaaagtgctgcggaaatggttcgaaccttctcagttcggaacatggtgggccatcctttccacttcaatgaatctcgctggcggtcttggcccaattctagccacaattctagcccaatcctactcatggcggagcacactcgccctgtcgggcgctctgtgcgtcgttgtgtcctttctatgcctgctcttaatccacaacgagcctgccgacgtgggactgagaaacctcgatccaatgcctagcgagggcaaaaaggggtcgctgaaggaggaatccaccctgcaggaacttttgttatcaccatacttgtgggtgctcagcaccggctacttagttgttttcggtgtcaaaacatgttgtaccgattggggccaattcttcctcatccaggagaagggtcagagtgccctggtaggatcatcctatatgagtgctttggaagtggggggactcgtcggctcaatcgccgcagggtacctcagcgaccgggcaatggccaaagccggtctgagcaactatggtaatcctcgccatggccttcttttgtttatgatggctggtatgactgtttccatgtacttgttcagggtgaccgtcacatcagactctccaaaggacgttgccttctggactcttgcccttcatcccttggcagagctgaccggctttaccgagcatgagctttggatcctcgtcttgggggcagtgttcggtttctcttcctacggacctattgctctgtttggagtaattgccaatgagagtgctcccccaaatttgtgcggaacaagccacgctattgtcggcctcatggccaatgtgggcggatttttggctggcctacctttttccacaatcgccaaacattattcatggtccactgccttttgggtcgctgaagtaatctgcgccgcttccaccgcggcattcttcctgctgcgcaacatccggacgaaaatgggtagagtctcaaaaaaagccgagtag

SEQ ID NO: 62638 - DNA, 1779 bp, Artificial Sequence
  derived and/or modified sequence
agccccgccccgtcctattcgggctcccgcctctgttcagttccagagacaattcatgggtcttggggccaccgaggcgctgtccctgaccaccagcacgagacccctttctatcgcgccagtcctgtggtctccgcacctctccagctcctgcacccccggcccccgtggttcccagccgcacagtagcgtgtcctgggtagcgtgaggacccacggggctgggcaggacactgggtccccttggagcctccccaggcttaatgattgtccagaaggcggctataaagggagcctgggaggctgggtggaggagggagcagaaaaaacccaactcagcagatctgggaactgtgagagcggcaagcaggaactgtggtcagaggctgtgcgtcttggctggtagggcctgctcttttctaccatggcagcccagggctatggctattatcgcactgtgatcttctcagccatgtttgggggctacagcctgtattacttcaatcgcaagaccttctcctttgtcatgccatcattggtggaagagatccctttggacaaggatgatttggggttcatcaccagcagccagtcggcagcttatgctatcagcaagtttgtcagtggggtgctgtctgaccagatgagtgctcgctggctcttctcttctgggctgctcctggttggcctggtcaacatattctttgcctggagctccacagtacctgtctttgctgccctctggttccttaatggcctggcccaggggctgggctggcccccatgtgggaaggtcctgcggaagtggtttgagccatctcagtttggcacttggtgggccatcctgtcaaccagcatgaacctggctggagggctgggccctatcctggcaaccatccttgcccagagctacagctggcgcagcacgctggccctatctggggcactgtgtgtggttgtctccttcctctgtctcctgctcatccacaatgaacctgctgatgttggactccgcaacctggaccccatgccctctgagggcaagaagggctccttgaaggaggagagcaccctgcaggagctgctgctgtccccttacctgtgggtgctctccactggttaccttgtggtgtttggagtaaagacctgctgtactgactggggccagttcttccttatccaggagaaaggacagtcagcccttgtaggtagctcctacatgagtgccctggaagttgggggccttgtaggcagcatcgcagctggctacctgtcagaccgggccatggcaaaggcgggactgtccaactacgggaaccctcgccatggcctgttgctgttcatgatggctggcatgacagtgtccatgtacctcttccgggtaacagtgaccagtgactcccccaaggatgttgctttctggactctggctcttcaccctctcgcggagctcacaggctttacagagcatgagctctggatcctggtattgggagctgtatttggtttctcctcgtatggccccattgccctgtttggagtcatagccaacgagagtgcccctcccaacttgtgtggcacctcccacgccattgtgggactcatggccaatgtgggcggctttctggctgggctgcccttcagcaccattgccaagcactacagttggagcacagccttctgggtggctgaagtgatttgtgcggccagcacggctgccttcttcctcctacgaaacatccgcaccaagatgggccgagtgtccaagaaggctgagtga

SEQ ID NO: 62639 - protein, 564 aa, Artificial Sequence
  derived and/or modified sequence
MNRSIPVEVDESEPYPSQLLKPIPEYSPEEESEPPAPNIRNMAPNSLSAPTMLHNSSGDFSQAHSTLKLANHQRPVSRQVTCLRTQVLEDSEDSFCRRHPGLGKAFPSGCSAVSEPASESVVGALPAEHQFSFMEKRNQWLVSQLSAASPDTGHDSDKSDQSLPNASADSLGGSQEMVQRPQPHRNRAGLDLPTIDTGYDSQPQDVLGIRQLERPLPLTSVCYPQDLPRPLRSREFPQFEPQRYPACAQMLPPNLSPHAPWNYHYHCPGSPDHQVPYGHDYPRAAYQQVIQPALPGQPLPGASVRGLHPVQKVILNYPSPWDHEERPAQRDCSFPGLPRHQDQPHHQPPNRAGAPGESLECPAELRPQVPQPPSPAAVPRPPSNPPARGTLKTSNLPEELRKVFITYSMDTAMEVVKFVNFLLVNGFQTAIDIFEDRIRGIDIIKWMERYLRDTVMIIVAISPKYKQDVEGAESQLDEDEHGLHTKYIHRMMQIEFIKQGSMNFRFIPVLFPNAKKEHVPTWLQNTHVYSWPKNKKNILLRLLREEEYVAPPRGPLPTLQVVPL

SEQ ID NO: 62640 - DNA, 522 bp, Artificial Sequence
  derived and/or modified sequence
atgacattttccaaactcctaatttgtctcgacttcttggatgtgctcgagcggatgggcgtagctctattatttatttggaagcaggttgagctgctgcttggcataagcctctattcatttctgacgggtatcagtgacgcaccagtgacaggtatggtacgaatgccctttcccggtccaggagagcgaatgggaggaagtcaaacctgcccatgcgaggccgcacttcctggtgagcagcggggagcccctgccctctccagatgggaccatgggctggggggacccaaacccctgccacatccatattgcctggccgacacctggggtcgtcaggtcgccccaggtagttgcttccttgaagtatgtccaggtgccgcttgcgacttagctctctcctttccgtcgtgtcccaagcgttgccaccagagtggcccacagcagctgggctgggcccaggaatcttgtgctctggtgctgctttggcttatggttatccacacactggttctgttctag

SEQ ID NO: 62641 - DNA, 1695 bp, Artificial Sequence
  derived and/or modified sequence
atgaacagaagcatccccgtggaggtggacgagagcgagccctaccccagccagctgctgaagcccatccccgagtacagccccgaggaggagagcgagccccccgcccccaacatcagaaacatggcccccaacagcctgagcgcccccaccatgctgcacaacagcagcggcgacttcagccaggcccacagcaccctgaagctggccaaccaccagagacccgtgagcagacaggtgacctgcctgagaacccaggtgctggaggacagcgaggacagcttctgcagaagacaccccggcctgggcaaggccttccccagcggctgcagcgccgtgagcgagcccgccagcgagagcgtggtgggcgccctgcccgccgagcaccagttcagcttcatggagaagagaaaccagtggctggtgagccagctgagcgccgccagccccgacaccggccacgacagcgacaagagcgaccagagcctgcccaacgccagcgccgacagcctgggcggcagccaggagatggtgcagagaccccagccccacagaaacagagccggcctggacctgcccaccatcgacaccggctacgacagccagccccaggacgtgctgggcatcagacagctggagagacccctgcccctgaccagcgtgtgctacccccaggacctgcccagacccctgagaagcagagagttcccccagttcgagccccagagataccccgcctgcgcccagatgctgccccccaacctgagcccccacgccccctggaactaccactaccactgccccggcagccccgaccaccaggtgccctacggccacgactaccccagagccgcctaccagcaggtgatccagcccgccctgcccggccagcccctgcccggcgccagcgtgagaggcctgcaccccgtgcagaaggtgatcctgaactaccccagcccctgggaccacgaggagagacccgcccagagagactgcagcttccccggcctgcccagacaccaggaccagccccaccaccagccccccaacagagccggcgcccccggcgagagcctggagtgccccgccgagctgagaccccaggtgccccagccccccagccccgccgccgtgcccagaccccccagcaacccccccgccagaggcaccctgaagaccagcaacctgcccgaggagctgagaaaggtgttcatcacctacagcatggacaccgccatggaggtggtgaagttcgtgaacttcctgctggtgaacggcttccagaccgccatcgacatcttcgaggacagaatcagaggcatcgacatcatcaagtggatggagagatacctgagagacaccgtgatgatcatcgtggccatcagccccaagtacaagcaggacgtggagggcgccgagagccagctggacgaggacgagcacggcctgcacaccaagtacatccacagaatgatgcagatcgagttcatcaagcagggcagcatgaacttcagattcatccccgtgctgttccccaacgccaagaaggagcacgtgcccacctggctgcagaacacccacgtgtacagctggcccaagaacaagaagaacatcctgctgagactgctgagagaggaggagtacgtggccccccccagaggccccctgcccaccctgcaggtggtgcccctgtag

SEQ ID NO: 62642 - DNA, 1695 bp, Artificial Sequence
  derived and/or modified sequence
atgaaccgctcaatccctgtagaagtcgacgagtcagagccgtatccttcccagctgctcaagcctatccccgagtacagtccagaggaagagagtgagccacctgcacctaatattcggaacatggctcccaatagcttgtctgctcctacaatgcttcacaactcttccggggacttttcgcaggcgcattctaccttgaagcttgcaaatcaccagcggcccgtgtcacgtcaagtcacctgcctgagaacacaggtgttggaagacagtgaggacagcttctgccggaggcacccagggctaggcaaagcctttcccagcggttgctccgccgtttctgagcccgcctcagagtcagtggtgggcgcgcttccggccgagcaccagtttagcttcatggaaaaacgtaatcagtggctagtgtcacaattgtccgccgccagtcctgacaccggccacgatagcgataagtcagaccagtctctgcccaatgccagcgctgattctctgggtggatcccaggagatggtgcaaagaccccagccccacagaaatcgtgccgggctggacctgcccacaatcgatactggatacgattctcaacctcaagatgtcttgggtatccgtcagttagagcgcccactgccattaacatctgtgtgctatccccaggacttaccaaggcctctgagatccagggagtttccccagttcgagccccagcggtatcctgcatgcgcacaaatgctgccgccgaacctgtccccgcacgccccatggaactaccactaccactgccctggttctcccgatcaccaggtgccctacggccatgattaccccagggctgcatatcagcaggtgatccagccagctctccccggtcagcctctgccgggggcttctgtaagggggttgcatccagttcagaaagtaatcctgaattacccaagcccttgggaccacgaagaacgcccagctcaaagagactgttcattccctggcctgccgaggcatcaggaccaaccccaccatcaaccgcccaaccgggcgggagcgccaggggaatctcttgagtgccctgccgagctaaggcctcaggtcccacagcctcccagtcccgcagccgtgccccggccgccctctaacccacctgcaaggggaaccctgaagacttcaaatttaccagaggagttacgcaaggtgtttatcacctacagcatggacacagctatggaggttgtgaaattcgttaactttttgctggttaatgggtttcaaacagccatagacatctttgaggaccgaattcgtggaattgatatcatcaaatggatggaacgctatctccgcgacaccgttatgatcattgtagcaatctcgccaaagtataaacaggatgtggagggagccgagtcacaacttgacgaggacgaacatgggctgcacacaaagtacatccatcggatgatgcaaatcgagtttattaagcagggaagtatgaattttcgctttatccccgtgctatttcccaacgccaagaaagaacacgtaccgacgtggttgcagaatacacatgtctattcatggcctaaaaacaaaaagaacattttgctgagactcctgcgggaagaagagtacgtggctccgccgagagggcccctgccgaccctgcaggtggtaccactgtag

SEQ ID NO: 62643 - DNA, 1695 bp, Artificial Sequence
  derived and/or modified sequence
atgaacagaagcatccctgtggaggtggatgagagcgagccctaccccagccagctgctgaagcccatccctgagtacagccctgaggaggagagcgagcccccagcccccaacatccggaacatggcccccaacagcctgagcgcccccaccatgctgcacaacagcagcggggacttcagccaggcccacagcaccctgaagctggccaaccaccagaggcctgtgtcccggcaggtgacctgcctgcggacccaggtgctggaggacagcgaggacagcttctgcagaagacaccctggcctgggcaaggccttccccagcggctgcagcgctgtgtctgagcccgccagcgagagcgtggtgggcgccctgcctgctgagcaccagttctccttcatggagaagaggaaccagtggctggtgtcccagctgtctgctgccagcccagacaccggccatgacagcgacaagagtgaccagagcctgcccaatgccagcgctgacagcctgggcggcagccaggagatggtgcagaggccccagccccacaggaacagagctggcctggacctgcccaccatcgacaccggctatgacagccagccccaggatgtgctgggcatccggcagctggagcggcccctgcccctgacctctgtgtgctacccccaggacctgccccggcccctgcggagccgggagttcccccagtttgagccccagcgctacccagcctgtgcccagatgctgccccccaacctgagcccccacgccccctggaactaccactaccactgccccggcagcccagaccaccaggtgccctacggccatgactacccccgggccgcctaccagcaggtgatccagcctgccctgcccggccagcccctgcccggggcctctgtgcggggcctgcaccctgtgcagaaggtgatcctgaactaccccagcccctgggaccacgaggagaggcctgcccagagggactgcagcttccctggcctgcccaggcaccaggaccagccccaccaccagccccccaacagagctggggcccctggagagagcctggagtgcccagctgagctgcggccccaggtgccccagccccccagccctgctgctgtgcccaggcctcccagcaaccccccagcccggggcaccctgaagaccagcaacctgcctgaggagctgaggaaggtgttcatcacctacagcatggacacagccatggaggtggtgaagtttgtgaacttcctgctggtgaatggcttccagacagccatcgacatctttgaagatcgcatccggggcatcgacatcatcaagtggatggagcgctacctgcgggacacagtgatgatcatcgtggccatcagccccaagtacaagcaggatgtggagggcgctgagagccagctggatgaagatgaacatggcctgcacaccaagtacatccacaggatgatgcagatcgagttcatcaagcagggctccatgaacttccgcttcatccctgtgctcttccccaatgccaagaaggagcacgtgcccacctggctgcagaacacccacgtgtacagctggcccaagaacaagaagaacatcctgctgcggctgctgcgggaggaggagtatgtggccccaccccggggccccctgcccaccctgcaggtggtgcccctgtag

SEQ ID NO: 62644 - DNA, 1695 bp, Artificial Sequence
  derived and/or modified sequence
atgaaccggagcatccccgtggaggtggacgagagcgagccctacccgtcacagctgctgaagcccatccccgaatattccccagaagaagaatcggaaccccctgctccaaacattaggaatatggctcccaattcgctcagtgccccaaccatgctgcacaattctagcggtgatttctcacaggctcactcaaccctcaaactggcaaaccatcaaaggcctgtctctcgtcaggttacatgcctccgcacgcaagtcttagaggactctgaggacagcttttgcagaaggcaccctggattaggtaaagcctttccgtccggctgtagtgccgtgagcgaaccagccagcgagagcgtggttggggcgctgcctgcagaacaccagttttctttcatggagaagaggaatcaatggctagtgtcccagctctcggcagcctctcctgatactggccacgactctgataagtccgaccagtccctgcccaacgcatctgctgattccctcggggggtctcaggaaatggttcagcggccacagccacacaggaaccgagcaggattggacttgcccactatcgatactgggtatgacagccagccgcaggatgtgctaggtatccgccaacttgaaagaccactcccactgacttcagtatgctatccccaagacctgcctcggcctctgcgatcccgggagttccctcagttcgagccacaaagataccctgcctgtgctcagatgctgccccccaacctgagcccacatgccccctggaattaccactatcattgcccaggatcacctgatcaccaggtgccctatggacacgattaccctagagccgcatatcagcaggttattcaacccgctctgcccgggcagcctctacctggcgctagtgtcaggggcctgcacccggtacagaaagtcatactaaattatccgtctccctgggatcacgaggagaggccggcccagagagactgctcctttcccgggttacccagacatcaggaccagccacaccaccagccacctaatcgcgctggtgcgccgggcgagtcactggagtgtcctgcagaattacggcctcaggtgccccagccaccttcgcctgctgccgtgccccggcctccgagtaaccctcctgcccgaggcactctcaaaactagcaaccttcccgaggaactacggaaagtgttcataacttactccatggataccgctatggaagtcgtcaaattcgtgaacttccttctcgtgaacggctttcaaacagctatagacatttttgaagatcgcatccgtggcattgacattattaagtggatggagcggtacctgcgcgacaccgtgatgattatagttgccatctctcccaagtataaacaggatgtggagggcgccgagagccaactcgatgaggacgagcatggactgcacaccaagtatatccatcgcatgatgcaaatcgagttcatcaagcagggctcaatgaattttcgctttatcccagtgctgttccccaacgcaaaaaaggaacatgtccccacatggctgcagaatacacatgtatacagctggccgaagaataagaaaaacattctgctgagactgctccgcgaggaggaatatgtggctcccccccgcggacctctgcccacgttgcaggtggtgcctctctag

SEQ ID NO: 62645 - DNA, 1695 bp, Artificial Sequence
  derived and/or modified sequence
atgaatcgatctattcccgtggaggtggacgagagcgagccttacccttcccagcttctgaaacccattccagaatactcacctgaagaggagagtgagcccccagcgcctaacattcgaaatatggcgcctaatagcctttccgcaccgaccatgcttcataactcttctggagatttttcccaggcacattcgacccttaagctcgccaaccatcagagacccgtatccaggcaggtcacatgcctccggactcaagtactggaggattctgaagattctttctgtcggaggcaccctgggttaggcaaggcattcccgtctgggtgtagcgccgtaagtgagcccgctagcgaatcagtggtgggagccctgcccgctgagcatcaattctctttcatggaaaaaagaaatcagtggcttgtgagtcagctctctgcagcttcgcccgataccggtcacgatagcgataagtccgaccagagcctgcccaacgcctccgccgatagcctcggaggctcacaggaaatggttcagcgacctcagccacatcgcaaccgtgcgggattggatcttcccaccatcgataccggctatgattcccaaccacaagacgtccttgggatacgacagctagagaggccactgcccctcacgagtgtttgctacccccaggacctaccccgacccctgagatccagagagtttccacagttcgaaccccagcgatatcccgcttgcgctcagatgctgccacctaaccttagtccccacgcaccgtggaattatcattatcactgccccggaagtcccgatcaccaggttccatacggacacgattaccccagggcggcttatcagcaggtgatacaacctgccttgcctgggcagcctctccccggagcctctgtccgaggccttcatcccgtacaaaaggtgatcttaaactaccccagcccctgggaccatgaggagcgtccagcacagagagactgttccttcccaggattgcccagacatcaggaccagccacatcaccagcctccgaaccgagctggcgctcctggcgagagcctcgaatgtcctgccgaattgcgaccacaggtgcctcagcccccatcacctgctgcagtgcctagacccccaagcaacccccctgccaggggtaccctcaagaccagtaacctgccagaggagttacggaaggtattcatcacttattccatggatactgctatggaggtagtgaagttcgtaaatttcctgttggttaatggatttcagactgcaatcgacatctttgaagaccgtatcaggggcattgacattataaaatggatggagcgctatctgcgggacacagttatgatcatagtggcaatcagtcccaagtataagcaggacgtcgaaggcgcagagtcccagctcgacgaggatgaacatggcctccatactaaatatattcaccgcatgatgcagatcgaatttattaaacaggggtccatgaacttccgcttcatccccgtgctcttccccaatgccaagaaggaacatgtgcctacctggctgcaaaacactcacgtttactcgtggcccaagaacaaaaaaaatatactcctgcgtctgctccgggaggaggaatatgtcgcccctccacgaggccctcttcctacactacaagtggtccccttatag

SEQ ID NO: 62646 - DNA, 330 bp, Artificial Sequence
  derived and/or modified sequence
atgatcatcgtggccatcagccccaagtacaagcaggacgtggagggcgccgagagccagctggacgaggacgagcacggcctgcacaccaagtacatccacagaatgatgcagatcgagttcatcaagcagggcagcatgaacttcagattcatccccgtgctgttccccaacgccaagaaggagcacgtgcccacctggctgcagaacacccacgtgtacagctggcccaagaacaagaagaacatcctgctgagactgctgagagaggaggagtacgtggccccccccagaggccccctgcccaccctgcaggtggtgcccctgtag

SEQ ID NO: 62647 - DNA, 330 bp, Artificial Sequence
  derived and/or modified sequence
atgattattgtggccatctcgcctaaatacaagcaggatgtagagggcgccgagagtcaactggatgaagacgagcatggcttgcatacaaagtatattcacaggatgatgcaaatcgaatttattaaacagggaagcatgaactttcgattcatacccgtcttgtttcccaatgcaaaaaaagaacatgttccaacttggctgcaaaacacgcatgtgtactcttggcccaagaataaaaagaacatcctgctcaggttgctgagagaggaagagtacgtggctcccccgagaggtcctttaccaacgttacaagtggttccactctag

SEQ ID NO: 62648 - DNA, 330 bp, Artificial Sequence
  derived and/or modified sequence
atgatcatcgtggccatcagccccaagtacaagcaggatgtggagggcgctgagagccagctggatgaagatgagcacggcctgcacaccaagtacatccacaggatgatgcagatcgagttcatcaagcagggctccatgaacttccgcttcatccctgtgctcttccccaatgccaagaaggagcacgtgcccacctggctgcagaacacccacgtgtacagctggcccaagaacaagaagaacatcctgctgcggctgctgcgggaggaggagtatgtggccccaccccggggccccctgcccaccctgcaggtggtgcccctgtag

SEQ ID NO: 62649 - DNA, 330 bp, Artificial Sequence
  derived and/or modified sequence
atgatcatcgtggccatcagccccaagtacaagcaggacgtggagggtgcagagagccagctggacgaggacgaacatggtttgcatacaaagtacatccaccggatgatgcagatcgagtttattaagcagggttcaatgaacttcagattcattcctgtgctttttcccaacgcaaagaaggaacacgttcctacttggctccagaatactcacgtgtacagctggcccaaaaacaagaagaatatcctgcttaggttgctgcgagaggaggaatatgtggctccgcctcgcggtcctcttccgacgctgcaggtggtgccgctgtag

SEQ ID NO: 62650 - DNA, 330 bp, Artificial Sequence
  derived and/or modified sequence
atgattattgtggctatttcccccaagtacaaacaggatgtggaaggcgcagagagccagctggatgaagacgagcacggcttgcacactaagtatatccatcggatgatgcagatcgagtttatcaaacagggatccatgaattttcgcttcatccctgtgctgtttccaaacgctaaaaaggagcacgtccccacctggcttcagaatactcacgtgtattcatggcctaagaacaaaaaaaatattctcctacggctgctccgagaagaagagtacgtggcccctccaaggggccctctgccaacgcttcaagtggtccccctttag

SEQ ID NO: 62651 - DNA, 903 bp, Artificial Sequence
  derived and/or modified sequence
ataggaaagaaggaaatgaaggcggagagtggggagagagcagcagaattcaatttaatctgaggccaccccaagtgttttgtagaattgggctgaagaggtttcctaggcagcctcgcaggctgcacagcacaccacccccgagaagaccgtgatgataatcgtagcaatcagccccaaatacaaacaggacgtggaaggcgctgagtcgcagctggacgaggatgagcatggcttacatactaagtacattcatcgaatgatgcagattgagttcataaaacaaggaagcatgaatttcagattcatccctgtgctcttcccaaatgctaagaaggagcatgtgcccacctggcttcagaacactcatgtctacagctggcccaagaataaaaaaaacatcctgctgcggctgctgagagaggaagagtatgtggctcctccacgggggcctctgcccacccttcaggtggttcccttgtgacaccgttcatccccagatcactgaggccaggccatgtttggggccttgttctgacagcattctggctgaggctggtcggtagcactcctggctggtttttttctgttcctccccgagaggccctctggcccccaggaaacctgttgtgcagagctcttccccggagacctccacacaccctggctttgaagtggagtctgtgactgctctgcattctctgcttttaaaaaaaccattgcaggtgccagtgtcccatatgttcctcctgacagtttgatgtgtccattctgggcctctcagtgcttagcaagtagataatgtaagggatgtggcagcaaatggaaatgactacaaacactctcctatcaatcacttcaggctacttttatgagttagccagatgcttgtgtatcctcaga

SEQ ID NO: 62652 - protein, 127 aa, Artificial Sequence [sequence omitted]

SEQ ID NO: 62653 - protein, 1941 aa, Artificial Sequence
  derived and/or modified sequence
MEDGKRERWPTLMERLCSDGFAFPQYPIKPYHLKRIHRAVLHGNLEKLKYLLLTYYDANKRDRKERTALHLACATGQPEMVHLLVSRRCELNLCDREDRTPLIKAVQLRQEACATLLLQNGANPNITDFFGRTALHYAVYNEDTSMIEKLLSHGTNIEECSKCEYQPLLFAVSRRKVKMVEFLLKKKANVNAIDYLGRSALIHAVTLGEKDIVILLLQHNIDVLSRDAFRKIAGDYAIEAKNRVIFDLIYEYERKRYEDLPINSNPVSSQKQPALKATSGKEDSISNIATEIKDGQKSGTVSSQKQPALKDTSDKDDSVSNTATEIKDEQKSGTVLPAVEQCLNRSLYRPDAVAQPVTENEFSLESEIISKLYIPKRKIISPRSIKDVLPPVEEAVDRCLYLLDRFAQPVTKDKFALESENISEPYFTNRRTISQQSAENLDAACGIDKTENGNMFEDQNVDKEGKALPATGQKANVSPEQPPLFTHTVKDRDHISTRFLGGMDSLTSSEESSERPPLSTLTLKEADPSSKAAMRRKDSPPPGKVSSQKQPAEKATSDDKDSVSNIATEIKEGPISGTVSSQKQPAEKATSDEKDSVSNIATEIKKGQQSGTVSPQKQSAWKVIFKKKVSLLNIATRIMGGGKSGTVSSQKQPASKATSDKTDSALNIATEIKDGLQCGTVSSQKQPALKATTDEEDSVSNIATEIKDGEKSGTVSSQKQPALKATTDEEDSVSNIATEIKDGEKSGTVSSQKQPALKATTDEKDSVSNIATEIKDGEKSGTVSSQKPPALTATSDEEGSVLSIARENKDGEKSRTVSSRKKPALKATSDEKDSFSNITRGKKDGEISRKVSSQKPPTLKGTSDEEDSVLGIARENKDGEKSRTVSSEKPPGLKASSAEKDSVLNIARGKKDGEKTKRVSSRKKPSLEATSDEKDSFSNITREKKDGEISRKVSSQKPPALKGTSDEEDSVLGIARENKDGEKSRTVSSEKPPGLKATSDEKDSVLNIARGKKDGEKTRTVSSQKPPTLKATSDEEDSVLSIARENKDGEKSRTVSSEKPSGLKATSAEKDSVLNIARGKKYGEKTKRVSSRKKPALKATSDEKDSVLYIAREKKDGEKSRTVSSPKQPALKAICDKEDSVPNMATEKKDEQISGTVSCQKQPALKATSDKKDSVSNIPTEIKDGQQSGTVSSQKQPAWKATSVKKDSVSNIATEIKDGQIRGTGILEYTFNVMFDQIEEKFTSLNKSAGVSPQKQSAQKVIFKKKVSLLNIATRITGGWKSGTEYPENLPTLKATIENKNSVLNTATKMKDVQTSTPAEQDLEMASEGEQKRLEEYENNQPQVKNQIHSRDDLDDIIQSSQTVSEDGDSLCCNCKNVILLIDQHEMKCKDCVHLLKIKNTFCLWKRLIKLKDNHCEQLRVKIRKLKNKASVLQKRISEKEEIKSQLKHEILELEKELCSLRFAIQQEKKKRRNVEEVHQKVREKLRITEEQYRIEADVTKPIKPALKSAEVELKTGGNNSNQVSETDEKEDLLHENRLMQDEIARLRLEKDTIKNQNLEKKYLKDFEIVKRKHEDLQKALKRNGETLAKTIACYSGQLAALTDENTTLRSKLEKQRESRQRLETEMQSYHCRLNAARCDHDQSHSSKRDQELAFQGTVDKCRHLQENLNSHVLILSLQLSKAESKSRVLKTELHYTGEALKEKALVFEHVQSELKQKQSQMKDIEKMYKSGYNTMEKCIEKQERFCQLKKQNMLLQQQLDDARNKADNQEKAILNIQARCDARVQNLQAECRKHRLLLEEDNKMLVNELNHSKEKECQYEKEKAEREVAVRQLQQKRDDVLNKGSATKALLDASSRHCTYLENGMQDSRKKLDQMRSQFQEIQDQLTATIRCTKEMEGDTQKLEVEHVMMRKIIKKQDDQIERLEKILQHSSLMLQVFES

SEQ ID NO: 62654 - protein, 1208 aa, Artificial Sequence
  derived and/or modified sequence
MGGGKSGTVSSQKQPASKATSDKTDSALNIATEIKDGLQCGTVSSQKQPALKATTDEEDSVSNIATEIKDGEKSGTVSSQKQPALKATTDEEDSVSNIATEIKDGEKSGTVSSQKQPALKATTDEKDSVSNIATEIKDGEKSGTVSSQKPPALTATSDEEGSVLSIARENKDGEKSRTVSSRKKPALKATSDEKDSFSNITRGKKDGEISRKVSSQKPPTLKGTSDEEDSVLGIARENKDGEKSRTVSSEKPPGLKASSAEKDSVLNIARGKKDGEKTKRVSSRKKPSLEATSDEKDSFSNITREKKDGEISRKVSSQKPPALKGTSDEEDSVLGIARENKDGEKSRTVSSEKPPGLKATSDEKDSVLNIARGKKDGEKTRTVSSPKQPALKAICDKEDSVPNMATEKKDEQISGTVSCQKQPALKATSDKKDSVSNIPTEIKDGQQSGTVSSQKQPAWKATSVKKDSVSNIATEIKDGQIRGTVSPQVPIPRHKVGNIKSYPNTGRRIQLDANTFSVSPQKQSAQKVIFKKKVSLLNIATRITGGWKSGTEYPENLPTLKATIENKNSVLNTATKMKDVQTSTPAEQDLEMASEGEQKRLEEYENNQPQVKNQIHSRDDLDDIIQSSQTVSEDGDSLCCNCKNVILLIDQHEMKCKDCVHLLKIKNTFCLWKRLIKLKDNHCEQLRVKIRKLKNKASVLQKRISEKEEIKSQLKHEILELEKELCSLRFAIQQEKKKRRNVEEVHQKVREKLRITEEQYRIEADVTKPIKPALKSAEVELKTGGNNSNQVSETDEKEDLLHENRLMQDEIARLRLEKDTIKNQNLEKKYLKDFEIVKRKHEDLQKALKRNGETLAKTIACYSGQLAALTDENTTLRSKLEKQRESRQRLETEMQSYHCRLNAARCDHDQSHSSKRDQELAFQGTVDKCRHLQENLNSHVLILSLQLSKAESKSRVLKTELHYTGEALKEKALVFEHVQSELKQKQSQMKDIEKMYKSGYNTMEKCIEKQERFCQLKKQNMLLQQQLDDARNKADNQEKAILNIQARCDARVQNLQAECRKHRLLLEEDNKMLVNELNHSKEKECQYEKEKAEREVAVRQLQQKRDDVLNKGSATKALLDASSRHCTYLENGMQDSRKKLDQMRSQFQEIQDQLTATIRCTKEMEGDTQKLEVEHVMMRKIIKKQDDQIERLEKILQHSSLLLLNFET

SEQ ID NO: 62655 - DNA, 5826 bp, Artificial Sequence
  derived and/or modified sequence
atggaggacggcaagagagagagatggcccaccctgatggagagactgtgcagcgacggcttcgccttcccccagtaccccatcaagccctaccacctgaagagaatccacagagccgtgctgcacggcaacctggagaagctgaagtacctgctgctgacctactacgacgccaacaagagagacagaaaggagagaaccgccctgcacctggcctgcgccaccggccagcccgagatggtgcacctgctggtgagcagaagatgcgagctgaacctgtgcgacagagaggacagaacccccctgatcaaggccgtgcagctgagacaggaggcctgcgccaccctgctgctgcagaacggcgccaaccccaacatcaccgacttcttcggcagaaccgccctgcactacgccgtgtacaacgaggacaccagcatgatcgagaagctgctgagccacggcaccaacatcgaggagtgcagcaagtgcgagtaccagcccctgctgttcgccgtgagcagaagaaaggtgaagatggtggagttcctgctgaagaagaaggccaacgtgaacgccatcgactacctgggcagaagcgccctgatccacgccgtgaccctgggcgagaaggacatcgtgatcctgctgctgcagcacaacatcgacgtgctgagcagagacgccttcagaaagatcgccggcgactacgccatcgaggccaagaacagagtgatcttcgacctgatctacgagtacgagagaaagagatacgaggacctgcccatcaacagcaaccccgtgagcagccagaagcagcccgccctgaaggccaccagcggcaaggaggacagcatcagcaacatcgccaccgagatcaaggacggccagaagagcggcaccgtgagcagccagaagcagcccgccctgaaggacaccagcgacaaggacgacagcgtgagcaacaccgccaccgagatcaaggacgagcagaagagcggcaccgtgctgcccgccgtggagcagtgcctgaacagaagcctgtacagacccgacgccgtggcccagcccgtgaccgagaacgagttcagcctggagagcgagatcatcagcaagctgtacatccccaagagaaagatcatcagccccagaagcatcaaggacgtgctgccccccgtggaggaggccgtggacagatgcctgtacctgctggacagattcgcccagcccgtgaccaaggacaagttcgccctggagagcgagaacatcagcgagccctacttcaccaacagaagaaccatcagccagcagagcgccgagaacctggacgccgcctgcggcatcgacaagaccgagaacggcaacatgttcgaggaccagaacgtggacaaggagggcaaggccctgcccgccaccggccagaaggccaacgtgagccccgagcagccccccctgttcacccacaccgtgaaggacagagaccacatcagcaccagattcctgggcggcatggacagcctgaccagcagcgaggagagcagcgagagaccccccctgagcaccctgaccctgaaggaggccgaccccagcagcaaggccgccatgagaagaaaggacagccccccccccggcaaggtgagcagccagaagcagcccgccgagaaggccaccagcgacgacaaggacagcgtgagcaacatcgccaccgagatcaaggagggccccatcagcggcaccgtgagcagccagaagcagcccgccgagaaggccaccagcgacgagaaggacagcgtgagcaacatcgccaccgagatcaagaagggccagcagagcggcaccgtgagcccccagaagcagagcgcctggaaggtgatcttcaagaagaaggtgagcctgctgaacatcgccaccagaatcatgggcggcggcaagagcggcaccgtgagcagccagaagcagcccgccagcaaggccaccagcgacaagaccgacagcgccctgaacatcgccaccgagatcaaggacggcctgcagtgcggcaccgtgagcagccagaagcagcccgccctgaaggccaccaccgacgaggaggacagcgtgagcaacatcgccaccgagatcaaggacggcgagaagagcggcaccgtgagcagccagaagcagcccgccctgaaggccaccaccgacgaggaggacagcgtgagcaacatcgccaccgagatcaaggacggcgagaagagcggcaccgtgagcagccagaagcagcccgccctgaaggccaccaccgacgagaaggacagcgtgagcaacatcgccaccgagatcaaggacggcgagaagagcggcaccgtgagcagccagaagccccccgccctgaccgccaccagcgacgaggagggcagcgtgctgagcatcgccagagagaacaaggacggcgagaagagcagaaccgtgagcagcagaaagaagcccgccctgaaggccaccagcgacgagaaggacagcttcagcaacatcaccagaggcaagaaggacggcgagatcagcagaaaggtgagcagccagaagccccccaccctgaagggcaccagcgacgaggaggacagcgtgctgggcatcgccagagagaacaaggacggcgagaagagcagaaccgtgagcagcgagaagccccccggcctgaaggccagcagcgccgagaaggacagcgtgctgaacatcgccagaggcaagaaggacggcgagaagaccaagagagtgagcagcagaaagaagcccagcctggaggccaccagcgacgagaaggacagcttcagcaacatcaccagagagaagaaggacggcgagatcagcagaaaggtgagcagccagaagccccccgccctgaagggcaccagcgacgaggaggacagcgtgctgggcatcgccagagagaacaaggacggcgagaagagcagaaccgtgagcagcgagaagccccccggcctgaaggccaccagcgacgagaaggacagcgtgctgaacatcgccagaggcaagaaggacggcgagaagaccagaaccgtgagcagccagaagccccccaccctgaaggccaccagcgacgaggaggacagcgtgctgagcatcgccagagagaacaaggacggcgagaagagcagaaccgtgagcagcgagaagcccagcggcctgaaggccaccagcgccgagaaggacagcgtgctgaacatcgccagaggcaagaagtacggcgagaagaccaagagagtgagcagcagaaagaagcccgccctgaaggccaccagcgacgagaaggacagcgtgctgtacatcgccagagagaagaaggacggcgagaagagcagaaccgtgagcagccccaagcagcccgccctgaaggccatctgcgacaaggaggacagcgtgcccaacatggccaccgagaagaaggacgagcagatcagcggcaccgtgagctgccagaagcagcccgccctgaaggccaccagcgacaagaaggacagcgtgagcaacatccccaccgagatcaaggacggccagcagagcggcaccgtgagcagccagaagcagcccgcctggaaggccaccagcgtgaagaaggacagcgtgagcaacatcgccaccgagatcaaggacggccagatcagaggcaccggcatcctggagtacaccttcaacgtgatgttcgaccagatcgaggagaagttcaccagcctgaacaagagcgccggcgtgagcccccagaagcagagcgcccagaaggtgatcttcaagaagaaggtgagcctgctgaacatcgccaccagaatcaccggcggctggaagagcggcaccgagtaccccgagaacctgcccaccctgaaggccaccatcgagaacaagaacagcgtgctgaacaccgccaccaagatgaaggacgtgcagaccagcacccccgccgagcaggacctggagatggccagcgagggcgagcagaagagactggaggagtacgagaacaaccagccccaggtgaagaaccagatccacagcagagacgacctggacgacatcatccagagcagccagaccgtgagcgaggacggcgacagcctgtgctgcaactgcaagaacgtgatcctgctgatcgaccagcacgagatgaagtgcaaggactgcgtgcacctgctgaagatcaagaacaccttctgcctgtggaagagactgatcaagctgaaggacaaccactgcgagcagctgagagtgaagatcagaaagctgaagaacaaggccagcgtgctgcagaagagaatcagcgagaaggaggagatcaagagccagctgaagcacgagatcctggagctggagaaggagctgtgcagcctgagattcgccatccagcaggagaagaagaagagaagaaacgtggaggaggtgcaccagaaggtgagagagaagctgagaatcaccgaggagcagtacagaatcgaggccgacgtgaccaagcccatcaagcccgccctgaagagcgccgaggtggagctgaagaccggcggcaacaacagcaaccaggtgagcgagaccgacgagaaggaggacctgctgcacgagaacagactgatgcaggacgagatcgccagactgagactggagaaggacaccatcaagaaccagaacctggagaagaagtacctgaaggacttcgagatcgtgaagagaaagcacgaggacctgcagaaggccctgaagagaaacggcgagaccctggccaagaccatcgcctgctacagcggccagctggccgccctgaccgacgagaacaccaccctgagaagcaagctggagaagcagagagagagcagacagagactggagaccgagatgcagagctaccactgcagactgaacgccgccagatgcgaccacgaccagagccacagcagcaagagagaccaggagctggccttccagggcaccgtggacaagtgcagacacctgcaggagaacctgaacagccacgtgctgatcctgagcctgcagctgagcaaggccgagagcaagagcagagtgctgaagaccgagctgcactacaccggcgaggccctgaaggagaaggccctggtgttcgagcacgtgcagagcgagctgaagcagaagcagagccagatgaaggacatcgagaagatgtacaagagcggctacaacaccatggagaagtgcatcgagaagcaggagagattctgccagctgaagaagcagaacatgctgctgcagcagcagctggacgacgccagaaacaaggccgacaaccaggagaaggccatcctgaacatccaggccagatgcgacgccagagtgcagaacctgcaggccgagtgcagaaagcacagactgctgctggaggaggacaacaagatgctggtgaacgagctgaaccacagcaaggagaaggagtgccagtacgagaaggagaaggccgagagagaggtggccgtgagacagctgcagcagaagagagacgacgtgctgaacaagggcagcgccaccaaggccctgctggacgccagcagcagacactgcacctacctggagaacggcatgcaggacagcagaaagaagctggaccagatgagaagccagttccaggagatccaggaccagctgaccgccaccatcagatgcaccaaggagatggagggcgacacccagaagctggaggtggagcacgtgatgatgagaaagatcatcaagaagcaggacgaccagatcgagagactggagaagatcctgcagcacagcagcctgatgctgcaggtgttcgagagctag

SEQ ID NO: 62656 - DNA, 3627 bp, Artificial Sequence
  derived and/or modified sequence
atgggcggcggcaagagcggcaccgtgagcagccagaagcagcccgccagcaaggccaccagcgacaagaccgacagcgccctgaacatcgccaccgagatcaaggacggcctgcagtgcggcaccgtgagcagccagaagcagcccgccctgaaggccaccaccgacgaggaggacagcgtgagcaacatcgccaccgagatcaaggacggcgagaagagcggcaccgtgagcagccagaagcagcccgccctgaaggccaccaccgacgaggaggacagcgtgagcaacatcgccaccgagatcaaggacggcgagaagagcggcaccgtgagcagccagaagcagcccgccctgaaggccaccaccgacgagaaggacagcgtgagcaacatcgccaccgagatcaaggacggcgagaagagcggcaccgtgagcagccagaagccccccgccctgaccgccaccagcgacgaggagggcagcgtgctgagcatcgccagagagaacaaggacggcgagaagagcagaaccgtgagcagcagaaagaagcccgccctgaaggccaccagcgacgagaaggacagcttcagcaacatcaccagaggcaagaaggacggcgagatcagcagaaaggtgagcagccagaagccccccaccctgaagggcaccagcgacgaggaggacagcgtgctgggcatcgccagagagaacaaggacggcgagaagagcagaaccgtgagcagcgagaagccccccggcctgaaggccagcagcgccgagaaggacagcgtgctgaacatcgccagaggcaagaaggacggcgagaagaccaagagagtgagcagcagaaagaagcccagcctggaggccaccagcgacgagaaggacagcttcagcaacatcaccagagagaagaaggacggcgagatcagcagaaaggtgagcagccagaagccccccgccctgaagggcaccagcgacgaggaggacagcgtgctgggcatcgccagagagaacaaggacggcgagaagagcagaaccgtgagcagcgagaagccccccggcctgaaggccaccagcgacgagaaggacagcgtgctgaacatcgccagaggcaagaaggacggcgagaagaccagaaccgtgagcagccccaagcagcccgccctgaaggccatctgcgacaaggaggacagcgtgcccaacatggccaccgagaagaaggacgagcagatcagcggcaccgtgagctgccagaagcagcccgccctgaaggccaccagcgacaagaaggacagcgtgagcaacatccccaccgagatcaaggacggccagcagagcggcaccgtgagcagccagaagcagcccgcctggaaggccaccagcgtgaagaaggacagcgtgagcaacatcgccaccgagatcaaggacggccagatcagaggcaccgtgagcccccaggtgcccatccccagacacaaggtgggcaacatcaagagctaccccaacaccggcagaagaatccagctggacgccaacaccttcagcgtgagcccccagaagcagagcgcccagaaggtgatcttcaagaagaaggtgagcctgctgaacatcgccaccagaatcaccggcggctggaagagcggcaccgagtaccccgagaacctgcccaccctgaaggccaccatcgagaacaagaacagcgtgctgaacaccgccaccaagatgaaggacgtgcagaccagcacccccgccgagcaggacctggagatggccagcgagggcgagcagaagagactggaggagtacgagaacaaccagccccaggtgaagaaccagatccacagcagagacgacctggacgacatcatccagagcagccagaccgtgagcgaggacggcgacagcctgtgctgcaactgcaagaacgtgatcctgctgatcgaccagcacgagatgaagtgcaaggactgcgtgcacctgctgaagatcaagaacaccttctgcctgtggaagagactgatcaagctgaaggacaaccactgcgagcagctgagagtgaagatcagaaagctgaagaacaaggccagcgtgctgcagaagagaatcagcgagaaggaggagatcaagagccagctgaagcacgagatcctggagctggagaaggagctgtgcagcctgagattcgccatccagcaggagaagaagaagagaagaaacgtggaggaggtgcaccagaaggtgagagagaagctgagaatcaccgaggagcagtacagaatcgaggccgacgtgaccaagcccatcaagcccgccctgaagagcgccgaggtggagctgaagaccggcggcaacaacagcaaccaggtgagcgagaccgacgagaaggaggacctgctgcacgagaacagactgatgcaggacgagatcgccagactgagactggagaaggacaccatcaagaaccagaacctggagaagaagtacctgaaggacttcgagatcgtgaagagaaagcacgaggacctgcagaaggccctgaagagaaacggcgagaccctggccaagaccatcgcctgctacagcggccagctggccgccctgaccgacgagaacaccaccctgagaagcaagctggagaagcagagagagagcagacagagactggagaccgagatgcagagctaccactgcagactgaacgccgccagatgcgaccacgaccagagccacagcagcaagagagaccaggagctggccttccagggcaccgtggacaagtgcagacacctgcaggagaacctgaacagccacgtgctgatcctgagcctgcagctgagcaaggccgagagcaagagcagagtgctgaagaccgagctgcactacaccggcgaggccctgaaggagaaggccctggtgttcgagcacgtgcagagcgagctgaagcagaagcagagccagatgaaggacatcgagaagatgtacaagagcggctacaacaccatggagaagtgcatcgagaagcaggagagattctgccagctgaagaagcagaacatgctgctgcagcagcagctggacgacgccagaaacaaggccgacaaccaggagaaggccatcctgaacatccaggccagatgcgacgccagagtgcagaacctgcaggccgagtgcagaaagcacagactgctgctggaggaggacaacaagatgctggtgaacgagctgaaccacagcaaggagaaggagtgccagtacgagaaggagaaggccgagagagaggtggccgtgagacagctgcagcagaagagagacgacgtgctgaacaagggcagcgccaccaaggccctgctggacgccagcagcagacactgcacctacctggagaacggcatgcaggacagcagaaagaagctggaccagatgagaagccagttccaggagatccaggaccagctgaccgccaccatcagatgcaccaaggagatggagggcgacacccagaagctggaggtggagcacgtgatgatgagaaagatcatcaagaagcaggacgaccagatcgagagactggagaagatcctgcagcacagcagcctgctgctgctgaacttcgagacctag

SEQ ID NO: 62657 - DNA, 5826 bp, Artificial Sequence
  derived and/or modified sequence
atggaggatggaaagcgggagaggtggccgaccctcatggagcggctgtgctctgatggttttgcattcccgcaataccccataaaaccatatcatcttaagagaatacacagggctgtgctccacggcaacttggagaaactaaagtatctgttgctgacttattacgacgctaataagagagatcgcaaagagcgaaccgctctgcacctggcttgcgccaccgggcagcctgaaatggtgcacctgttggtgtcaaggcggtgtgagctgaacttatgcgatcgagaggaccggaccccgctgatcaaagcagtgcagcttcgtcaggaggcatgtgccacccttctgttacaaaacggtgccaaccccaatattactgactttttcgggcgcactgctctgcactacgccgtgtacaacgaagatacatccatgatagaaaagctcctttcccacggaacaaacatcgaggagtgctcaaagtgtgaataccaacccctcttgtttgccgtttccaggagaaaggtgaaaatggtggagttcctgctcaagaaaaaagctaatgttaacgccatcgactacctaggtagatctgctctcatacacgctgtcaccctcggagagaaagatatagtgatcctgcttctgcagcataatattgacgtattgagccgggacgctttcagaaaaatcgctggtgactacgctattgaagcgaagaaccgcgtgatcttcgatctcatatatgagtatgagcggaagcgatatgaagacctgcccatcaactctaaccctgtgagctcacagaaacagcccgccctgaaagcaacctccggaaaagaggacagtatcagtaatattgcgaccgagattaaagatggacagaagtccgggacggtctcgtcacagaaacagccagcattgaaggatacttcggacaaagacgacagcgtaagcaataccgcaactgaaattaaggatgaacagaaatctggcacggtgcttcccgctgtcgaacagtgtctgaacagatccctgtaccgacctgatgcagtggcccagcctgttaccgaaaacgaatttagcctggaatcagagattattagcaagctttatatcccgaagaggaagatcatttcaccaaggagtattaaagacgtgctgccacctgtggaagaagccgtagaccgatgcttgtacctgttggaccggtttgcccagcccgtgactaaggataaattcgccctcgagtccgaaaatatcagtgagccctattttaccaatagacgcaccatctcccagcagagcgcagagaatctcgatgctgcatgcggtatagacaagacggagaatgggaacatgtttgaggaccaaaacgtggacaaggagggaaaagctctgcccgcaaccggacagaaagctaacgtgtcacccgaacaacccccactttttactcataccgtcaaagaccgcgaccacatctccacacgtttcctcggagggatggacagtctgaccagcagcgaagagtcgtcagagcggccaccactctcaactttgacactgaaggaggctgacccttcttcgaaagcggctatgcggaggaaggatagcccaccacccggtaaagtgagctcacagaaacaaccagctgaaaaggctacttctgatgataaggactccgtgagcaatattgccacagaaattaaagagggacctatatccggaactgtgtcatctcaaaagcagccagcagagaaagctaccagcgacgagaaagacagcgtgagtaacattgccactgagatcaaaaagggccaacagtctggcactgtgtcaccacagaagcagagtgcctggaaggtaatattcaagaagaaagtgtctttactaaacatcgctaccaggatcatgggcggcggcaagagcggtacagtgtctagccagaaacagccagcaagtaaagctacaagcgacaaaacagattctgcattgaacatcgcgacagagatcaaggatggactccagtgtggcacggtgtcaagccagaagcagccagcactcaaagccaccacagatgaagaggacagcgtttccaacattgcgactgaaatcaaggacggcgaaaaaagcgggacagtgagttctcagaagcaaccagctttgaaagcaacgaccgatgaggaagacagcgtgagcaacatcgctacggaaataaaggacggggaaaagagcgggacggtgtcatctcagaaacagccggctctgaaagccactacagacgaaaaggatagcgtatccaacatcgccaccgaaatcaaggacggagagaagtccggcactgtaagctctcaaaaaccccccgccctcacagctacgtccgatgaggaaggctctgtgctgagcatcgcccgcgagaacaaagatggcgaaaaatctcggacggtttcttctcgaaagaaacctgctctcaaagccacctctgacgagaaggattctttcagtaacattacgaggggtaagaaagatggggaaatctcaagaaaagtctcaagccaaaaacccccaactctaaaggggaccagcgacgaggaggattcagtcctgggtatcgcaagggaaaacaaggacggtgagaaaagccgcaccgttagtagcgagaagccgcccggattgaaagcctcatctgcggagaaagatagcgtcctcaacattgcacgcggcaagaaagatggcgaaaaaaccaaacgagtatcctcccgaaagaaacccagcttagaggcgacctctgatgagaaggactccttctcgaatattactcgcgaaaaaaaggatggcgagatatctcgtaaagtttcttcacagaaaccacctgcgctcaaaggaacctctgacgaagaggattcagtgctgggaattgcccgagagaacaaggacggggagaagagcaggacggtgagcagcgagaaaccccctggacttaaggctacgagtgacgaaaaagactctgtgctgaatatagcacgaggtaagaaggacggcgagaaaactaggaccgtgtcatcacaaaagccacccacattaaaggccacctccgacgaagaagacagcgtgctctccattgccagggaaaacaaggacggtgagaaatctcgaacagtctcctccgagaaaccctccggactgaaggcaacgtccgccgagaaagattcagtgctgaatattgcacgcggcaagaagtatggggaaaaaaccaagcgtgtatcttctcggaaaaaacctgccctgaaagctactagcgatgaaaaggattcagtgctctatattgcacgggagaagaaagatggcgagaagagccggactgtgtccagtccaaaacaacctgccctaaaagccatctgtgataaggaggattcagtgccaaacatggctacagagaaaaaggacgaacagatcagcggaaccgtgtcctgccagaaacagcccgctctgaaagccacctccgacaaaaaggattccgtcagcaacattcccacagagatcaaagacggtcagcaaagtggaaccgtcagcagtcagaaacaacctgcctggaaggcgaccagtgttaagaaagattcagtaagtaatatcgctacggaaatcaaggatgggcagatacggggcaccggcatccttgagtatacatttaatgtgatgtttgatcagattgaggaaaaatttacaagtttgaataaaagcgccggcgtaagccctcaaaagcaatccgcccaaaaggtgattttcaagaaaaaggtcagtctcctcaatatcgccactagaatcaccggggggtggaaatccgggacagagtatcctgagaatttgcctactctgaaagcaactatcgaaaacaaaaacagcgtgctgaatacagcaactaaaatgaaagacgtacagacctcaactccggctgaacaagatttggagatggcatcggagggagaacagaaaagactggaggagtatgagaataaccagccacaggttaagaaccagatccatagtcgtgatgacctggatgacatcatacagtctagccaaacagtcagcgaggatggtgatagcctgtgttgcaactgcaagaacgtcattcttcttatcgaccaacatgagatgaagtgtaaagattgtgttcacctgttaaagataaaaaacacattctgtctgtggaaaaggcttatcaaattaaaggataaccattgcgaacagcttagagtgaaaatccggaaactgaagaataaagcctctgttcttcagaagaggatttcagagaaagaggagattaagagtcaacttaaacatgaaattctggaactcgaaaaggagctatgtagcttgcgctttgccatccaacaggaaaagaagaaacgccgtaacgtggaagaggtccatcagaaggtgcgagaaaaactgaggatcaccgaagagcagtatagaattgaggccgatgtaactaaaccgatcaagcctgcacttaagtcagctgaagtggaattgaagaccggaggaaataacagcaatcaggtgtcagagactgacgagaaagaggacctcttgcatgaaaacaggctcatgcaagacgaaattgcccgactgagactggaaaaggacaccatcaagaatcagaatctggaaaaaaagtacctcaaagattttgaaattgtcaagagaaagcacgaggacctacagaaagcccttaaacggaatggagaaaccctggctaagacaatagcctgctactccggccagcttgctgcattaacggatgaaaacaccaccctacgctctaagctggagaaacagagagagtctcggcagcggttagaaacagagatgcagtcttaccattgtcgcctgaacgctgcgcggtgtgaccacgaccaatcacacagcagtaagagggatcaggaactcgccttccaaggtactgtggataagtgccgacacctgcaggaaaacctgaactctcatgtgttgatcttatcactccagctttccaaggcagagtcgaagtcccgcgtgcttaaaactgaactacattatactggagaggcccttaaagaaaaagcactggtctttgaacatgtacagtccgagctcaaacagaaacagagccagatgaaagatatcgaaaaaatgtataaatcaggctacaatactatggagaaatgcatcgagaagcaggaacggttttgccagttgaagaagcagaacatgcttctccagcaacagctggacgatgctcgaaacaaggctgacaaccaggagaaggccatccttaacatacaggcacgctgcgatgcgagagttcagaacctgcaggccgagtgtaggaagcatcgactgcttctggaagaggacaataaaatgttggtgaacgaactgaaccactctaaagaaaaggaatgtcagtatgaaaaggaaaaggcagaacgtgaagtagctgtgcgtcaactgcaacaaaagcgggatgatgtccttaataagggatcggctactaaagccctgctggacgcatcctcgcgccactgcacctacctagagaacgggatgcaggattcgcggaagaagctggatcaaatgcgcagtcaattccaggaaatccaggaccagctgactgccacaattcgttgcacaaaagaaatggagggcgatacccagaagctagaagttgagcacgttatgatgcggaagattataaagaagcaggatgaccaaatcgaaagactggaaaaaatcttacaacacagctctctaatgctccaggtgtttgagagctag

SEQ ID NO: 62658 - DNA, 5826 bp, Artificial Sequence
  derived and/or modified sequence
atggaggatggcaagcgcgagcgctggcctacgctaatggagcgcctctgttctgatggttttgccttccctcaatacccaatcaagccttatcatttaaagcgcattcaccgggccgtcctgcatggaaatttggagaagctgaagtatttattgctaacatattatgatgcaaacaaacgcgataggaaggagagaacagctctgcaccttgcctgcgccactggccaaccagagatggttcaccttctcgtctcgaggcgctgtgaactaaatctgtgtgatcgcgaggaccggactcccctcatcaaagcagtacaactgagacaggaggcttgcgcaaccttgctccttcagaacggcgctaaccccaacatcaccgactttttcggccgaactgctctccattacgccgtttataatgaggacacatcgatgatcgaaaaactgctgtctcacggaactaatatcgaggaatgttcgaagtgcgagtatcagcccctcctgtttgctgtgtctcgcaggaaggtgaagatggtggagtttctcctcaagaaaaaggcaaacgttaacgcaatagactacctggggcggagcgccctgattcacgccgtcacacttggtgagaaggacatcgtgatacttctccttcaacacaatattgacgtgttgagtcgagacgcatttagaaaaatcgccggagattacgcaattgaggctaagaacagagtaatctttgacctgatctatgaatatgagaggaaaaggtacgaggatctgccaatcaatagcaatcccgtgtctagccaaaagcagcccgctctgaaggccacttctggaaaagaagacagcatatccaacattgcaaccgaaattaaggatgggcagaaatctggcacagttagcagtcaaaaacagcctgcactcaaggacactagcgataaagacgattcggtgagcaatacagcgactgaaattaaggatgaacagaagtccggtactgtgctgcccgcagttgaacagtgcctgaacagatccctataccgccccgatgcagtggctcaacccgtcactgaaaacgaattcagtttggaatctgagattatcagcaaattgtacattcccaagcgcaaaataatttctccacgcagcatcaaagatgttctgccaccagtcgaagaagccgtcgacagatgtctatatcttctggacagattcgcacagcccgtgaccaaggacaagtttgcattggagtcagaaaatataagtgagccttattttaccaatcggaggaccatttcccagcagtctgccgagaatctggacgctgcctgtggtattgacaaaaccgagaacgggaacatgtttgaggaccagaacgtggataaggaaggaaaagccctccccgccaccggtcaaaaggctaacgtgtctcccgagcagccacctttgtttacacacacggtgaaagatagagatcacatctccaccagatttctcgggggcatggattctttaacctcgtctgaagagagcagtgagcgcccaccattatccacgttgacactgaaagaggccgacccttccagtaaggccgcaatgaggcgaaaggactctcctccgcccgggaaagtctcttctcagaaacagcctgctgaaaaagcaacctctgatgacaaagactcagtgagcaatattgccaccgaaattaaagaggggcccataagcgggactgtcagctctcagaagcaacccgccgaaaaggccactagcgatgagaaagatagtgtgtctaacatagctaccgaaatcaagaagggacagcaatctgggaccgtttccccacagaagcagtctgcctggaaggtaatctttaaaaagaaagtatctcttttgaatattgctacacggattatgggcggcggcaaaagcggaacagtgagcagccagaagcaacctgctagcaaggctacaagcgacaaaaccgacagcgcccttaacatcgccacagagattaaggatggactgcaatgtggcaccgtgtcttcacagaaacaacccgcccttaaagccacgacggacgaggaggacagcgtgagtaatattgccaccgagattaaagatggagagaagtctggcactgtgagctcccaaaaacaacccgctcttaaggccaccactgacgaggaggattccgtgtccaatattgctacagagatcaaagacggcgaaaaatcggggacagtgtcatctcagaagcaacccgctttgaaagcaaccacagacgagaaggacagtgtttccaatatcgcaacagaaataaaagatggcgagaaaagtgggactgtcagcagccaaaagccacccgcactgactgcaactagcgacgaggaaggctcagtccttagcatagcaagggaaaataaggatggggagaagtccagaaccgtatcctcacgaaagaaaccagcgcttaaggccacaagcgatgagaaagattcattctctaatataacaagggggaagaaggacggcgaaatttcccggaaggtgtcaagccagaagcctcctacactgaaaggaactagcgatgaggaggattctgtcctgggtatcgcaagagaaaataaagacggcgagaaatctcggaccgtttcctcagaaaagccaccgggtttaaaggcgtctagcgcggagaaagacagcgttctcaacatagctcgtggtaaaaaggacggagagaagaccaaacgcgtttctagtagaaaaaagccatctttggaggccacaagcgacgagaaggacagtttctctaacatcacgcgcgagaagaaggatggggaaatcagtcgcaaggtgtccagccagaaaccaccagccctgaaggggacatccgatgaggaagattccgtattgggaatcgcaagggaaaacaaggacggggaaaaatcaaggactgtttcctctgaaaagcccccagggttgaaagccacctccgacgagaaagactccgtcctcaacatcgcgcgcggtaagaaggacggtgagaaaacacggactgtcagctcgcaaaagccacccaccctgaaagctacgagtgacgaggaggactccgtactgagtattgccagagaaaacaaagacggcgagaagagtcgaacagtcagttccgagaagcccagtggcctgaaagcgacctctgcagaaaaggattccgtcttgaacattgcacggggaaaaaaatacggcgaaaaaactaagcgagtttcatcaagaaagaagcccgccctgaaggccacttcagacgaaaaggatagcgtgctctacattgcccgagagaagaaggacggtgaaaagtccaggactgtgtccagtcccaaacagcctgcgcttaaagcgatctgtgataaagaggactccgtcccaaacatggccaccgaaaagaaggacgagcaaatctctggcaccgtgtcctgccagaaacagccagcgttgaaggcaacaagcgacaagaaggattccgtcagtaacattcccacagagataaaggacgggcagcagtcagggactgtatccagccaaaagcagccagcttggaaggcgacctccgttaaaaaagatagcgtgtcaaacatagccactgaaatcaaggatggccaaatccgtggcacagggatattagagtacacattcaatgttatgttcgatcaaatcgaggagaagttcacttcgcttaataaatccgccggggttagtcctcagaaacagtccgcccagaaagtgatttttaaaaagaaggtgagcctccttaacatcgcaactcgaattaccggaggatggaagagtggcacagagtacccagagaatctgcccacgctcaaggccacaatcgagaacaagaacagcgtgctcaacactgccaccaagatgaaggacgtacaaactagtacccccgctgagcaagacctcgaaatggcctcagagggagaacagaaaaggttggaggaatatgagaacaaccaaccgcaggtgaagaaccagatccactccagggatgatcttgatgacatcattcagtcttctcagactgtgtctgaggacggtgacagcctctgctgtaattgtaagaacgtcatcctgctgatagaccaacatgaaatgaaatgtaaagactgtgtgcacctactgaagattaaaaatacattctgcctgtggaagcgtctgatcaaactaaaggataaccattgcgaacagctgagagttaagattcgcaaactaaagaacaaggccagcgtactccagaagcgcattagtgagaaggaagagatcaagtcgcagctgaagcacgaaatcctggagctcgagaaagaactctgctctctgaggttcgctatccagcaagaaaagaagaaacgtaggaatgtggaggaggtgcaccagaaagttagggaaaagctgcgtattaccgaggagcagtacaggatagaagccgacgttaccaaaccgatcaagcctgcacttaagagtgcagaagtggaattgaaaaccggaggtaataattctaatcaagtgtccgaaactgacgagaaagaggacctgctacatgaaaatcgactgatgcaagatgagatcgctcgtctgagacttgagaaggatactatcaagaatcagaacctggagaaaaagtatcttaaagactttgagatcgtgaaacgaaagcacgaggatctgcagaaagcactgaagaggaatggggagacactggcgaaaaccatagcgtgctacagcggacagctggccgctctgacagacgaaaacaccactctgaggagtaagctcgagaaacagcgggaatcccgccagagactggagacagagatgcagtcctaccactgtaggttgaatgccgcacggtgtgatcacgatcagagccactcctctaagcgggaccaggagctggcgtttcaaggtactgtggataagtgtcgtcaccttcaggaaaacctaaacagccatgtactgatcctgtccctgcagctgagcaaagccgaaagtaagagccgggtattgaaaaccgaactgcactatacaggggaggcactgaaggaaaaggcactggtgtttgaacatgtgcagtcagagttgaaacagaagcaatctcagatgaaggacattgagaaaatgtacaaaagtgggtacaatactatggagaaatgcatcgagaagcaggaacgcttttgccagctaaagaaacagaacatgctgttgcagcagcaattagatgatgcgcgtaacaaggctgataatcaagagaaagcgatactgaacatccaagctcggtgtgatgcacgggtccagaatctgcaggccgaatgtagaaaacatagactgctgctggaggaggacaacaaaatgcttgttaacgagttgaatcactccaaagagaaagagtgccaatatgagaaggaaaaagccgaacgcgaagtcgctgttcggcagctgcaacagaagcgagacgacgtcctcaacaaaggctctgctaccaaggcactgcttgatgcgagcagtcgccactgcacatacctggagaacggcatgcaggattccagaaagaagctggatcagatgcggagtcagtttcaagagatacaggaccagctgacagcaacaataaggtgtaccaaggaaatggaaggcgacactcagaaattggaagtcgagcacgtgatgatgcgaaaaatcataaagaagcaggatgatcaaattgaacgcctggaaaaaattcttcagcactcctctctaatgctgcaggttttcgaatcttag

SEQ ID NO: 62659 - DNA, 3627 bp, Artificial Sequence
  derived and/or modified sequence
atgggcgggggaaagagtggcaccgtatcctcacagaaacagcccgcctctaaggcaacaagcgacaaaacagactctgcgttgaacattgcgaccgagatcaaagatgggctccagtgcgggaccgtttcttcacaaaagcagcctgccctgaaggctactacagacgaagaggacagtgtgtcgaatatagctaccgagattaaagacggggagaaaagcggaaccgtgagttctcaaaaacaacccgccctcaaagcaacaactgatgaagaggacagcgtgtctaacatcgcaacagagataaaggatggtgagaagagcggcaccgtttcatctcagaaacagcccgctctcaaagcgaccacggacgagaaggactctgtgtcgaatattgctactgagataaaggatggcgagaagagcgggaccgtgtctagccagaagccccctgcactcaccgctacaagcgacgaggaaggttccgtactgagcatcgcacgcgagaataaagacggcgaaaaatctaggactgtttcttcacgaaagaaaccagctctgaaggccacttccgacgaaaaggattcatttagtaacataacaaggggcaagaaagacggcgagatcagcagaaaagtgagtagccaaaagcccccaactcttaaggggacgtccgacgaggaggacagcgtcttaggaatcgcacgggagaacaaggacggtgagaaatcccgtacagtctctagcgaaaaaccgccaggcctaaaagcttcaagtgctgagaaggactctgtgctcaacatcgcaagaggaaaaaaggacggcgagaagacaaagcgagtcagctcccggaagaaaccatctctggaagccacgtccgatgagaaggattccttcagtaacattacacgggaaaagaaagacggagaaatatcccgcaaggtgtcctcacaaaaaccaccggctcttaagggaacgtccgacgaagaggattctgttctcggaattgcgagggagaacaaagatggggagaagtctcgtaccgtctcttccgaaaaaccccctggcctgaaagccacttccgatgagaaggatagtgtgcttaacatagctcgagggaagaaggatggggagaagacacgcacagtcagttcacccaagcagcccgccctcaaggccatttgcgacaaagaagattctgtacctaatatggccactgagaaaaaagatgaacagatttcaggtaccgtctcgtgccaaaagcagcccgctctgaaggccacatctgataagaaggatagcgtttcaaacatccctactgaaatcaaggacggtcagcagagtggcacagtgagctcccaaaaacagcccgcttggaaggccacctcggtgaagaaagacagcgtatcaaacatcgccactgagatcaaggatggccagatccgggggaccgtgtcaccccaggtgcccatcccgcggcacaaggtgggaaacatcaagtcataccctaacacaggtcgccgaatccagttagatgccaacaccttcagcgtgagtcctcagaagcagtccgctcagaaagtgatctttaagaagaaagtgagcttacttaatattgcaactcgcatcaccgggggctggaagtctggtacagaataccctgagaacctacccactttgaaagctacgattgaaaacaaaaacagcgtgctgaacacagccacaaagatgaaagatgttcagaccagcactccagccgaacaggatctggagatggcaagcgaaggagagcagaagagactggaggaatacgagaacaaccaaccacaagtgaagaatcagattcactcacgggacgacctcgatgacatcatacagtcttctcagactgtgagcgaagacggggatagcctgtgttgcaactgtaaaaatgttattcttttaatcgatcagcacgaaatgaagtgcaaggactgcgtgcatctgctaaaaataaagaatactttttgcctgtggaagcggttgatcaagttaaaggacaaccactgcgaacagctgcgggtgaaaatcagaaaactcaaaaacaaagcgagtgtgttgcagaagcggatttctgaaaaagaggaaatcaagtcgcagctgaaacacgagatcctggaactcgagaaggaactgtgcagccttaggtttgctatccagcaggagaagaagaagaggcgcaacgtcgaagaggtgcatcaaaaggtgcgcgagaaactgagaatcacagaggagcagtatagaattgaggcagacgtaacgaagcccatcaagcccgccctcaagtccgcagaagtggaactgaaaaccggcgggaacaattcgaatcaggtgagcgagacagatgaaaaagaagatcttctccacgaaaaccggctgatgcaggacgagattgccaggttgcgtctggaaaaagatacgattaagaatcagaacttggaaaaaaagtacctgaaagactttgaaattgtcaagcggaagcacgaggacctacagaaagctttgaagagaaacggggaaacgctggcaaaaactattgcatgttactccggtcagctggctgcgctaactgacgagaataccactctgcggagcaaacttgagaagcaacgcgaatccagacagagactagaaaccgaaatgcagagctatcattgccgactcaatgcggcaaggtgcgaccacgatcagtcacacagctcaaagagggaccaggagctcgctttccagggcaccgtcgataaatgtcggcatctgcaagagaacttgaatagccacgtgcttatactgagcctccagctgtccaaggccgagagtaagtcgcgcgtcctgaagactgagttacactacacaggggaagctctgaaggaaaaggctctggtattcgagcacgtccagagcgagctgaaacagaaacagtcgcagatgaaagacatcgagaagatgtacaagtccggttacaacactatggagaagtgcattgaaaagcaagaaagattttgtcagcttaaaaaacaaaacatgctgttgcaacagcagctcgatgacgccagaaacaaagccgataaccaggagaaggcaattttgaatatacaagctagatgtgatgcccgtgtccagaatctgcaggcagaatgtcgaaaacatcgattgttactggaagaggacaacaaaatgctggtcaacgagctgaaccatagcaaggagaaggagtgccagtatgagaaagagaaagctgagagagaggtcgcagttcggcagctccaacagaagagagatgatgtcctgaataaggggtccgccacgaaggcacttttggacgcctcctcccgacattgtacatacctggaaaacggaatgcaggattctaggaaaaaacttgaccagatgcgctctcagttccaggagatccaggatcagcttactgctaccatcaggtgcacaaaagagatggaaggcgacacacaaaagctcgaggtagaacatgtcatgatgagaaaaattataaagaagcaagacgatcagatcgagcgcctggaaaagatcctgcaacactccagcctgctcctgctgaatttcgagacctag

SEQ ID NO: 62660 - DNA, 5826 bp, Artificial Sequence
  derived and/or modified sequence
atggaggatggcaagcgggagcgctggcccaccctgatggagcggctgtgcagtgatggctttgccttcccccagtaccccatcaagccctaccacctgaagaggatccacagagctgtgctgcacggcaacctggagaagctgaagtacctgctgctgacctactatgatgccaacaagagggacaggaaggagaggacagccctgcacctggcctgtgccaccggccagcctgagatggtgcacctgctggtgtccagaagatgtgagctgaacctgtgtgaccgggaggacaggacccccctcatcaaggctgtgcagctgcggcaggaggcctgtgccaccctgctgctgcagaatggagccaaccccaacatcacagacttcttcggccgcacagccctgcactatgctgtgtacaatgaagacacctccatgattgagaagctgctgagccacggcaccaacattgaagaatgttccaaatgtgagtaccagcccctgctgtttgctgtgtccaggaggaaggtgaagatggtggagttcctgctgaagaagaaggccaacgtgaatgccatcgactacctgggccgcagcgccctgattcatgctgtgaccctgggggagaaggacatcgtcatcctgctgctgcagcacaacattgatgtgctgagcagagatgccttcaggaagattgctggggactatgccatcgaggccaagaacagagtcatctttgacctgatctatgaatatgaaaggaagagatatgaggacctgcccatcaacagcaaccctgtgagcagccagaagcagcctgccctgaaggccaccagcggcaaggaggacagcatcagcaacatcgccacagagatcaaggatggccagaagagcggcaccgtgagcagccagaagcagcctgccctgaaggacaccagtgacaaggatgacagcgtgagcaacacagccacagagatcaaggatgagcagaagagcggcaccgtgctgcctgctgtggagcagtgcctgaacagaagcctgtacagaccagatgctgtggcccagcctgtgacagaaaatgagttcagcctggagagcgagatcatcagcaagctgtacatccccaagaggaagatcatcagccccaggagcatcaaggatgtgctgccccctgtggaggaggccgtggaccgctgcctgtacctgctggacagatttgcccagcctgtgaccaaggacaagtttgccctggagagcgagaacatcagcgagccctacttcaccaacagaaggaccatcagccagcagagcgctgagaacctggatgctgcctgtggcatcgacaagacagaaaatggaaacatgtttgaggaccagaatgtggacaaggagggcaaggccctgcctgccaccggccagaaggccaacgtgtccccagagcagcccccactcttcacccacacagtgaaggaccgggaccacatcagcacccgcttcctgggcggcatggacagcctgaccagcagcgaggagagcagcgagcggccccccctgagcaccctgaccctgaaggaggccgaccccagcagcaaggccgccatgaggaggaaggacagccccccacctgggaaggtgagcagccagaagcagcctgctgagaaggccaccagtgatgacaaggacagcgtgagcaacatcgccacagagatcaaggagggccccatcagcggcaccgtgagcagccagaagcagcctgctgagaaggccaccagtgatgagaaggacagcgtgagcaacatcgccacagagatcaagaagggccagcagagcggcaccgtgagcccccagaagcagagcgcctggaaggtgatcttcaagaagaaggtgtccctgctgaacatcgccacccgcatcatgggcggcggcaagagcggcaccgtgagcagccagaagcagcctgccagcaaggccaccagtgacaagacagacagcgccctgaacatcgccacagagatcaaggatggcctgcagtgtggcaccgtgagcagccagaagcagcctgccctgaaggccaccacagatgaggaggacagcgtgagcaacatcgccacagagatcaaggatggagagaagagcggcaccgtgagcagccagaagcagcctgccctgaaggccaccacagatgaggaggacagcgtgagcaacatcgccacagagatcaaggatggagagaagagcggcaccgtgagcagccagaagcagcctgccctgaaggccaccacagatgagaaggacagcgtgagcaacatcgccacagagatcaaggatggagagaagagcggcaccgtgagcagccagaagcccccagccctgacagccaccagtgatgaggagggctctgtgctgagcatcgcccgggagaacaaggatggagagaagagcaggacagtgagcagcaggaagaagccagccctgaaggccaccagtgatgagaaggacagcttcagcaacatcacccggggcaagaaggatggagagatcagcaggaaggtgagcagccagaagccacccaccctgaagggcaccagtgatgaggaggacagcgtgctgggcatcgcccgggagaacaaggatggagagaagagcaggacagtgtcctctgagaagcccccaggcctgaaggccagcagcgctgagaaggacagcgtgctgaacatcgcccggggcaagaaggatggagagaagaccaagagggtgagcagcaggaagaagcccagcctggaggccaccagtgatgagaaggacagcttcagcaacatcacccgggagaagaaggatggagagatcagcaggaaggtgagcagccagaagcccccagccctgaagggcaccagtgatgaggaggacagcgtgctgggcatcgcccgggagaacaaggatggagagaagagcaggacagtgtcctctgagaagcccccaggcctgaaggccaccagtgatgagaaggacagcgtgctgaacatcgcccggggcaagaaggatggagagaagaccaggacagtgagcagccagaagccacccaccctgaaggccaccagtgatgaggaggacagcgtgctgagcatcgcccgggagaacaaggatggagagaagagcaggacagtgtcctctgagaagcccagcggcctgaaggccaccagcgctgagaaggacagcgtgctgaacatcgcccggggcaagaagtacggggagaagaccaagagggtgagcagcaggaagaagccagccctgaaggccaccagtgatgagaaggacagcgtgctgtacatcgcccgggagaagaaggatggagagaagagcaggacagtgagcagccccaagcagcctgccctgaaggccatctgtgacaaggaggacagcgtgcccaacatggccacagagaagaaggatgagcagatcagcggcaccgtgtcctgccagaagcagcctgccctgaaggccaccagtgacaagaaggacagcgtgagcaacatccccacagagatcaaggatggccagcagagcggcaccgtgagcagccagaagcagcctgcctggaaggccacctctgtgaagaaggacagcgtgagcaacatcgccacagagatcaaggatggccagatccggggcaccggcatcctggagtacaccttcaacgtgatgtttgaccagatcgaggagaagttcaccagcctgaacaagtctgctggggtgagcccccagaagcagagcgcccagaaggtgatcttcaagaagaaggtgtccctgctgaacatcgccacccgcatcactggaggctggaagagcggcacagagtacccagagaacctgcccaccctgaaggccaccatcgagaacaagaacagcgtgctgaacacagccaccaagatgaaggatgtgcagaccagcaccccagctgagcaggacctggagatggccagcgagggggagcagaagaggctggaggagtatgagaacaaccagccccaggtgaagaaccagatccacagcagagatgacctggatgacatcatccagagcagccagacagtgtctgaagatggagacagcctgtgctgcaactgcaagaatgtcatcctgctgattgaccagcacgagatgaagtgcaaggactgtgtgcacctgctgaagatcaagaacaccttctgcctgtggaagaggctcatcaagctgaaggacaaccactgtgagcagctgcgggtgaagatcaggaagctgaagaacaaggcctctgtgctgcagaagaggatcagcgagaaggaggagatcaagagccagctgaagcatgagatcctggagctggagaaggagctgtgcagcctgcgctttgccatccagcaggagaagaagaagagaagaaatgtggaggaggtgcaccagaaggtgcgggagaagctgcgcatcacagaggagcagtacagaattgaagcagatgtgaccaagcccatcaagccagccctgaagtctgctgaggtggagctgaagacaggaggcaacaacagcaaccaggtgtctgaaacagatgagaaggaggacctgctgcacgagaaccggctgatgcaggatgagatcgcccggctgcggctggagaaggacaccatcaagaaccagaacctggagaagaagtacctgaaggactttgaaattgtgaagaggaagcatgaggacctgcagaaggccctgaagagaaatggagagaccctggccaagaccatcgcctgctacagcggccagctggccgccctgacagatgagaacaccaccctgcggagcaagctggagaagcagcgggagagccggcagaggctggagacagagatgcagagctaccactgccgcctgaatgctgcccgctgtgaccatgaccagagccacagcagcaagagggaccaggagctggccttccagggcaccgtggacaagtgccgccacctgcaggagaacctgaacagccacgtgctgatcctgagcctgcagctgagcaaggccgagagcaagagccgggtgctgaagacagagctgcactacacaggagaggccctgaaggagaaggccctggtgtttgagcacgtgcagagcgagctgaagcagaagcagagccagatgaaggacatcgagaagatgtacaagagcggctacaacaccatggagaagtgcatcgagaagcaggagcgcttctgccagctgaagaagcagaacatgctgctgcagcagcagctggatgatgccaggaacaaggctgacaaccaggagaaggccatcctgaacatccaggcccgctgtgatgcccgggtgcagaacctgcaggctgaatgtaggaagcaccggctgctgctggaggaggacaacaagatgctggtgaatgagctgaaccacagcaaggagaaggagtgccagtatgagaaggagaaggccgagcgggaggtggccgtgcggcagctgcagcagaagagagatgatgtgctgaacaagggcagcgccaccaaggccctgctggatgccagcagccgccactgcacctacctggagaatggcatgcaggacagcaggaagaagctggaccagatgaggagccagttccaggagatccaggaccagctgacagccaccatccgctgcaccaaggagatggagggggacacccagaagctggaggtggagcacgtgatgatgaggaagatcatcaagaagcaggatgaccagatcgagcggctggagaagatcctgcagcacagcagcctgatgctgcaggtgtttgagagctag

SEQ ID NO: 62661 - DNA, 3627 bp, Artificial Sequence
  derived and/or modified sequence
atgggcggcggcaagagcggcaccgtgagcagccagaagcagcctgccagcaaggccaccagtgacaagacagacagcgccctgaacatcgccacagagatcaaggatggcctgcagtgtggcaccgtgagcagccagaagcagcctgccctgaaggccaccacagatgaggaggacagcgtgagcaacatcgccacagagatcaaggatggagagaagagcggcaccgtgagcagccagaagcagcctgccctgaaggccaccacagatgaggaggacagcgtgagcaacatcgccacagagatcaaggatggagagaagagcggcaccgtgagcagccagaagcagcctgccctgaaggccaccacagatgagaaggacagcgtgagcaacatcgccacagagatcaaggatggagagaagagcggcaccgtgagcagccagaagcccccagccctgacagccaccagtgatgaggagggctctgtgctgagcatcgcccgggagaacaaggatggagagaagagcaggacagtgagcagcaggaagaagccagccctgaaggccaccagtgatgagaaggacagcttcagcaacatcacccggggcaagaaggatggagagatcagcaggaaggtgagcagccagaagccacccaccctgaagggcaccagtgatgaggaggacagcgtgctgggcatcgcccgggagaacaaggatggagagaagagcaggacagtgtcctctgagaagcccccaggcctgaaggccagcagcgctgagaaggacagcgtgctgaacatcgcccggggcaagaaggatggagagaagaccaagagggtgagcagcaggaagaagcccagcctggaggccaccagtgatgagaaggacagcttcagcaacatcacccgggagaagaaggatggagagatcagcaggaaggtgagcagccagaagcccccagccctgaagggcaccagtgatgaggaggacagcgtgctgggcatcgcccgggagaacaaggatggagagaagagcaggacagtgtcctctgagaagcccccaggcctgaaggccaccagtgatgagaaggacagcgtgctgaacatcgcccggggcaagaaggatggagagaagaccaggacagtgagcagccccaagcagcctgccctgaaggccatctgtgacaaggaggacagcgtgcccaacatggccacagagaagaaggatgagcagatcagcggcaccgtgtcctgccagaagcagcctgccctgaaggccaccagtgacaagaaggacagcgtgagcaacatccccacagagatcaaggatggccagcagagcggcaccgtgagcagccagaagcagcctgcctggaaggccacctctgtgaagaaggacagcgtgagcaacatcgccacagagatcaaggatggccagatccggggcaccgtgagcccccaggtgcccatccccaggcacaaggtgggcaacatcaagagctaccccaacacaggaagacgcatccagctggatgccaacaccttctctgtgagcccccagaagcagagcgcccagaaggtgatcttcaagaagaaggtgtccctgctgaacatcgccacccgcatcaccggcggctggaagtctggaacagagtacccagagaacctgcccaccctgaaggccaccatcgagaacaagaacagcgtgctgaacacagccaccaagatgaaggatgtgcagaccagcaccccagctgagcaggacctggagatggccagcgagggggagcagaagaggctggaggagtatgagaacaaccagccccaggtgaagaaccagatccacagcagagatgacctggatgacatcatccagagcagccagacagtgtctgaagatggagacagcctgtgctgcaactgcaagaatgtcatcctgctgattgaccagcacgagatgaagtgcaaggactgtgtgcacctgctgaagatcaagaacaccttctgcctgtggaagaggctcatcaagctgaaggacaaccactgtgagcagctgcgggtgaagatcaggaagctgaagaacaaggcctctgtgctgcagaagaggatcagcgagaaggaggagatcaagagccagctgaagcatgagatcctggagctggagaaggagctgtgcagcctgcgctttgccatccagcaggagaagaagaagagaagaaatgtggaggaggtgcaccagaaggtgcgggagaagctgcgcatcacagaggagcagtaccgcatcgaggctgatgtgaccaagcccatcaagccagccctgaagtctgctgaggtggagctgaagacaggaggcaacaacagcaaccaggtgtctgaaacagatgagaaggaggacctgctgcatgaaaatcggctgatgcaggatgaaattgcccggctgcggctggagaaggacaccatcaagaaccagaacctggagaagaagtacctgaaggactttgagatcgtgaagaggaagcatgaggacctgcagaaggccctgaagagaaatggagagaccctggccaagaccatcgcctgctacagcggccagctggccgccctgacagatgagaacaccaccctgcggagcaagctggagaagcagcgggagagccggcagaggctggagacagagatgcagagctaccactgccgcctgaatgctgcccgctgtgaccatgaccagagccacagcagcaagagggaccaggagctggccttccagggcaccgtggacaagtgccgccacctgcaggagaacctgaacagccacgtgctgatcctgagcctgcagctgagcaaggccgagagcaagagccgggtgctgaagacagagctgcactacaccggggaggccctgaaggagaaggccctggtgtttgaacatgtgcagagcgagctgaagcagaagcagagccagatgaaggacatcgagaagatgtacaagagcggctacaacaccatggagaagtgcatcgagaagcaggagcgcttctgccagctgaagaagcagaacatgctgctgcagcagcagctggatgatgccaggaacaaggctgacaaccaggagaaggccatcctgaacatccaggcccgctgtgatgcccgggtgcagaacctgcaggccgagtgcaggaagcaccggctgctgctggaggaggacaacaagatgctggtgaatgagctgaaccacagcaaggagaaggagtgccagtatgagaaggagaaggccgagcgggaggtggccgtgcggcagctgcagcagaagagagatgatgtgctgaacaagggcagcgccaccaaggccctgctggatgccagcagccgccactgcacctacctggagaatggcatgcaggacagcaggaagaagctggaccagatgaggagccagttccaggagatccaggaccagctgacagccaccatccgctgcaccaaggagatggagggggacacccagaagctggaggtggagcacgtgatgatgaggaagatcatcaagaagcaggatgaccagatcgagcggctggagaagatcctgcagcacagcagcctgctgctgctgaactttgagacctag

SEQ ID NO: 62662 - DNA, 2899 bp, Artificial Sequence
  derived and/or modified sequence
ggctaaggtgcgcgtgctcgctggttctaacccttctgttgggcgtttctgctgagaggcgggaggcgctgagagtctgtgcggaggtccgtggacagactgctttgctcgttgttgctcttcggaggcggcgatccccgaaggcgagctgaaatacggctgcaggctacaatttgcagccgacgattatggaagacggcaagcgggagaggtggcccaccctcatggagcgcttgtgctcggatggcttcgcatttccccaataccccattaaaccgtatcatctgaagaggatccacagagctgtcttacatggtaatctagagaaactgaagtaccttctgctcacgtattatgacgccaataagagagacaggaaggaaaggaccgccctacatttggcctgtgccactggccaaccggaaatggtacatctcctggtgtccagaagatgtgagcttaacctctgcgaccgtgaagacaggacacctctgatcaaggctgtacaactgaggcaggaggcttgtgcaactcttctgctgcaaaatggcgccaatccaaatattacggatttctttggaaggactgctctgcactacgctgtgtataatgaagatacatccatgatagaaaaacttctttcacatggtacaaatattgaagaatgcagcaagtgtgaatatcagccactgttatttgctgtgagtcgaagaaaagtgaaaatggtggaatttttattaaagaaaaaagcaaatgtaaatgccattgattatcttggcagatcagccctcatacatgctgttactcttggagaaaaagatatagtcattcttcttctgcagcacaatattgatgtgctttctcgagatgcgtttcgaaagattgcaggagattatgccattgaggctaagaatagagtcatttttgatctaatttatgaatacgaaagaaagagatatgaagatcttcctataaatagcaatccagtgtcttctcagaaacaaccagccttgaaggctacaagtggcaaggaagattctatttcaaatatagccacagaaataaaggatggacaaaaatctgggacagtgtcttctcagaaacaaccggccttgaaggatacaagtgacaaggatgattctgtttcgaacacagccacagaaataaaagatgaacaaaaatctgggacagtgcttcctgctgttgaacagtgtttaaacaggagtctctacagacctgatgctgttgcacagcctgtgacagagaatgagttttctttggaatctgagattatttcaaaactatacatcccaaagagaaagattatttctccacgatctataaaagatgtgcttcctcctgttgaagaggctgttgacaggtgtctctacctactggaccgttttgcacagcctgtgacaaaggataagtttgctttggaatctgagaatatttcagaaccatactttacgaacagaaggactatttctcaacaatctgcagaaaatttagatgctgcatgtggcattgacaaaacagaaaatggaaacatgtttgaagaccaaaatgttgataaggaaggaaaagcactaccagcaactggacaaaaagcaaatgtgtctcctgagcaaccgcctttattcacgaatcttctgagcgacctcctttatccacgcttactctgaaagaggcagatcccagttcaaaagcagccatgagaaggaaggattcaccacctccaggaaaagtgtcttctcagaaacaaccagctgagaaggctacaagtgacgacaaagattctgtttcaaatatagccacagaaataaaggagggaccaatatctgggacagtgtcttctcagaaacaaccagctgagaaggctacaagtgacgagaaagattctgtttcaaatatagccacagaaataaagaagggacaacaatctgggacagtgtctcctcagaaacaatcggcctggaaggttatatttaaaaagaaagtttctcttttgaatattgccacaagaataatgggtggtgggaaatctggaacagtgtcttctcagaaacaaccagcctcaaaggctacaagtgacaagacagattctgctttgaatatagctacagaaataaaggatggactacagtgtgggacagtgtcttctcagaaacaaccagccttgaaggctacaactgacgaggaagactctgtttcgaatatagccacagaaataaaggatggagaaaaatctgggacagtgtcttctcagaaacaaccagccttgaaggctacaactgatgagaaagattctgtttcgaacatagccacagaaataaaggatggagaaaaatctgggacagtgtcttctcagaaaccaccagccttgacggctacaagtgacgaggaaggttctgttttgagtatagccagagaaaacaaggatggagaaaaatctaggacagtgtcttctcggaaaaaaccagccttgaaggctacaagtgatgagaaggattctttttcgaatataaccagaggaaaaaaggatggagaaatatctaggaaagtgtcttctcagaaaccaccaaccttgaagtgtcttctgagaaaccaccaggcttgaagtgtcttctcggaaaaaaccatccttggaggccacaagtgatgagaaggattctttttcgaatataaccagagaaaaaaaggatggagaaatatctaggaaagtgtcttctcagaaaccaccagccttgaagggtacaagtgacgaggaagattctgttttgggtatagccagagaaaacaaggatggagaaaaatctaggacagtgtcttctgagaaaccaccaggcttgaaggctacaagtgatgagaaagattctgttttgaatatagccagagg

SEQ ID NO: 62663 - DNA, 2141 bp, Artificial Sequence
  derived and/or modified sequence
aaatatgttgcttcaacagcaactggatgatgctcgcaacaaagctgacaatcaagaaaaagcaatacttaatattcaagccagatgtgatgctagagtacaaaaccttcaagctgagtgcagaaagcaccgtcttttactagaagaagacaataaaatgttggtcaatgaactgaatcattcgaaagaaaaagaatgccaatatgaaaaagagaaagcagaaagagaagtagctgtgagacagcttcaacaaaaacgagatgatgtcttaaacaaaggatcagcaacaaaagctctgctggatgcttcatcgcgtcactgcacctatttagaaaatgggatgcaggattcaaggaagaaattagaccagatgagaagtcaagcttgaagtagaacatgtgatgatgagaaaaattattaaaaaacaggatgaccaaattgagcggcttgagaaaatcctgcagcattcaagtttgatgctgcaggtgtttgagagctagatgaagcatccagccaaactagactacatggagctccacagtgatcgtcttcacctccagctgtttgcatttacttcttccctctatcctacatgtgttttccttccccttcagatatcaacctatgaattgcctctaccaaaaagcctacaatattgacacaaacctgggctagtatcccttctatgtcttccaataagtgctgtcttatgcttgtcattgtatgtatgactctgtatgggaattgcctgtttgttttttcagattatagcatacagttgttgaggggcggaccgtatcatctttatcttgtaattccagtgcttgtcctagtaccttagcacatggttgctgaatacatgaacgaagagtgagaaaccagaagctctgatacttaactgccatgataatgaattcggtgtgcaactatgggcaaattatatttaatagtaattgcatattgtacatatttttcattcttattaacactgataagcttttcagcatatactgactttctcttagttaactgtgaaatcatttagataaagaatataattctttttcattctaacttctgaatttaaatctgaatcctctatagcaggggtccccaactcccaggccacacacagttccatgacctgttaggaagcaggctgcacagcaggaggtgagtggcaggcaagcgagtgaagcttcatctgtatttccagccactccctgttgctcacattatcacctgagctctgcctcctgtcagatcagcaaagccattagattctcacaggagtgaaaatcctactgtgaactgctcgttcaagggatctaggtcacatgctccttatgagactctaatgcctgatgatatgtcattgtctcctatctcttcacgatgggaccatctagttacagaaaaacaagctcaggactcccattgattctccattatgatgagttgtgtaattatttcattatgtattacaatgtagtcataataggaataaagtgcacaatagatgtaatacgcttgaatcaccatcctgaaaccatcccccaaacccccatctgtggaaaaattatctttcacaaaactgctgcctggtgccaaaaaggctggggactgctgctctatagcttctgcactagaatctactaatgagtaaaatttaaatcaataactagttttaaaagcataacaagaatatgtgctgtctggctgcagtggctcatgcctgtattctcagcactttgggaggccagtgcaggtggatcacttgaggtcaggagttcaagaccagcctggccaatatggtgaaatcctgtctctactaaaaatacaaaaattagctgggtgtggtggtgcatgcctgtagtctcagctactcgggaggctgaggtgggagaatcacttgaacccgggaggcagaggtttcagtgagccaagatcgtgccactgcactccagcctgagcaacagagtgactccatctcaaatgcaaaacaaaacagaaagaatacatgctgacgaaaaaaatctaagacaataaaattgtattactaggctgttaacatgatattttgtttcccgttaaatgtgtgacatgcaaaagtatttattaaatgaaaatattttttatct

SEQ ID NO: 62664 - DNA, 6269 bp, Artificial Sequence
  derived and/or modified sequence
gggcgcgcgagagctgctagggcggtttctctgcctcgggcctgttgggcagggccggctaaggtgcgcgtgctcgctggttctaacccttctgttgggcgtttctgctgagaggcgggaggcgctgagagtctgtgcggaggtccgtggacagactgctttgctcgttgttgctcttcggaggcggcgatccccgaaggcgagctgaaatacggctgcaggctacaatttgcagccgacgattatggaagacggcaagcgggagaggtggcccaccctcatggagcgcttgtgctcggatggcttcgcatttccccaataccccattaaaccgtatcatctgaagaggatccacagagctgtcttacatggtaatctagagaaactgaagtaccttctgctcacgtattatgacgccaataagagagacaggaaggaaaggaccgccctacatttggcctgtgccactggccaaccggaaatggtacatctcctggtgtccagaagatgtgagcttaacctctgcgaccgtgaagacaggacacctctgatcaaggctgtacaactgaggcaggaggcttgtgcaactcttctgctgcaaaatggcgccaatccaaatattacggatttctttggaaggactgctctgcactacgctgtgtataatgaagatacatccatgatagaaaaacttctttcacatggtacaaatattgaagaatgcagcaagtgtgaatatcagccactgttatttgctgtgagtcgaagaaaagtgaaaatggtggaatttttattaaagaaaaaagcaaatgtaaatgccattgattatcttggcagatcagccctcatacatgctgttactcttggagaaaaagatatagtcattcttcttctgcagcacaatattgatgtgctttctcgagatgcgtttcgaaagattgcaggagattatgccattgaggctaagaatagagtcatttttgatctaatttatgaatacgaaagaaagagatatgaagatcttcctataaatagcaatccagtgtcttctcagaaacaaccagccttgaaggctacaagtggcaaggaagattctatttcaaatatagccacagaaataaaggatggacaaaaatctgggacagtgtcttctcagaaacaaccggccttgaaggatacaagtgacaaggatgattctgtttcgaacacagccacagaaataaaagatgaacaaaaatctgggacagtgcttcctgctgttgaacagtgtttaaacaggagtctctacagacctgatgctgttgcacagcctgtgacagagaatgagttttctttggaatctgagattatttcaaaactatacatcccaaagagaaagattatttctccacgatctataaaagatgtgcttcctcctgttgaagaggctgttgacaggtgtctctacctactggaccgttttgcacagcctgtgacaaaggataagtttgctttggaatctgagaatatttcagaaccatactttacgaacagaaggactatttctcaacaatctgcagaaaatttagatgctgcatgtggcattgacaaaacagaaaatggaaacatgtttgaagaccaaaatgttgataaggaaggaaaagcactaccagcaactggacaaaaagcaaatgtgtctcctgagcaaccgcctttattcacgcatacggtgaaagacagagatcacatttcaactagattcttaggaggtatggattcactaacttccagtgaagaatcttctgagcgacctcctttatccacgcttactctgaaagaggcagatcccagttcaaaagcagccatgagaaggaaggattcaccacctccaggaaaagtgtcttctcagaaacaaccagctgagaaggctacaagtgacgacaaagattctgtttcaaatatagccacagaaataaaggagggaccaatatctgggacagtgtcttctcagaaacaaccagctgagaaggctacaagtgacgagaaagattctgtttcaaatatagccacagaaataaagaagggacaacaatctgggacagtgtctcctcagaaacaatcggcctggaaggttatatttaaaaagaaagtttctcttttgaatattgccacaagaataatgggtggtgggaaatctggaacagtgtcttctcagaaacaaccagcctcaaaggctacaagtgacaagacagattctgctttgaatatagctacagaaataaaggatggactacagtgtgggacagtgtcttctcagaaacaaccagccttgaaggctacaactgacgaggaagactctgtttcgaatatagccacagaaataaaggatggagaaaaatctgggacagtgtcttctcagaagcaaccagccttgaaggctacaactgacgaggaagattctgtttcgaatatagccacagaaataaaggatggagaaaaatctgggacagtgtcttctcagaaacaaccagccttgaaggctacaactgatgagaaagattctgtttcgaacatagccacagaaataaaggatggagaaaaatctgggacagtgtcttctcagaaaccaccagccttgacggctacaagtgacgaggaaggttctgttttgagtatagccagagaaaacaaggatggagaaaaatctaggacagtgtcttctcggaaaaaaccagccttgaaggctacaagtgatgagaaggattctttttcgaatataaccagaggaaaaaaggatggagaaatatctaggaaagtgtcttctcagaaaccaccaaccttgaagggtacaagtgacgaggaagattctgttttgggtatagccagagaaaacaaggatggagaaaaatctaggacagtgtcttctgagaaaccaccaggcttgaaggcttcaagtgccgagaaagattctgttttgaatatagccagaggaaaaaaggatggagaaaaaactaagagagtgtcttctcggaaaaaaccatccttggaggccacaagtgatgagaaggattctttttcgaatataaccagagaaaaaaaggatggagaaatatctaggaaagtgtcttctcagaaaccaccagccttgaagggtacaagtgacgaggaagattctgttttgggtatagccagagaaaacaaggatggagaaaaatctaggacagtgtcttctgagaaaccaccaggcttgaaggctacaagtgatgagaaagattctgttttgaatatagccagaggaaaaaaggatggagaaaaaactaggacagtgtcttctcagaaaccaccaaccttgaaggctacaagtgatgaggaagattctgttttgagtatagccagagaaaacaaggatggagaaaaatctaggacagtgtcttctgagaaaccatcaggcttgaaggctacaagtgccgagaaagattctgttttgaatatagccagaggaaaaaagtatggagaaaaaactaagagagtgtcttctcggaaaaaaccagccttgaaggctacaagtgacgagaaagattctgttttgtatatagccagagaaaaaaaggatggagaaaaatctaggacagtgtcttctccgaaacaaccagcattgaaggctatctgtgacaaggaagattctgttccgaatatggccacggaaaaaaaggatgaacaaatatctgggacagtgtcttgtcagaaacaaccagccttgaaggctacaagtgacaagaaagattctgtttcgaatatacccacagaaataaaggatggacaacaatctggaacagtgtcttctcagaaacaaccggcctggaaggctacaagtgtcaagaaagattctgtttcgaatatagccacagaaataaaggatggacaaatacgtgggacaggtattttggaatacacctttaatgtaatgttcgatcaaatagaagagaaattcacttccctaaataaatcagcgggggtgtctcctcagaaacaatcggcccagaaggttatatttaaaaagaaagtttctcttttgaatattgccacaagaataacaggcggttggaaatctggaacagagtatcctgagaatctgcccaccttgaaggctacaattgaaaataaaaattctgttctgaatacagccaccaaaatgaaggatgtacaaacatccacaccagcagaacaagacttagaaatggcatcagagggagagcaaaagaggcttgaagaatatgaaaataaccagccacaggtgaaaaaccaaatacattctagggatgaccttgatgacataattcagtcatctcaaacagtctcagaggacggtgactcgctttgctgtaattgtaagaatgtcatattactcattgatcaacatgaaatgaagtgtaaagattgtgttcacctattgaaaattaaaaatacattttgtttatggaaaagattaataaaacttaaagataaccactgtgagcaacttagagtaaaaattcgaaaactgaaaaataaggctagtgtactacaaaagagaatatctgaaaaagaagaaataaaatcgcagttaaagcatgaaatacttgaattggaaaaagaactctgtagtttgagatttgccatacagcaagaaaaaaagaaaagaagaaatgttgaagaggtgcaccaaaaagttagggaaaagttaagaataacagaagagcaatataggatagaagctgatgtgacaaaaccaattaaaccggctctcaaatcagcagaggtggaattgaagacaggaggaaataattcaaatcaggtttctgaaactgatgaaaaagaagacctgctgcatgaaaaccgcttgatgcaagatgaaattgccaggctcaggctggaaaaagacacaataaaaaaccaaaacctggaaaagaaatacttaaaagactttgaaattgtgaaaagaaagcatgaagaccttcaaaaggctctaaaacggaatggggaaacattagcaaaaacgatagcctgttatagtggacagcttgctgctctgacagatgaaaacacaacgctccgttccaaactggagaagcaaagagagagcaggcaaagactggaaacagaaatgcaatcataccattgtagactgaatgctgctcgatgtgatcatgatcaaagtcactcatcaaaaagagaccaagagcttgctttccagggcacagtagataaatgtcgtcacttacaggaaaatttgaattctcatgttctgattctttctctgcaactttctaaagctgagagtaagtccagagtcctcaaaactgagctccattacacaggagaggctctgaaagaaaaggctttggtttttgaacacgtgcaaagtgagctaaagcaaaaacagagtcaaatgaaggacattgaaaaaatgtacaaaagtggatacaatacaatggaaaaatgcatagaaaaacaggaaagattttgtcaactaaaaaaacaaaatatgttgcttcaacagcaactggatgatgctcgcaacaaagctgacaatcaagaaaaagcaatacttaatattcaagccagatgtgatgctagagtacaaaaccttcaagctgagtgcagaaagcaccgtcttttactagaagaagacaataaaatgttggtcaatgaactgaatcattcgaaagaaaaagaatgccaatatgaaaaagagaaagcagaaagagaagtagctgtgagacagcttcaacaaaaacgagatgatgtcttaaacaaaggatcagcaacaaaagctctgctggatgcttcatcgcgtcactgcacctatttagaaaatgggatgcaggattcaaggaagaaattagaccagatgagaagtcaatttcaagaaatacaggatcaacttacagctactataagatgtactaaggagatggaaggcgacacacaaaagcttgaagtagaacatgtgatgatgagaaaaattattaaaaaacaggatgaccaaattgagcggcttgagaaaatcctgcagcattcaagtttgatgctgcaggtgtttgagagctagatgaagatatggacatttctggaattaagagccccctctacattgagcacaagacagtgacgaatccacattcttcagccagaaagtcacctctgagagccaaatgtctgactatagaaaggagagtcaaagaatgataacgacatctcaggaaaattgtgaaaataatcagcagccggatgtggataaccctttcaaa

SEQ ID NO: 62665 - DNA, 6102 bp, Artificial Sequence
  derived and/or modified sequence
gggcgcgcgagagctgctagggcggtttctctgcctcgggcctgttgggcagggccggctaaggtgcgcgtgctcgctggttctaacccttctgttgggcgtttctgctgagaggcgggaggcgctgagagtctgtgcggaggtccgtggacagactgctttgctcgttgttgctcttcggaggcggcgatccccgaaggcgagctgaaatacggctgcaggctacaatttgcagccgacgattatggaagacggcaagcgggagaggtggcccaccctcatggagcgcttgtgctcggatggcttcgcatttccccaataccccattaaaccgtatcatctgaagaggatccacagagctgtcttacatggtaatctagagaaactgaagtaccttctgctcacgtattatgacgccaataagagagacaggaaggaaaggaccgccctacatttggcctgtgccactggccaaccggaaatggtacatctcctggtgtccagaagatgtgagcttaacctctgcgaccgtgaagacaggacacctctgatcaaggctgtacaactgaggcaggaggcttgtgcaactcttctgctgcaaaatggcgccaatccaaatattacggatttctttggaaggactgctctgcactacgctgtgtataatgaagatacatccatgatagaaaaacttctttcacatggtacaaatattgaagaatgcagcaagtgtgaatatcagccactgttatttgctgtgagtcgaagaaaagtgaaaatggtggaatttttattaaagaaaaaagcaaatgtaaatgccattgattatcttggcagatcagccctcatacatgctgttactcttggagaaaaagatatagtcattcttcttctgcagcacaatattgatgtgctttctcgagatgcgtttcgaaagattgcaggagattatgccattgaggctaagaatagagtcatttttgatctaatttatgaatacgaaagaaagagatatgaagatcttcctataaatagcaatccagtgtcttctcagaaacaaccagccttgaaggctacaagtggcaaggaagattctatttcaaatatagccacagaaataaaggatggacaaaaatctgggacagtgtcttctcagaaacaaccggccttgaaggatacaagtgacaaggatgattctgtttcgaacacagccacagaaataaaagatgaacaaaaatctgggacagtgcttcctgctgttgaacagtgtttaaacaggagtctctacagacctgatgctgttgcacagcctgtgacagagaatgagttttctttggaatctgagattatttcaaaactatacatcccaaagagaaagattatttctccacgatctataaaagatgtgcttcctcctgttgaagaggctgttgacaggtgtctctacctactggaccgttttgcacagcctgtgacaaaggataagtttgctttggaatctgagaatatttcagaaccatactttacgaacagaaggactatttctcaacaatctgcagaaaatttagatgctgcatgtggcattgacaaaacagaaaatggaaacatgtttgaagaccaaaatgttgataaggaaggaaaagcactaccagcaactggacaaaaagcaaatgtgtctcctgagcaaccgcctttattcacgcatacggtgaaagacagagatcacatttcaactagattcttaggaggtatggattcactaacttccagtgaagaatcttctgagcgacctcctttatccacgcttactctgaaagaggcagatcccagttcaaaagcagccatgagaaggaaggattcaccacctccaggaaaagtgtcttctcagaaacaaccagctgagaaggctacaagtgacgacaaagattctgtttcaaatatagccacagaaataaaggagggaccaatatctgggacagtgtcttctcagaaacaaccagctgagaaggctacaagtgacgagaaagattctgtttcaaatatagccacagaaataaagaagggacaacaatctgggacagtgtctcctcagaaacaatcggcctggaaggttatatttaaaaagaaagtttctcttttgaatattgccacaagaataatgggtggtgggaaatctggaacagtgtcttctcagaaacaaccagcctcaaaggctacaagtgacaagacagattctgctttgaatatagctacagaaataaaggatggactacagtgtgggacagtgtcttctcagaaacaaccagccttgaaggctacaactgacgaggaagactctgtttcgaatatagccacagaaataaaggatggagaaaaatctgggacagtgtcttctcagaagcaaccagccttgaaggctacaactgacgaggaagattctgtttcgaatatagccacagaaataaaggatggagaaaaatctgggacagtgtcttctcagaaacaaccagccttgaaggctacaactgatgagaaagattctgtttcgaacatagccacagaaataaaggatggagaaaaatctgggacagtgtcttctcagaaaccaccagccttgacggctacaagtgacgaggaaggttctgttttgagtatagccagagaaaacaaggatggagaaaaatctaggacagtgtcttctcggaaaaaaccagccttgaaggctacaagtgatgagaaggattctttttcgaatataaccagaggaaaaaaggatggagaaatatctaggaaagtgtcttctcagaaaccaccaaccttgaagggtacaagtgacgaggaagattctgttttgggtatagccagagaaaacaaggatggagaaaaatctaggacagtgtcttctgagaaaccaccaggcttgaaggcttcaagtgccgagaaagattctgttttgaatatagccagaggaaaaaaggatggagaaaaaactaagagagtgtcttctcggaaaaaaccatccttggaggccacaagtgatgagaaggattctttttcgaatataaccagagaaaaaaaggatggagaaatatctaggaaagtgtcttctcagaaaccaccagccttgaagggtacaagtgacgaggaagattctgttttgggtatagccagagaaaacaaggatggagaaaaatctaggacagtgtcttctgagaaaccaccaggcttgaaggctacaagtgatgagaaagattctgttttgaatatagccagaggaaaaaaggatggagaaaaaactaggacagtgtcttctcagaaaccaccaaccttgaaggctacaagtgatgaggaagattctgttttgagtatagccagagaaaacaaggatggagaaaaatctaggacagtgtcttctgagaaaccatcaggcttgaaggctacaagtgccgagaaagattctgttttgaatatagccagaggaaaaaagtatggagaaaaaactaagagagtgtcttctcggaaaaaaccagccttgaaggctacaagtgacgagaaagattctgttttgtatatagccagagaaaaaaaggatggagaaaaatctaggacagtgtcttctccgaaacaaccagcattgaaggctatctgtgacaaggaagattctgttccgaatatggccacggaaaaaaaggatgaacaaatatctgggacagtgtcttgtcagaaacaaccagccttgaaggctacaagtgacaagaaagattctgtttcgaatatacccacagaaataaaggatggacaacaatctggaacagtgtcttctcagaaacaaccggcctggaaggctacaagtgtcaagaaagattctgtttcgaatatagccacagaaataaaggatggacaaatacgtgggacaggtattttggaatacacctttaatgtaatgttcgatcaaatagaagagaaattcacttccctaaataaatcagcgggggtgtctcctcagaaacaatcggcccagaaggttatatttaaaaagaaagtttctcttttgaatattgccacaagaataacaggcggttggaaatctggaacagagtatcctgagaatctgcccaccttgaaggctacaattgaaaataaaaattctgttctgaatacagccaccaaaatgaaggatgtacaaacatccacaccagcagaacaagacttagaaatggcatcagagggagagcaaaagaggcttgaagaatatgaaaataaccagccacaggtgaaaaaccaaatacattctagggatgaccttgatgacataattcagtcatctcaaacagtctcagaggacggtgactcgctttgctgtaattgtaagaatgtcatattactcattgatcaacatgaaatgaagtgtaaagattgtgttcacctattgaaaattaaaaatacattttgtttatggaaaagattaataaaacttaaagataaccactgtgagcaacttagagtaaaaattcgaaaactgaaaaataaggctagtgtactacaaaagagaatatctgaaaaagaagaaataaaatcgcagttaaagcatgaaatacttgaattggaaaaagaactctgtagtttgagatttgccatacagcaagaaaaaaagaaaagaagaaatgttgaagaggtgcaccaaaaagttagggaaaagttaagaataacagaagagcaatataggatagaagctgatgtgacaaaaccaattaaaccggctctcaaatcagcagaggtggaattgaagacaggaggaaataattcaaatcaggtttctgaaactgatgaaaaagaagacctgctgcatgaaaaccgcttgatgcaagatgaaattgccaggctcaggctggaaaaagacacaataaaaaaccaaaacctggaaaagaaatacttaaaagactttgaaattgtgaaaagaaagcatgaagaccttcaaaaggctctaaaacggaatggggaaacattagcaaaaacgatagcctgttatagtggacagcttgctgctctgacagatgaaaacacaacgctccgttccaaactggagaagcaaagagagagcaggcaaagactggaaacagaaatgcaatcataccattgtagactgaatgctgctcgatgtgatcatgatcaaagtcactcatcaaaaagagaccaagagcttgctttccagggcacagtagataaatgtcgtcacttacaggaaaatttgaattctcatgttctgattctttctctgcaactttctaaagctgagagtaagtccagagtcctcaaaactgagctccattacacaggagaggctctgaaagaaaaggctttggtttttgaacacgtgcaaagtgagctaaagcaaaaacagagtcaaatgaaggacattgaaaaaatgtacaaaagtggatacaatacaatggaaaaatgcatagaaaaacaggaaagattttgtcaactaaaaaaacaaaatatgttgcttcaacagcaactggatgatgctcgcaacaaagctgacaatcaagaaaaagcaatacttaatattcaagccagatgtgatgctagagtacaaaaccttcaagctgagtgcagaaagcaccgtcttttactagaagaagacaataaaatgttggtcaatgaactgaatcattcgaaagaaaaagaatgccaatatgaaaaagagaaagcagaaagagaagtagctgtgagacagcttcaacaaaaacgagatgatgtcttaaacaaaggatcagcaacaaaagctctgctggatgcttcatcgcgtcactgcacctatttagaaaatgggatgcaggattcaaggaagaaattagaccagatgagaagtcaatttcaagaaatacaggatcaacttacagctactataagatgtactaaggagatggaaggcgacacacaaaagcttgaagtagaacatgtgatgatgagaaaaattattaaaaaacaggatgaccaaattgagcggcttgagaaaatcctgcagcattcaagtttgatgctgcaggtgtttgagagctagatgaaggtatgttgccaaaatttatgaattaa

SEQ ID NO: 62666 - DNA, 5826 bp, Artificial Sequence
  derived and/or modified sequence
atggaggacggcaagcgggagcggtggcccaccctgatggagcggctatgctcagacgggtttgcctttccacagtacccaatcaaaccatatcatctgaaaagaattcacagggcagtcctgcatggcaatctggagaaactgaaatatctgctgctgacatactacgacgctaataaacgcgaccgcaaggaacggaccgccctacatctcgcctgtgcaacgggtcaacctgagatggtccatctgctggtgagtagacggtgtgagctgaacctctgcgatcgggaggacaggaccccacttattaaggccgtgcagctgaggcaggaggcttgtgctaccctcttgttgcaaaatggcgccaaccccaacatcactgactttttcggccggacggctctgcactatgcggtttacaatgaggatacttccatgattgagaaattgctctcacacgggacaaatatcgaagaatgtagcaaatgcgaataccaaccgctactctttgccgtcagcaggcgcaaagtgaagatggtcgagttcctcctaaagaaaaaagccaacgtgaatgctatcgattacctggggagaagcgcgctgatccacgctgtaactttaggcgagaaagacattgtgattctgctcttacaacacaacatagatgttctcagtcgtgacgcttttcgaaagatcgccggtgactacgccatagaggcgaagaatagagtgatctttgacctgatctacgagtacgaaaggaagaggtatgaggatctcccaataaattcaaaccccgtgtcctcacagaaacaacccgctctgaaggcaacaagcggtaaagaggatagtatcagtaatatcgccacagagatcaaagatggacaaaaaagcgggaccgtgagctcccagaagcagcccgccctcaaggacaccagcgacaaggacgactctgtcagtaacacagccaccgaaattaaggatgagcagaagtccgggaccgtgctccctgcggtggagcagtgccttaaccgatcgctctaccgaccggatgccgtcgcccagcctgtgacggagaatgagttctcactggagagcgaaattatctccaaactttacattccgaaaaggaagattatttcccccagaagcattaaggatgtcttaccgccagtcgaagaggccgtggatcggtgcctatacttgttggaccggtttgctcagcccgtgacaaaagacaaattcgcgctggagtctgagaatatctccgagccctatttcaccaacaggagaacgatctcccaacagtcagccgagaacttggatgccgcctgcggcattgataagacagaaaatggtaatatgttcgaagaccagaacgtggataaagagggtaaagcattaccagctacgggtcagaaggcaaacgtgtctcctgagcagccccctttgtttacccataccgtcaaggatagagaccatatctcaactcgctttctcggcggcatggattcgctcacatcaagcgaggaatcctcagagcgccccccattatcaaccctgacactgaaggaagccgacccaagttcaaaagcagccatgcgccgcaaagactctccccctcccggaaaggtgtcgtcacagaagcagcctgcggaaaaagctacaagtgacgacaaggattctgtgtccaatatcgctaccgagatcaaagaaggtcccatttcgggcacggtcagctctcagaaacaacccgctgagaaggccacatctgatgagaaagattcggtatcgaacattgccactgaaatcaagaagggtcaacagtcgggaacagtgtcacctcagaagcagtcagcttggaaagtgatcttcaagaaaaaggtatcactgttgaacatcgccacacgaataatggggggagggaagtcgggaaccgtctcttctcagaaacagccagcctctaaggcaacctccgacaagaccgattcggccttgaatatagccacggagatcaaagatggtctccagtgtgggacagtatcctctcaaaaacaaccagcactaaaggccacaaccgacgaagaagattcagtgagcaacattgcaaccgagatcaaggatggagagaagtcaggcactgtttcatcccaaaaacagcctgcacttaaggctacaactgacgaagaggattctgtgtcaaacatcgccactgaaatcaaagatggggagaaaagcgggacggtttcctcgcaaaaacagccagcccttaaagccacaactgacgagaaggactccgtgagtaacatcgccaccgagatcaaggatggcgagaaaagcggaacagtgtcctcacaaaaacctcccgccctcaccgccacctctgacgaagagggcagtgtgctctctatcgctcgagagaataaggacggagaaaagagccgaacagttagtagtagaaaaaaaccggccctgaaagccacatccgacgagaaggacagcttttccaatattactcgcggcaaaaaggacggggagatatcccgaaaagtgagttcgcagaaacccccaaccttgaaaggaacaagtgacgaagaagacagtgttctcgggattgcccgtgagaacaaggatggagagaaatctcgaacagtatcctcggaaaagccacccgggttaaaggcatctagcgccgaaaaagatagtgtactaaatatcgcccgcggtaagaaggatggtgaaaaaactaaaagagtctcatctcggaaaaaaccctcactcgaagccacttccgacgaaaaagatagtttcagcaacatcacccgggaaaagaaggatggggagattagccggaaggtctcttcccagaagcctcccgccttgaaggggactagtgatgaggaagactcggtgctgggaattgccagagaaaataaggatggagagaagtctagaactgtgtcatctgaaaagcctcccggtcttaaggcaacttctgacgagaaggatagtgtgctgaacatagccagggggaagaaggatggggagaagacacgaacggtcagcagtcaaaagcccccaacgttgaaagcaacgtctgacgaggaagacagtgtgttgtctatagcccgggaaaataaagatggtgaaaagtcgcgcaccgtatcaagcgagaagcctagtggtcttaaggctacttcagccgaaaaagactcagtgctaaatatagcaagaggaaaaaagtacggagagaagacaaagagagtgtcctcaagaaaaaagccagcactcaaagccactagcgatgaaaaggactccgtgctgtatatagcaagagaaaagaaagacggagagaagtcacggactgtgagttcccctaagcagccagccttaaaggctatttgcgataaagaggattctgtaccgaatatggctacagagaagaaggatgaacagatcagcggtacagtctcttgtcagaaacaacccgctctcaaggctacatctgataagaaagattctgtcagcaatattccaacagagatcaaagatggccaacaatctggaacggtgagcagccagaagcaaccggcatggaaggccacatcagtcaaaaaagatagtgtgagtaatatcgctactgaaattaaggacgggcaaatccgaggtacaggaattttggagtatacatttaacgtcatgtttgaccagattgaagaaaaatttactagccttaacaaatctgccggagtcagcccgcagaagcagtcagctcagaaagtaatttttaagaagaaagtatccttgctgaatatagctacccgcataaccgggggatggaaatctggcacagaatatccagaaaacctaccaaccctgaaagctaccattgagaataagaatagtgtcctcaacaccgctacaaagatgaaagacgtgcagacatctacacccgcggaacaggacctggagatggcctcagaaggcgagcagaaaaggctcgaggaatacgagaataaccagccccaggtcaaaaatcagatccattcacgggacgacctagatgacatcatccagagttcccagaccgtctcggaggacggggacagtctgtgttgcaattgcaaaaacgttatattgctgatcgatcagcatgaaatgaaatgcaaggattgcgtccacctgcttaagatcaagaataccttctgtctgtggaaacgcttgatcaaactcaaagacaatcactgtgagcaacttagggtgaaaatccggaaactgaagaataaagcctccgtgttacagaaaaggatttctgagaaggaggaaataaagtcccagctgaagcatgagattttggagttagagaaggagctatgttcactgcgattcgccatacaacaggaaaaaaagaagcggaggaacgttgaagaggtgcaccagaaggttcgggaaaagctccggatcaccgaagaacaataccgtattgaggccgatgtgactaaaccaattaaaccagctttgaaaagtgctgaagtggaactgaaaactggcggtaataatagtaatcaagtgtcggaaacagatgaaaaggaagatctgttgcacgaaaaccgacttatgcaggacgaaatcgcacgcttaaggctggagaaggatacaatcaaaaaccagaatcttgagaagaagtaccttaaagatttcgaaatagtgaagagaaaacacgaggacttacagaaggccctgaagcgaaacggcgagacactggcaaagacaattgcttgctattccggccagctcgcggcgctcactgatgagaacaccaccctgcgctccaaactcgagaaacagagagagagccgccagcgtctcgaaaccgaaatgcaatcttatcactgtaggctgaacgcggctcgctgcgatcacgaccaatcacactctagtaaacgcgatcaggaactcgcattccaggggaccgtagacaaatgcagacacctccaggagaacctgaatagccacgtgcttatcctctccctacagctttccaaagccgaatctaagtcccgcgtcctaaagacggagttgcactacactggtgaagctttaaaggaaaaggccctagtatttgagcatgtacagtctgaattgaagcagaaacaaagtcagatgaaggatattgaaaaaatgtataagtccggctataatacgatggagaaatgcatcgaaaaacaagagagattttgccaactgaagaaacagaacatgctgttgcagcagcaactcgacgatgcgagaaacaaggccgataatcaagagaaggcaattctgaatatacaggcacgttgtgatgcacgggtgcagaatctacaggcagaatgcaggaagcaccgcttactgctggaggaggataacaaaatgctggtcaacgagctaaaccactctaaagagaaggaatgccagtacgagaaggaaaaagccgagcgggaagtggctgtgcgccagctgcagcagaagcgggacgatgtgctcaataaggggagcgcgacaaaagcattactagacgcttcctctaggcactgcacttacctggagaatggaatgcaggactctaggaagaagctcgaccagatgcgatcacagttccaggaaatccaggaccagctaacagccacaattcgctgcacgaaagaaatggaaggtgacactcagaaactagaagtggagcacgttatgatgcgcaaaatcatcaagaagcaggatgatcaaattgaaagattggagaagatccttcagcactcttctctcatgttgcaagtattcgagagctag

SEQ ID NO: 62667 - DNA, 5826 bp, Artificial Sequence
  derived and/or modified sequence
atggaggacggcaagcgggagcggtggcccaccctgatggagcggctctgctccgacggatttgctttccctcaatatcccatcaagccctaccacttaaaacgcatccaccgagctgtgctgcatgggaatctggaaaagctcaaatacctccttctcacgtactacgatgccaataaaagggaccgcaaggaacgcaccgccctgcaccttgcctgcgctacgggacagcctgaaatggtgcacttgctcgtgagtcggaggtgtgaattaaacctttgcgatcgagaggatcgtactccactgataaaagccgtgcagttgaggcaggaagcctgtgccacccttctacttcagaacggcgccaatccgaacatcacggatttctttggacgcacagctctgcattatgccgtgtacaatgaagacacaagcatgattgaaaaactgctctcgcatgggacaaacattgaggagtgcagcaagtgtgagtaccagccactgctgtttgccgttagcaggcggaaagttaaaatggtggagtttctgctgaaaaagaaagccaatgtgaatgccatcgattacctggggcggtctgcactgatccacgccgtgaccctgggcgagaaagatattgtgatcctcctgctccagcataatatagatgtattgagccgtgatgcattcagaaaaatcgccggcgattacgctattgaggctaaaaaccgggtaatttttgaccttatttacgaatatgagagaaagagatacgaggacttgcccatcaatagcaaccctgtatcttcccagaaacagccagccctcaaggccacatccgggaaagaagacagcatcagcaacattgccacagagatcaaggacggacagaaatccggtacggtgtccagccaaaaacagcctgccctcaaggatacctccgacaaggatgatagtgtctctaacacagcaactgaaataaaagatgaacagaaatctggaaccgtgttgccagctgtggaacagtgcttgaatcgttccctatatagaccagacgcggtcgcccaaccagtgaccgagaatgagttttccctcgaaagtgagataatctcaaagctgtatatccccaaacgcaagattatctccccgaggtctatcaaggatgtgctcccacctgtggaagaagcggtcgacaggtgcttgtacttgctggaccgatttgcccagcctgtaacaaaagacaagtttgcactcgagagtgagaacatcagcgagccctactttacaaaccgcagaaccatctcacagcagtctgctgaaaaccttgacgccgcctgtggtatagacaagaccgaaaatggaaatatgttcgaagaccagaacgtcgacaaggagggaaaggccttgcctgccaccggccagaaggctaacgtatcccctgagcagcctcccctgttcacccataccgtgaaagatcgcgaccacatctctaccagatttctggggggtatggactctttgactagcagcgaggagtcctcagagagaccacctttgtccaccctgacattgaaggaggctgacccatccagcaaggccgcaatgaggaggaaggatagtccaccaccaggcaaagtgagctcccagaaacaacctgctgagaaggccacgtcggacgataaggactcagtatcaaacatcgccactgagataaaagaaggccccattagcggcacagtttcgtcccagaaacaacccgcggaaaaagccactagtgatgagaaggactcagtcagcaacatcgctactgaaataaaaaagggtcaacagtccgggacagtgtcaccccagaaacaatcagcttggaaggtcatcttcaagaagaaggtgagcctgctcaatatcgctaccagaattatgggaggtggcaaaagcgggaccgtatcaagccagaaacagccggccagtaaggcaacttctgataaaacagattccgctctcaacatcgccacagaaattaaggatggactgcaatgtggaaccgtgtcctcacagaagcagccggcattgaaggcaaccactgatgaggaagattctgtcagcaacatcgcgactgaaatcaaggacggtgaaaaatcgggtaccgtgagttcacagaaacaaccagccctaaaagctactactgacgaggaggacagcgtttcaaacatcgcgacagagataaaagatggcgagaaatcgggtactgtatcttcgcagaagcagcctgctctaaaggctactaccgatgaaaaggactccgtcagcaatatcgcaaccgagatcaaggacggggagaaatcaggcacggtgagtagccaaaagcctccagctctgaccgccacgagtgatgaggagggaagtgttttaagcatcgcccgcgaaaataaagatggtgagaaaagccgcaccgtcagttcccgcaagaagccagcccttaaagccaccagcgatgagaaagatagctttagcaacattaccaggggcaaaaaagacggcgaaatttccagaaaagttagcagccagaagcccccgactttgaagggcacctccgatgaggaagactcagtgctcggtatcgctagggagaacaaagatggagagaagagcagaacagtctcgtctgaaaaaccacctgggctaaaggcttcctcagcggagaaagatagtgtcctgaatatagcccgcgggaagaaggacggagaaaaaactaagcgcgtttcttccaggaagaaacccagcctcgaggctacaagcgatgaaaaggatagcttttccaatatcacaagagaaaagaaggatggcgagatctcgcgcaaagtgtcttcccagaagccaccagctctgaaagggacgagcgacgaggaagactccgtccttgggatagcgcgcgagaacaaggacggagagaaatctcgcacagtgtcttccgagaagccaccaggacttaaggctacaagcgacgagaaggactcagttttgaacattgccaggggcaaaaaagatggcgagaagactcggactgtatcatcacagaagccaccaacactgaaggccactagtgatgaggaagatagcgtgctctccattgctcgggagaacaaggatggggagaaatctcgcaccgtgagcagtgaaaagcctagcggcctgaaggcaacttccgcagagaaagattctgtgcttaacatcgcccgcggaaaaaaatacggcgaaaaaacaaaacgggtcagctctcggaaaaagcctgctctcaaagcgactagcgatgagaaggactcggttctgtatattgctcgcgaaaagaaggatggggagaaatctaggaccgtttctagtccaaaacaacctgctcttaaggctatatgcgacaaggaggatagcgtccctaatatggctaccgaaaagaaggatgaacagattagtgggacggtaagctgccagaagcagccggctctgaaagccacaagcgacaaaaaagattccgtctctaacatcccgactgaaataaaggacggccagcagagcggaactgtgtctagccagaaacagcccgcctggaaggccacaagcgtgaagaaagattctgtctccaacatagcaactgagatcaaggatggccagattcggggcaccggtatcctggaatatactttcaatgtaatgttcgatcagatagaggagaaatttacttctttgaacaaatccgccggggtctcgccgcagaaacagagtgctcagaaggtgatttttaagaagaaggtgtcccttctgaatattgccaccagaatcactggtgggtggaagtccgggaccgagtaccccgaaaacctgccgacgcttaaggctacaatcgagaataaaaactccgtgctgaacaccgccaccaagatgaaagatgtccaaactagcaccccagccgagcaggatctggagatggcctccgagggcgagcagaaacgcctagaagagtatgagaataaccagccccaggttaaaaatcagatccattcacgggatgaccttgatgacataattcagagcagtcagacagtgtctgaggatggagactctctgtgttgcaattgtaaaaacgtgatcctcctgattgatcagcacgagatgaaatgcaaagactgtgttcacctgcttaaaatcaaaaacacgttctgcttatggaagcggcttattaagctgaaggataaccactgcgagcagctgagggttaagatccgtaaactgaaaaacaaggcctccgtgcttcagaagcgcattagcgaaaaagaggagattaaaagtcagctcaaacatgaaattctcgaactggagaaggagttgtgttcactcagatttgctatacagcaggagaaaaagaaacgccggaacgtcgaagaggtgcaccagaaagttagggagaaattgcgcatcactgaggagcagtacagaattgaggcagacgtgaccaagcctatcaaaccggccttgaaaagcgctgaagtagagttgaaaactggagggaataattccaatcaagtgtcagaaacagatgagaaggaagacttactgcatgagaaccgtctgatgcaggatgaaatagctaggcttcgcctggaaaaggatacaatcaaaaatcagaatctcgaaaaaaagtacctgaaagattttgaaattgtgaaaaggaagcatgaggacctccagaaagccctgaaaagaaacggcgagacactggccaagacaatcgcttgctacagcggccagctcgctgcactgactgatgagaacacgaccctccgcagcaagctggagaaacagcgggaatcaaggcaacggttagagaccgaaatgcagtcttaccattgtagattaaacgcggcacggtgcgatcacgatcaaagccacagcagcaagcgtgaccaagaactcgcctttcagggaactgttgataagtgccggcatctgcaggagaacctgaactcccatgtactaattctgtctttgcagctgtcaaaagctgagtcaaagagcagggtgttaaagacagagctgcactacaccggagaagctctcaaggaaaaggcgctggtttttgagcacgttcaatccgagctgaaacagaaacaaagccaaatgaaggatattgagaagatgtacaagtccggctataacactatggagaaatgcattgaaaaacaggaacgcttctgtcagttgaagaaacagaatatgctgttacaacagcaactggacgacgctagaaacaaggccgacaatcaggagaaggccatcctaaatatacaggctcgatgtgatgcacgagtgcagaacctgcaggccgaatgtcgcaagcatcgattactgttagaggaggacaacaagatgctcgttaacgagctaaaccattctaaggagaaggaatgtcagtacgaaaaggagaaggctgaaagagaagtggctgtgcgccagctgcagcagaagagagatgatgttctcaataaaggcagcgcaactaaggccctgttggatgcttcctctcgccattgtacctacctggagaatggaatgcaggattcaaggaagaagcttgatcagatgcgctctcagtttcaggaaatccaggaccaactcacggctacaattagatgcacgaaggagatggaaggggatacacagaaactggaagttgagcatgtgatgatgcgaaagataattaaaaaacaggacgatcagatagagaggcttgaaaagatcctccagcactcgtccctcatgctgcaggttttcgaaagctag

SEQ ID NO: 62668 - DNA, 3627 bp, Artificial Sequence
  derived and/or modified sequence
atgggcggcggcaagagcggcaccgtgagcagccagaagcagcccgccagcaaagctacttccgacaagacagacagtgccttaaacatcgcaacagagattaaagacggactccagtgcggcaccgtcagtagccaaaagcaacccgccttgaaggctactaccgacgaagaagattctgtatccaacatcgctacggagatcaaggacggcgaaaagtctggcacagtgtcctcgcagaaacaacccgctctcaaagccacaacagacgaagaggatagcgtctcaaacattgcaacagagataaaggacggcgaaaagagtggcacggtgtcctcccaaaaacagcctgccttgaaagcaaccacagacgagaaggactccgtatccaatattgctactgaaatcaaagacggagagaagagcggaacagtgtcctcccagaaacccccagcactcaccgcaacctcagatgaggagggatcagtgctttcaattgccagagagaataaggacggagagaagagcagaacagtgtcttcaagaaagaaacctgcattgaaggctacttctgacgagaaagactctttctccaacatcacccggggcaaaaaggacggggagattagccgaaaggtctcaagccaaaagcctccaaccctaaaagggaccagcgacgaagaggactccgttctgggcattgcgagggagaacaaggacggagagaagtctcgcacagtctcatccgaaaaaccccctgggctgaaagccagttccgccgagaaagattccgttctgaatatcgcccgcggtaagaaggacggcgaaaaaacgaaacgggtctcgtccagaaagaagccttcccttgaagcaacatccgacgaaaaggacagcttctcgaatataacacgggaaaaaaaggatggagagataagccggaaagtctcctcccagaaacccccggcgctcaaaggcacctcagatgaggaggatagtgtgttagggattgctcgagaaaacaaggacggcgagaaaagtcggaccgtgtcatccgagaaaccgcccgggctcaaggccacctccgatgaaaaggatagcgtgttaaacattgcccgaggaaaaaaagacggtgagaagacaaggaccgtctctagcccaaaacagccggccctgaaggctatttgcgataaggaagacagcgtgcctaacatggcaacggaaaagaaggatgaacagatatcagggacggtctcttgccaaaagcaacccgctctcaaggcaacatccgacaaaaaggactccgtaagtaacatacccactgaaatcaaggacggacagcagtccggcaccgtcagcagccaaaaacagcccgcctggaaagccacaagtgtgaagaaggactccgtctccaacatcgcaacagagattaaagatggtcagatcaggggcactgtgagcccccaagtgcctataccgaggcataaagtgggaaatattaaatcctatccaaacactggccgccgcatccagctcgatgccaatacatttagcgtctccccgcagaaacagtctgcgcaaaaggtgatcttcaaaaagaaggtgagcctgctcaacattgccaccagaatcactggaggatggaaaagcggcactgagtaccccgagaatctgcccaccttgaaagctacaattgagaataaaaattcagtgttgaatacagctactaaaatgaaggatgttcagacttccacccccgctgagcaggatctggagatggcgtcagagggagaacagaaaagacttgaggagtacgaaaacaaccagccccaggtcaaaaatcaaattcactccagagatgatctggacgacattatccaatcttcccagacagtcagtgaggacggcgactctctatgttgcaactgtaaaaacgttattctgttaatcgaccaacatgagatgaaatgcaaagactgcgtgcatctgttaaaaataaagaacaccttttgcctctggaagagattgatcaagttgaaagacaatcactgcgagcaattacgggttaaaatccgtaaactcaagaataaagccagtgttctgcagaaaagaattagcgaaaaagaggaaattaagtcacagctaaagcacgagatcctcgaattggagaaagagctttgctccctccgatttgctatccaacaggagaagaaaaaaagacgaaacgtggaagaggttcaccagaaggtgagggagaagctgagaatcactgaagagcaataccggattgaggctgatgtcactaagccaattaagccggccttgaaatcagctgaggtcgaattgaagaccggaggaaataacagtaatcaggtgtccgaaaccgatgaaaaggaggacttgcttcacgaaaatagactgatgcaggatgaaattgcgcgcctccggctcgagaaagacacaataaagaatcagaatttggaaaaaaagtatctgaaagatttcgaaatcgtgaaacgcaagcatgaggacctccagaaagcactgaaaaggaacggcgagaccctggccaagactattgcctgttactccggacaactagctgcacttaccgacgagaataccacactgagatccaagctcgaaaaacagagggaaagccgccagcgcttggaaaccgaaatgcagtcataccactgtcgtcttaatgcagctaggtgcgaccatgatcaaagccattccagcaagagagaccaagagctagcctttcagggaaccgttgacaaatgccgccatcttcaggagaatctgaatagccacgtgctgatattgtccctacagctatccaaggcagaatcaaaaagtcgcgtcctcaaaaccgaactccattacaccggtgaagccttgaaggagaaagcactggtgtttgagcatgtgcagtcggagttaaaacagaagcagtctcagatgaaggacatcgagaagatgtataagagtggttataacaccatggaaaagtgcatcgaaaaacaggagcggttttgccagcttaaaaaacaaaatatgcttttacagcaacaactggacgacgcacgcaacaaagccgacaaccaggaaaaggcaattctcaacatccaagcacgctgtgatgcccgcgtccagaaccttcaggccgagtgccggaaacacagactactgctcgaggaagacaataagatgttggtgaatgaactgaatcatagtaaggaaaaggagtgtcaatatgaaaaagaaaaggccgagagagaggtcgcggtaaggcagcttcagcagaagagggatgatgtgcttaataagggaagtgcaaccaaagcacttctggacgccagttcccgccattgcacttacctggagaacggcatgcaggattctcggaaaaagctggaccagatgcgatctcagtttcaggaaatacaagaccagctcaccgctactataagatgtacaaaggagatggaaggggacacccagaaactggaggtggagcacgtgatgatgcgaaagatcattaaaaagcaagacgatcaaatcgaaagacttgagaaaatcctgcaacatagctcactgttgctcctgaacttcgagacctag

SEQ ID NO: 62669 - DNA, 5825 bp, Artificial Sequence
  derived and/or modified sequence
atggaagatggcaagcgggaacgctggccaaccctgatggagcgactgtgcagcgatggattcgcctttccccagtatcccataaaaccatatcatctgaaaagaatccatagagctgtgttgcacgggaaccttgagaagctcaaatacctgttgttgacatattacgatgcgaataaacgcgatcggaaagaacggacggcactccacttggcctgcgccaccggacaacctgagatggtacacctccttgtcagtagaaggtgtgaattaaacttatgcgatcgagaggacagaaccccactgattaaagctgttcagctccggcaggaagcttgcgctaccctgctgttgcagaacggagccaatccaaacattaccgatttcttcgggaggacagctctacactacgcagtgtacaacgaggacacctcaatgatagagaaactcctctctcatggaacaaatatcgaagagtgctcaaagtgcgaataccaacctctgcttttcgccgtttcccgacgtaaagttaaaatggtggaattcctcctaaaaaagaaggctaatgtgaacgccatcgattaccttggaaggtctgccctgatccacgcggtgactctgggcgagaaagacattgttatccttttactccagcacaatatagacgtcctcagcagggacgccttcagaaaaatcgcaggagattacgccatagaggccaagaacagagttatatttgacttaatatacgaatatgagcgcaagaggtatgaagacctgcccatcaattcaaatcctgtgtcatcccagaagcagcccgctcttaaagccacaagcggcaaagaggactcaatttctaatatagctaccgagatcaaggatgggcaaaagtctggcacagttagctcccagaaacagcctgccctcaaggacacgagcgataaggacgactccgtgagcaacactgctaccgagatcaaagatgaacaaaaaagcggcaccgtcctcccagctgtggagcagtgtctaaatcggtcactctataggcctgacgccgtcgcccaaccagtcaccgagaacgaattcagtctcgaatctgagatcattagcaagttgtacatacctaaacggaagatcatttctcctcggtctattaaagatgtcctgccacccgtggaggaagccgtcgacaggtgtctttatctacttgatcgtttcgctcagccagtgaccaaggacaagttcgccctagagtctgagaacatttccgaaccatattttacaaatagaagaacaatctcacagcaatccgccgaaaacctagacgctgcgtgcggtatcgataaaaccgagaatggcaacatgttcgaggatcaaaacgtggataaggaggggaaagcattgccagccacagggcaaaaggctaatgtgtcacctgagcagccccctctcttcacacatactgtaaaagaccgggaccacataagtacccggtttttagggggtatggattccctgacctccagcgaagagtccagcgaacgcccaccactgtctacactcaccttgaaggaggccgatccgtcgagcaaggctgccatgaggcggaaggatagtcccccacctgggaaagtgtctagccagaagcagcccgctgaaaaagcaacatccgatgacaaagattcagtgtctaacatcgctacagaaatcaaagagggacctatctcagggaccgtctcctctcagaaacagcccgcagagaaagccaccagcgacgagaaagattctgtgtcaaatattgctacggagattaagaagggacagcagtctggcaccgtttcacctcagaagcaatcagcttggaaagttatatttaagaagaaggtaagcctcctaaatatagccacccggattatgggcggaggcaaatccgggaccgtgtccagtcagaagcagcctgctagtaaggctacaagcgacaagacggacagcgccttgaacatcgctacggaaatcaaagatggactgcagtgcggcacagtctcttctcagaagcagccagccctcaaggcaactacagacgaagaggattcagtcagcaatatagcaacagagattaaggatggcgaaaagagtggcaccgtgagtagtcaaaagcagcccgctcttaaagccaccacggacgaagaagattccgtcagtaacatcgcaacagagataaaggatggggaaaaatccggtacggtttccagccagaagcagcccgcattgaaggcaactacagatgagaaggatagtgtctccaacatcgccactgagatcaaagatggtgaaaaaagtggtaccgtgagtagtcagaagccccctgccttaaccgcaacgagtgatgaggagggatctgtgttgagtattgcgagagaaaataaagacggcgaaaaatctcgcaccgtttcgagcaggaagaaacccgctctgaaggctacctcagatgagaaagactccttctctaacattacacgcggaaagaaggatggggaaatttctagaaaggtttcctcgcagaagcctcccacactaaagggcacctccgacgaagaggactctgtcctgggcattgccagggagaataaagatggcgagaaatctcgtactgttagcagtgagaaacctccaggactaaaggccagctctgccgaaaaagattcggtgttaaatattgctcgaggaaagaaggacggagaaaaaactaaacgtgtcagttctaggaaaaagcccagcctcgaagctacaagcgacgaaaaggattctttcagcaacatcacacgtgagaagaaagatggggaaattagcagaaaggtgagtagtcaaaaaccgcctgctttgaaaggaacatcagatgaagaggacagcgtactggggatcgctcgcgagaacaaggatggagagaagtcacgtactgttagtagcgaaaagcctccgggactgaaagctacatccgatgaaaaggactccgtgctcaacattgcgagagggaaaaaagacggggaaaaaactcgaacagtgtccagtcagaagccaccgaccctgaaagctaccagcgacgaggaagattctgtcctgtctatcgctcgtgagaacaaggatggcgagaaaagcagaaccgttagcagcgagaaacccagcggattaaaggcaactagtgcagagaaagactctgtgctaaatatcgccagaggtaaaaagtatggggaaaaaaccaaacgcgtgagttcgagaaagaagccagccctgaaggctacctcggacgagaaggactccgtactctacatcgccagagaaaaaaaggacggggagaagagccggaccgtctcttcacctaagcagccagccctgaaagccatctgtgataaggaggatagcgtgccaaatatggccaccgaaaagaaggacgaacaaatctcaggcaccgtcagctgccagaagcagcccgctctgaaggccacttcagataagaaagattcggtgtccaatataccaacggaaattaaggacgggcagcagtcagggacggtgagcagtcagaagcagccagcatggaaagccacaagcgtaaagaaggactcagtcagtaacatcgccactgaaattaaggatggtcagatacggggaaccgggatcctggagtatacatttaacgttatgttcgaccagatcgaagagaagtttacaagtctgaataaatcagcaggcgtgagcccgcagaaacagtcagctcagaaggtgatcttcaagaaaaaagtttccctgctgaacatcgcaactcgcatcaccggaggctggaagtccggaaccgaatatcccgagaatctaccaaccctcaaggccaccatcgagaacaaaaatagtgtgctcaataccgccactaagatgaaagatgtgcagacgtccactcctgccgagcaggatttagagatggcttctgagggggaacagaagcgtctcgaggaatacgagaacaaccaaccacaagtgaagaaccagattcacagccgagacgacctggacgatattatccagagtagccagactgtctctgaggatggagacagtttatgctgtaactgcaaaaacgttattcttctaatcgaccaacatgagatgaagtgcaaggattgtgtccatctgctgaagataaaaaacacgttctgtctctggaagaggctaatcaagctgaaggacaatcactgcgagcaactgcgtgtcaaaatcaggaagctgaaaaacaaggcttctgttctacaaaagagaatatctgaaaaggaggaaattaagtctcagcttaaacatgagattcttgagttggagaaggagctgtgctctcttagattcgccattcagcaagagaaaaagaagagacggaatgtagaagaagtgcatcaaaaggtgagggaaaagttgaggatcactgaagagcagtacagaatcgaggctgatgtgactaagccaatcaagcccgctctgaagtctgctgaagtggaattaaaaaccggaggcaacaacagcaatcaagtgtcagaaacggacgagaaggaggacctgctgcatgagaatcggcttatgcaggatgaaattgctcgcttacgccttgagaaggataccatcaagaaccagaacttggagaaaaaatatctgaaagacttcgaaattgtgaaaagaaagcatgaagacctgcaaaaagcattaaagaggaacggcgagactttagccaagaccatcgcctgctatagcggacagttagccgcattgaccgatgagaacaccactctgaggagcaagctggagaagcaacgcgaatcacgtcagcgccttgagactgagatgcagtcttatcactgcaggttgaatgctgctaggtgtgaccacgatcagagccacagcagcaagagagaccaggagctcgccttccaaggcaccgtcgataagtgccgccacctgcaggagaatctgaattcccacgtgcttatcttgagcctgcaactgtcaaaagccgaaagtaagagccgggtgctgaaaaccgaactccattacacaggcgaggccctaaaggagaaggctctggtattcgagcatgtccagtccgagttgaaacagaaacagagtcagatgaaagacatcgaaaagatgtacaaaagcggctataacactatggaaaagtgtattgagaaacaggaacgcttttgccagttaaagaagcagaacatgctgctacagcagcagttggatgatgccagaaacaaggcggacaaccaggagaaggccatcctgaatattcaggcccgttgtgatgcaagggttcaaaacctgcaagctgagtgtcgcaaacataggttgctcctggaggaggataacaagatgctggtaaatgagctcaaccactccaaggagaaagagtgtcagtacgaaaaagaaaaggccgaacgggaagtggcagtgcgacagctgcagcagaaacgtgacgacgtactgaacaaaggatccgctacaaaggccctgcttgacgcatcgagtcgtcattgcacttacctcgaaaatggaatgcaagacagcaggaagaagttagatcaaatgcgcagccagttccaggagatacaggaccagctgaccgcgactatacgatgtacgaaggaaatggaaggagacactcagaagctggaggtcgagcatgtaatgatgagaaagatcatcaaaaagcaggatgaccagatcgaaaggttggaaaagatactccaacatagcagcttgatgctgcaagtctttgagtctta

SEQ ID NO: 62670 - DNA, 5825 bp, Artificial Sequence
  derived and/or modified sequence
atggaagatggaaaaagagaacgctggcctactctcatggagagactgtgttcagacggttttgcgtttccacagtatccaatcaagccctaccatttgaagcgcattcacagagctgttctccacgggaatctagagaagctgaaatatcttttgctcacttactatgatgccaacaagcgcgacagaaaagagcgcacggccctccacttggcctgtgctacaggccagcctgagatggtgcacctgttagtgtctaggagatgcgagctgaacctttgtgaccgcgaggatcggaccccactgatcaaagccgtgcaattaaggcaggaagcgtgcgccactctacttctccagaacggtgctaaccccaatatcactgatttctttggtaggacggcccttcattacgctgtctataacgaagatacatctatgatcgaaaaactgctgagtcacgggacgaacatcgaggagtgttccaagtgcgaataccagcccctcctgttcgccgtgagtaggcggaaagttaaaatggttgagttccttctcaaaaaaaaggccaacgttaacgcaatagactacctcgggagatctgccttgatccacgccgtgaccctcggggagaaggatatagttatcttgctgctacagcataatatcgacgtgctgtcgcgcgatgctttcagaaagatcgctggcgattacgccatcgaagccaagaaccgggtcatcttcgacctgatctatgaatacgagaggaaacgctacgaggatctccccattaattcaaacccagtgtctagccagaaacagcccgctctcaaggccacaagcgggaaagaggactctatttcgaacatcgccactgagatcaaggatgggcagaaatcgggcaccgtttcatcacagaagcaacccgctcttaaggatacctcagataaggacgatagtgtaagtaatacagcgaccgagataaaagatgaacagaaaagcgggaccgtgctacctgctgtggagcagtgtctcaatagatctctatacagaccagatgccgtggcccagcctgtcactgagaatgaattcagcttagagagtgagatcattagcaagctgtacatccccaagagaaagataatttcccctcggtccattaaggacgtgctcccccctgtagaggaagccgtggataggtgcctttatctgctcgaccgcttcgcccaaccggttaccaaggacaaattcgctctcgaatccgaaaatatcagcgaaccctatttcactaaccgacggacaatatcacagcagagcgctgagaacctggatgccgcttgtggaatcgacaagaccgagaatgggaatatgttcgaggaccaaaacgtcgacaaggaaggtaaggctctccccgctaccggacaaaaggcaaatgtcagcccagagcagccgcctttgttcacccacaccgtcaaggatcgcgaccatatctcaacccggttcctgggaggaatggatagtctcacttcgagcgaggaaagcagtgaaaggccgccactgagcacactcactttgaaagaggccgatcctagcagcaaggctgcaatgaggaggaaggactcaccccctcctggcaaggtgtcctcacagaagcagcccgcagagaaagctacatccgacgacaaagattctgttagtaacattgcaacagagatcaaagaaggccctatctccggcacagtgagctctcagaagcagcctgcagagaaagctacctctgacgagaaggacagcgtaagcaatatcgcgactgagatcaaaaagggccagcaaagcggtaccgtctctcctcagaagcagtcagcatggaaagtaatcttcaagaagaaggttagcctactgaacatcgctactcgtatcatgggaggaggcaagagcggcaccgtgtcaagccagaagcaacccgcaagcaaggccaccagcgacaaaaccgactccgcgctgaatatcgccaccgagatcaaggacggcctgcagtgcgggaccgtttcctcacaaaagcaaccagccctgaaggccacaactgacgaggaagatagcgtgtccaatatcgctacagagattaaagatggtgagaagtccgggaccgtatcaagccagaaacaaccggctttaaaggcgactaccgatgaagaagacagtgtttcgaatatcgcaactgagataaaagacggagaaaagtcggggactgtgtcaagccagaaacagcccgctctgaaggcaactacagatgagaaagacagcgtgtccaatattgccaccgagataaaggacggcgaaaaatctggaactgtttcatcccagaagcctccggcattgacggctacgagcgatgaggaggggagcgtcttgagtatcgctagagaaaacaaggatggcgaaaagtcaaggacggtgagctcacgcaagaaaccagcgctcaaagccacgtccgatgaaaaggattcattttctaacatcacccgtggcaagaaggacggggagatttccagaaaggtcagctcccagaaaccaccaactttgaaggggacttccgacgaagaagactctgtgctgggcatcgccagggagaacaaagatggtgaaaagtctcggacagtgagcagcgaaaagccacccggtttgaaggcctctagcgcagagaaggatagcgtgctgaatatagcacgcggtaaaaaggacggagaaaaaaccaagcgcgtctcctctaggaaaaagccaagtctggaagccactagtgatgagaaagatagcttctctaatattacgagagaaaagaaagacggggaaattagcaggaaagtgtcttctcaaaaaccccctgcattgaaaggaacctcagacgaagaggatagcgtacttgggatcgcgagagagaataaggacggagagaagtcgagaacagttagttccgagaagccacctggccttaaagctacctccgatgaaaaagacagtgtcctcaatatcgccagagggaaaaaagatggtgagaaaactaggactgtaagttcccagaaaccacccactctaaaagctacatcagacgaggaagatagtgtccttagtattgctagggaaaacaaagacggggagaaatcccgaacggtgtcttccgaaaagccgagtggcttaaaggccactagtgctgaaaaggattccgtcctgaacatagctcggggaaagaagtacggggaaaagaccaaacgcgtttcttcgaggaaaaaacccgctctgaaggccacttcggatgagaaggactccgtgttgtacatcgctcgagagaagaaggatggagagaaaagtcggacagttagctcccctaaacaaccggcactgaaggcaatctgcgataaagaggattccgttcctaatatggcaacggagaagaaggatgagcagatctcaggaactgtttcttgtcagaagcaacccgcattgaaggcgacttccgataagaaggacagcgttagcaacatacctactgaaatcaaagacggccaacaaagcggcaccgtaagctcccaaaagcagcccgcatggaaggcgacatcagtcaaaaaagatagcgtgtcaaacatcgcaacagagatcaaagatggacagatacggggaacgggtatcttggagtatacatttaacgtgatgtttgatcagatcgaggagaagttcaccagtctgaataagtctgccggagttagtccacaaaagcagagcgcgcagaaagtgattttcaagaaaaaagtgagtttgctgaacattgccacaagaattaccggcggatggaagtctggcactgagtatccagagaatttacccacccttaaggccaccatcgaaaataaaaacagcgtgctcaataccgccaccaaaatgaaagatgttcagaccagcacccctgccgagcaggacttggaaatggcaagtgaaggagaacagaaacggctggaggagtacgagaacaatcaaccgcaggtgaaaaatcagatccacagtcgcgatgatttagatgacatcatacaaagttcacagacagtatccgaggacggagattccctgtgttgtaactgtaaaaatgtgatccttctgattgatcaacatgagatgaagtgtaaagactgtgtgcatctacttaaaattaaaaataccttctgtctctggaagcgcctcatcaaacttaaagacaaccactgcgagcaactgagggtcaagatcaggaaactcaagaacaaagccagcgtgctgcaaaaaagaataagcgaaaaggaagagattaagagccagctgaagcacgagatactggaactggagaaggaattgtgtagtttgcgctttgcaattcaacaagaaaagaaaaagaggcgtaacgttgaggaggtccatcagaaggttcgggaaaaattaaggattactgaggagcagtaccgaattgaggccgatgtgactaagcctataaagccggcacttaagagtgccgaagtcgaactgaaaactggaggcaacaactccaaccaggttagcgagactgacgagaaagaagacctgctccacgagaacagactcatgcaggatgagattgctcgcttacgcctggagaaagacacaattaagaaccagaatctcgagaaaaagtatctcaaagactttgagatcgtgaagaggaaacatgaagatcttcaaaaggcccttaagcgaaatggcgagacacttgctaagactattgcgtgttactccgggcagctggctgcattaaccgacgagaacacaaccctccgcagcaaattggaaaaacagcgagagtctagacagagactcgaaaccgagatgcagagttaccattgtcgcctcaatgccgcacggtgcgaccacgaccagtcccattcctctaagagggaccaagagctggcatttcaaggcaccgtcgataagtgccgccatcttcaggagaatctcaattctcacgttcttatattgagtctccagctgtccaaagctgaaagcaagagccgcgtgctcaagaccgaacttcattacactggagaggccctgaaagaaaaggctctcgtgttcgagcacgtccagtccgagcttaaacagaaacaaagccagatgaaggatatcgaaaaaatgtacaaatcgggttacaataccatggaaaagtgcatagagaagcaggaacgcttttgccagctcaaaaagcaaaatatgttgttgcagcagcagcttgacgatgcaaggaacaaggctgataatcaagagaaggcaatcttgaacattcaagcgagatgtgacgcccgtgtacagaatctccaggccgagtgtcgcaagcaccggctgctactggaggaagacaataagatgttggttaatgaactgaatcattccaaggagaaagaatgccagtacgagaaagaaaaagccgaaagagaggttgctgtccggcagttacagcagaagcgagatgatgtgctgaataaaggctccgccaccaaggcccttctggacgctagtagcagacattgtacatacctggagaatgggatgcaggattctagaaagaaactcgatcagatgaggagtcaatttcaagaaatacaggatcagctgaccgctacgatcagatgtactaaggaaatggaaggggacacccaaaagttagaagtcgaacatgtgatgatgcgaaagattatcaagaaacaggatgatcaaatcgaaaggctcgagaagattctgcaacattcgagcctcatgctgcaggtgtttgaatccta

SEQ ID NO: 62671 - DNA, 3627 bp, Artificial Sequence
  derived and/or modified sequence
atgggcggtggcaagagtggaacagtgtcttcacagaagcaaccagcatcaaaagcaacgtcagataaaaccgattctgcactgaacatcgctacagaaatcaaagacggcctccagtgtggcactgtgagttcccagaaacagcccgctctgaaggcaacgactgacgaggaggatagtgtctccaatattgcgacggagatcaaggatggggagaagtcagggacagtttctagccaaaaacagcccgcactcaaagctacaaccgacgaagaggactcggtctccaacatcgccacggagatcaaagatggcgaaaaatccggaactgtgtccagccaaaagcaacccgcattgaaagcgaccactgacgagaaggacagtgtgagcaacatcgctacggagattaaagacggtgaaaagtccggcaccgtatcctcccagaagcctcctgcgcttacggccacctccgatgaggaagggtccgtgctgagcatcgcaagggagaacaaggatggagaaaagagtaggaccgtgtccagcagaaaaaagcctgccttgaaagcaacgtctgacgagaaggattcgtttagtaatataactcggggaaaaaaggacggagaaatctcccggaaggtaagttcacaaaagccacccacactcaaaggtaccagcgacgaggaggactcggtactgggcatagcccgtgaaaataaagatggagagaaatcccggaccgtatctagtgagaaacctcctgggctgaaggctagcagtgccgagaaggactctgttttaaatatagctcggggtaaaaaggatggggaaaagaccaagcgcgtctcttctcggaagaagcctagcctcgaagccacatccgacgaaaaggactctttcagtaacatcactagggagaaaaaggacggcgaaatatcccgaaaggtgagctcccagaaaccaccggctctcaaaggaacctccgatgaagaggactctgtgctcggaatcgctagggagaacaaggacggtgaaaagtctcgcaccgtatcaagcgagaagccccctggacttaaggccacctccgacgaaaaagactcagtcctgaacatcgcgagggggaagaaggacggcgagaagacaaggacagttagtagtcccaaacaacccgctttgaaggcaatttgtgataaagaggactccgtccctaatatggccaccgagaaaaaagatgagcagatatctggaactgtctcatgtcaaaagcagcccgctctgaaagccacatcggacaagaaagactcagtgtccaatattccaactgaaattaaagacggccagcaaagcggaacggtctcctctcagaagcaacccgcttggaaggccacctcagtgaagaaagactctgtgtcaaacattgcgactgagattaaggacggccagattcgcggtaccgtgtccccacaggtgcctattcccaggcacaaggtggggaacattaagtcatacccaaacactggtcgcagaatccagcttgatgctaacacgttcagtgtgagccctcagaaacagtcggcccagaaagtgatttttaaaaagaaggtcagcctgctcaatattgctactagaatcaccgggggttggaagtctgggaccgaatacccggagaatctccccacgctgaaagctactatcgagaataagaattccgtgctgaatacagcaacgaagatgaaggacgtgcagacctcaacacctgctgagcaggatctagaaatggcttctgagggcgagcagaaacgactggaagagtacgagaacaaccaaccgcaagtgaagaaccagattcacagtagggatgacctggacgatattatacagtcatcccagacagtcagtgaggatggcgacagtttatgctgcaattgcaaaaatgttatcctgctcatcgaccagcacgaaatgaagtgcaaggattgcgtgcacctgctaaagatcaagaacactttctgcctttggaaaagactgatcaagttaaaggacaaccattgtgagcagctacgtgtgaagatccgtaagctcaagaacaaagcttccgtgctccaaaagcgtatctccgaaaaggaggagattaaaagccagctcaagcatgagatccttgagttagaaaaggagctgtgttcactgcgatttgcaatccagcaagaaaagaaaaagaggaggaacgtcgaggaagtgcatcagaaagtacgcgagaagctgaggatcactgaggagcagtaccgcatcgaggcagacgtaaccaagccaattaaacctgccttgaagagtgccgaggttgaacttaaaacgggcggaaataacagtaaccaagtgagtgaaaccgacgagaaggaggatctgctgcacgagaatagactgatgcaagatgagatcgcacgcttaaggttagagaaagacacaattaaaaatcagaacttggaaaagaaatacctgaaagatttcgaaattgtgaagaggaagcacgaggaccttcagaaggcgctgaagaggaacggagaaaccctcgccaagacgattgcctgctactccggccagctcgccgctcttaccgatgaaaacactacccttagaagtaaactagagaaacagcgagagtcccggcaaaggttagaaactgagatgcagtcttatcattgtagactgaacgcagcgagatgtgatcacgaccagtcccacagctctaaacgggatcaagagctggcctttcagggcaccgtcgataagtgccggcaccttcaggaaaatttgaatagtcacgtcctgattctttctctgcagctgtctaaggctgagtctaagagcagggtcctcaaaaccgagctccattacactggtgaggccttgaaggagaaggctctggtgttcgagcatgtccaatcggagttgaagcagaaacagtcccagatgaaagatattgaaaaaatgtacaagtctggctacaacaccatggagaagtgcattgaaaagcaggagcggttctgccagctcaaaaagcagaatatgctcctgcagcagcaactggatgacgctcgtaacaaagcagacaatcaggagaaagcaattctgaatattcaagctcgttgtgatgcccgtgttcagaatttacaggccgagtgtcgcaagcaccgactcttgttggaagaagacaacaaaatgctcgtcaacgagctgaaccactcaaaagagaaggagtgtcagtatgaaaaagaaaaggcggagcgtgaagtagctgtcagacagctgcagcagaaaagagacgatgtactgaacaagggctctgctactaaggcacttcttgacgctagctctaggcactgcacctatttggagaatggcatgcaggacagccgcaagaagttagatcagatgcgctctcagttccaggagatacaagaccagctgactgccaccatcagatgtacgaaagaaatggagggtgatacacagaaactggaagtggagcatgtgatgatgaggaaaatcatcaagaagcaggatgatcagatcgagcgcctcgagaagattctccagcactcctccctattattactgaactttgagacttag

SEQ ID NO: 62672 - protein, 2633 aa, Artificial Sequence
  derived and/or modified sequence
MPVTEKDLAEDAPWKKIQQNTFTRWCNEHLKCVNKRIGNLQTDLSDGLRLIALLEVLSQKRMYRKYHQRPTFRQMQLENVSVALEFLDRESIKLVSIDSKAIVDGNLKLILGLVWTLILHYSISMPVWEDEGDDDAKKQTPKQRLLGWIQNKIPYLPITNFNQNWQDGKALGALVDSCAPGLCPDWESWDPQKPVDNAREAMQQADDWLGVPQVITPEEIIHPDVDEHSVMTYLSQFPKAKLKPGAPLKPKLNPKKARAYGRGIEPTGNMVKQPAKFTVDTISAGQGDVMVFVEDPEGNKEEAQVTPDSDKNKTYSVEYLPKVTGLHKVTVLFAGQHISKSPFEVSVDKAQGDASKVTAKGPGLEAVGNIANKPTYFDIYTAGAGVGDIGVEVEDPQGKNTVELLVEDKGNQVYRCVYKPMQPGPHVVKIFFAGDTIPKSPFVVQVGEACNPNACRASGRGLQPKGVRIRETTDFKVDTKAAGSGELGVTMKGPKGLEELVKQKDFLDGVYAFEYYPSTPGRYSIAITWGGHHIPKSPFEVQVGPEAGMQKVRAWGPGLHGGIVGRSADFVVESIGSEVGSLGFAIEGPSQAKIEYNDQNDGSCDVKYWPKEPGEYAVHIMCDDEDIKDSPYMAFIHPATGGYNPDLVRAYGPGLEKSGCIVNNLAEFTVDPKDAGKAPLKIFAQDGEGQRIDIQMKNRMDGTYACSYTPVKAIKHTIAVVWGGVNIPHSPYRVNIGQGSHPQKVKVFGPGVERSGLKANEPTHFTVDCTEAGEGDVSVGIKCDARVLSEDEEDVDFDIIHNANDTFTVKYVPPAAGRYTIKVLFASQEIPASPFRVKVDPSHDASKVKAEGPGLSKAGVENGKPTHFTVYTKGAGKAPLNVQFNSPLPGDAVKDLDIIDNYDYSHTVKYTPTQQGNMQVLVTYGGDPIPKSPFTVGVAAPLDLSKIKLNGLENRVEVGKDQEFTVDTRGAGGQGKLDVTILSPSRKVVPCLVTPVTGRENSTAKFIPREEGLYAVDVTYDGHPVPGSPYTVEASLPPDPSKVKAHGPGLEGGLVGKPAEFTIDTKGAGTGGLGLTVEGPCEAKIECSDNGDGTCSVSYLPTKPGEYFVNILFEEVHIPGSPFKADIEMPFDPSKVVASGPGLEHGKVGEAGLLSVDCSEAGPGALGLEAVSDSGTKAEVSIQNNKDGTYAVTYVPLTAGMYTLTMKYGGELVPHFPARVKVEPAVDTSRIKVFGPGIEGKDVFREATTDFTVDSRPLTQVGGDHIKAHIANPSGASTECFVTDNADGTYQVEYTPFEKGLHVVEVTYDDVPIPNSPFKVAVTEGCQPSRVQAQGPGLKEAFTNKPNVFTVVTRGAGIGGLGITVEGPSESKINCRDNKDGSCSAEYIPFAPGDYDVNITYGGAHIPGSPFRVPVKDVVDPSKVKIAGPGLGSGVRARVLQSFTVDSSKAGLAPLEVRVLGPRADDTDSQSWRSPLKALSEFFKGDPKGDFNKTGLVEPVNVVDNGDGTHTVTYTPSQEGPYMVSVKYADEEIPRSPFKVKVLPTYDASKVTASGPGLSSYGVPASLPVDFAIDARDAGEGLLAVQITDQEGKPKRAIVHDNKDGTYAVTYIPDKTGRYMIGVTYGGDDIPLSPYRIRATQTGDASKCLATGPGIASTVKTGEEVGFVVDAKTAGKGKVTCTVLTPDGTEAEADVIENEDGTYDIFYTAAKPGTYVIYVRFGGVDIPNSPFTVMATDGEVTAVEEAPVNACPPGFRPWVTEEAYVPVSDMNGLGFKPFDLVIPFAVRKGEITGEVHMPSGKTATPEIVDNKDGTVTVRYAPTEVGLHEMHIKYMGSHIPESPLQFYVNYPNSGSVSAYGPGLVYGVANKTATFTIVTEDAGEGGLDLAIEGPSKAEISCIDNKDGTCTVTYLPTLPGDYSILVKYNDKHIPGSPFTAKITDDSRRCSQVKLGSAADFLLDISETDLSSLTASIKAPSGRDEPCLLKRLPNNHIGISFIPREVGEHLVSIKKNGNHVANSPVSIMVVQSEIGDARRAKVYGRGLSEGRTFEMSDFIVDTRDAGYGGISLAVEGPSKVDIQTEDLEDGTCKVSYFPTVPGVYIVSTKFADEHVPGSPFTVKISGEGRVKESITRTSRAPSVATVGSICDLNLKIPEINSSDMSAHVTSPSGRVTEAEIVPMGKNSHCVRFVPQEMGVHTVSVKYRGQHVTGSPFQFTVGPLGEGGAHKVRAGGPGLERGEAGVPAEFSIWTREAGAGGLSIAVEGPSKAEITFDDHKNGSCGVSYIAQEPGNYEVSIKFNDEHIPESPYLVPVIAPSDDARRLTVMSLQESGLKVNQPASFAIRLNGAKGKIDAKVHSPSGAVEECHVSELEPDKYAVRFIPHENGVHTIDVKFNGSHVVGSPFKVRVGEPGQAGNPALVSAYGTGLEGGTTGIQSEFFINTTRAGPGTLSVTIEGPSKVKMDCQETPEGYKVMYTPMAPGNYLISVKYGGPNHIVGSPFKAKVTGQRLVSPGSANETSSILVESVTRSSTETCYSAIPKASSDASKVTSKGAGLSKAFVGQKSSFLVDCSKAGSNMLLIGVHGPTTPCEEVSMKHVGNQQYNVTYVVKERGDYVLAVKWGEEHIPGSPFHVTVP

SEQ ID NO: 62673 - DNA, 404 bp, Artificial Sequence
  derived and/or modified sequence
cttggcggtggaaggccccagcaaagtggacatccagacggaggacctggaagatggcacctgcaaagtctcctacttccctaccgtgcctggggtttatatcgtctccaccaaattcgctgacgagcacgtgcctgaaatcaacagcagtgatatgtcggcccacgtcaccagcccctctggccgtgtgactgaggcagagattgtgcccatggggaagaactcacactgcgtccggtttgtgccccaggagatgggcgtgcacacggtcagcgtcaagtaccgtgggcagcacgtcaccggcagccccttccagttcaccgtggggccacttggtgaaggaggcgcccacaaggtgcgggcaggaggccctggcctggagagaggagaagcgggagtcccag

SEQ ID NO: 62674 - DNA, 8079 bp, Artificial Sequence
  derived and/or modified sequence
gcggccaggggcgggcggccgcagagcagcaccggccgtggctccggtagcagcaagttcgaaccccgctcccgctccgcttcggttctcgctccttcggcccttgggcctccaaacaccagtccccggcagctcgttgcgcattgcgctctccccgccaccaggatgccggtaaccgagaaggatctagctgaggacgcgccttggaagaagatccagcagaacacgttcacacgctggtgcaacgagcacctcaagtgcgtgaacaaacgcatcggcaacctgcagaccgacctgagcgacgggctgcggctcatcgcgctgctcgaggtgctcagccagaagcgcatgtaccgcaagtaccatcagcggcccacctttcgccagatgcagctcgagaatgtgtccgtggcgctcgagttcctggaccgtgagagcatcaagctcgtgtccatcgatagcaaagccattgtggatgggaacctgaagctcatcttgggtctggtgtggacgctgatcctccactactccatctccatgcccgtgtgggaggatgaaggggatgatgatgccaagaagcagacgccaaagcagaggctgctggggtggattcagaacaagatcccctacttgcccatcaccaactttaaccagaactggcaagacggcaaagccctgggagccctggtagacagctgtgctccaggtctgtgcccagactgggaatcctgggacccgcagaagcctgtggataatgcacgagaagccatgcagcaggcagatgactggctgggtgtcccacaggtcatcactcctgaagaaatcattcacccggatgtggacgagcactcagttatgacttacctgtcccagttccccaaagccaagctcaagccgggggctcctctcaaacccaaactcaacccgaagaaagccagggcctatggcagaggaatcgagcccactggaaacatggtgaagcagccagccaagttcactgtggacaccatcagcgccgggcaaggagacgtgatggtgtttgttgaggacccagaagggaacaaagaggaggcacaagtgacccctgacagtgacaagaacaagacatactctgtggagtatctgcccaaggtcaccgggctacacaaagtcacagtcctctttgcaggacagcacatctccaagagcccatttgaagtgagtgttgacaaggcccagggagatgccagtaaagtcactgcaaaaggtccagggttggaagctgtagggaacatcgccaataagcccacctactttgacatctatacggcaggagctggtgtgggtgacattggtgtggaggtggaagatccccaggggaagaacaccgtggagttgctcgtggaagacaaaggaaaccaggtgtatcgatgtgtgtacaaacccatgcagcctggccctcacgtggtcaagatcttctttgctggggacactattcctaagagtcccttcgttgtgcaggttggggaagcctgcaatccaaatgcctgccgggccagtggccgaggcctacaacccaaaggcgtccgtatccgggagaccacagatttcaaggttgacaccaaagctgcaggaagtggggagctcggtgtaaccatgaagggtcctaagggtctggaggagctggtgaagcagaaagactttctggatggggtctacgcattcgagtattaccccagcaccccggggagatacagcattgccatcacatgggggggacaccacattccaaagagcccctttgaagttcaagttggccctgaagcgggtatgcagaaagtccgtgcttggggccctgggctccatggtgggattgtcgggcggtcagcggacttcgtggtagaatccattggctctgaagtggggtctctggggtttgccattgaaggcccctctcaggcaaagattgagtacaacgaccagaatgatggatcgtgtgatgtcaaatactggcccaaggagcctggcgaatatgctgttcacatcatgtgtgacgacgaagacatcaaggacagcccgtacatggccttcatccacccagccacgggaggctacaaccctgatctggttcgagcatacgggccaggtttggagaaatctggatgcattgtcaacaacctggccgagttcactgtggatcctaaggatgctggaaaagctcccttaaagatatttgctcaggatggggaaggccaacgcattgacatccagatgaagaaccggatggacggcacatatgcatgctcatacaccccggtgaaggccatcaagcacaccattgctgtggtctggggaggcgtgaacatcccgcacagcccctacagggtcaacatcgggcaaggtagccatcctcagaaggtcaaagtgtttgggccaggtgtggagagaagtggtctgaaggcaaatgaacctacacacttcacggtggactgtactgaggctggggaaggtgatgtcagtgttggcattaagtgtgatgcccgggtgttaagtgaagatgaggaagacgtggattttgacattattcacaatgccaatgatacgttcacagtcaaatatgtgcctcctgctgctgggcgatacactatcaaagttctctttgcatctcaggaaatccccgccagccctttcagagtcaaagttgacccttcccacgatgccagcaaagtgaaggcagaaggcccagggctcagcaaagcaggtgtggaaaatgggaaaccgacccacttcactgtctacaccaagggggctgggaaagccccgctcaacgtgcagttcaacagccctcttcctggcgatgcagtgaaggatttggatatcatcgataattatgactactctcacacggttaaatatacacccacccaacagggcaacatgcaggttctggtgacttacggtggcgatcccatccctaaaagccctttcactgtgggtgttgctgcaccgctggatctgagcaagataaaactcaatgggctggaaaacagggtggaagttgggaaggatcaggagttcaccgttgataccaggggggcaggaggccaggggaagctggacgtgacaatcctcagcccctctcggaaggtcgtgccatgcctagtgacacctgtgacaggccgggagaacagcacggccaagttcatccctcgggaggaggggctgtatgctgtagacgtgacctacgatggacaccctgtgcccgggagcccctacacagtggaggcctcgctgccaccagatcccagcaaggtgaaggcccacggtcccggcctcgaaggtggtctcgtgggcaagcctgccgagttcaccatcgataccaaaggagctggtactggaggtctgggcttaacggtggaaggtccgtgcgaggccaaaatcgagtgctccgacaatggtgatgggacctgctccgtctcttaccttcccacaaaacccggggagtacttcgtcaacatcctctttgaagaagtccacatacctgggtctcccttcaaagctgacattgaaatgccctttgacccctctaaagtcgtggcatcggggccaggtctcgagcacgggaaggtgggtgaagctggcctccttagcgtcgactgctcggaagcgggaccgggggccctgggcctggaagctgtctcggactcgggaacaaaagccgaagtcagtattcagaacaacaaagatggcacctacgcggtgacctacgtgcccctgacggccggcatgtacacgttgaccatgaagtatggtggcgaactcgtgccacacttccccgcccgggtcaaggtggagcccgccgtggacaccagcaggatcaaagtctttggaccaggaatagaagggaaagatgtgttccgggaagctaccaccgactttacagttgactctcggccgctgacccaggttgggggtgaccacatcaaggcccacattgccaacccctcaggggcctccaccgagtgctttgtcacagacaatgcggatgggacctaccaggtggaatacacaccctttgagaaaggtctccatgtagtggaggtgacatatgatgacgtgcctatcccaaacagtcccttcaaggtggctgtcactgaaggctgccagccatctagggtgcaagcccaaggacctggattgaaagaggcctttaccaacaagcccaatgtcttcaccgtggttaccagaggcgcaggaattggtgggcttggcataactgttgagggaccatcagagtcgaagataaattgcagagacaacaaggatggcagctgcagtgctgagtacattcctttcgcaccgggggattacgatgttaatatcacatatggaggagcccacatccccggcagccccttcagggttcctgtgaaggatgttgtggaccccagcaaggtcaagattgccggccccgggctgggctcaggcgtccgagcccgtgtcctgcagtccttcacggtggacagcagcaaggctggcctggctccgctggaagtgagggttctgggcccacgagctgacgacacggattcccagtcatggcgcagccccttgaaagccctttcagagttctttaaaggtgacccgaagggtgactttaataagacaggcttggtggagccagtgaacgtggtggacaatggagatggcacacacacagtaacctacaccccatctcaggagggaccttacatggtctcagttaaatatgctgatgaagagattcctcgcagtcccttcaaggtcaaggtccttcccacatatgatgccagcaaagtgactgccagtggccccggccttagttcctatggtgtgcctgccagtctacctgtggactttgcaattgatgcccgagatgccggggaaggcctgcttgctgttcaaataacggaccaagaaggaaaacccaaaagagccattgtccatgacaataaagatggcacgtatgctgtcacctacatccccgacaagactgggcgctatatgattggagtcacctacgggggtgacgacatcccactttctccttatcgcatccgagccacacagacgggtgatgccagcaagtgcctggccacgggtcctggaatcgcctccactgtgaaaactggcgaagaagtaggctttgtggttgatgccaagactgccgggaagggtaaagtgacctgcacggttctgaccccagatggcactgaggccgaggccgatgtcattgagaatgaagatggaacctatgacatcttctacacagctgccaagccgggcacatatgtgatctatgtgcgcttcggtggtgttgatattcctaacagccccttcactgtcatggccacagatggggaagtcacagccgtggaggaggcaccggtaaatgcatgtccccctggattcaggccctgggtgaccgaagaggcctatgtcccagtgagtgacatgaacggcctgggatttaagccttttgacctggtcattccgtttgctgtcaggaaaggagaaatcactggagaggtccacatgccttctgggaagacagccacacctgagattgtggacaacaaggacggcacggtcactgttagatatgcccccactgaggtcgggctccatgagatgcacatcaaatacatgggcagccacatccctgagagcccactccagttctacgtgaactaccccaacagtggaagtgtttctgcatacggtccaggcctcgtgtatggagtggccaacaaaactgccaccttcaccatcgtcacagaggatgcaggagaaggtggtctggacttggctattgagggcccctcaaaagcagaaatcagctgcattgacaataaagatgggacatgcacagtgacctacctgccgactctgccaggcgactacagcattctggtcaagtacaatgacaagcacatccctggcagccccttcacagccaagatcacagatgacagcaggcggtgctcccaggtgaagttgggctcagccgctgacttcctgctcgacatcagtgagactgacctcagcagcctgacggccagcattaaggccccatctggccgagacgagccctgtctcctgaagaggctgcccaacaaccacattggcatctccttcatcccccgggaagtgggcgaacatctggtcagcatcaagaaaaatggcaaccatgtggccaacagccccgtgtctatcatggtggtccagtcggagattggtgacgcccgccgagccaaagtctatggccgcggcctgtcagaaggccggactttcgagatgtctgacttcatcgtggacacaagggatgcaggttatggtggcatatccttggcggtggaaggccccagcaaagtggacatccagacggaggacctggaagatggcacctgcaaagtctcctacttccctaccgtgcctggggtttatatcgtctccaccaaattcgctgacgagcacgtgcctgggagcccatttaccgtgaagatcagtggggagggaagagtcaaagagagcatcacccgcaccagtcgggccccgtccgtggccactgtcgggagcatttgtgacctgaacctgaaaatcccagaaatcaacagcagtgatatgtcggcccacgtcaccagcccctctggccgtgtgactgaggcagagattgtgcccatggggaagaactcacactgcgtccggtttgtgccccaggagatgggcgtgcacacggtcagcgtcaagtaccgtgggcagcacgtcaccggcagccccttccagttcaccgtggggccacttggtgaaggaggcgcccacaaggtgcgggcaggaggccctggcctggagagaggagaagcgggagtcccagctgagttcagcatttggacccgggaagcaggcgctggaggcctctccatcgctgttgagggccccagtaaggccgagattacattcgatgaccataaaaatgggtcgtgcggtgtatcttatattgcccaagagcctggtaactacgaggtgtccatcaagttcaatgatgagcacatcccggaaagcccctacctggtgccggtcatcgcaccctccgacgacgcccgccgcctcactgttatgagccttcaggaatcgggattaaaagttaaccagccagcatcctttgctataaggttgaatggcgcaaaaggcaagattgatgcaaaggtgcacagcccctctggagccgtggaggagtgccacgtgtctgagctggagccagataagtatgctgttcgcttcatccctcatgagaatggtgtccacaccatcgatgtcaagttcaatgggagccacgtggttggaagccccttcaaagtgcgcgttggggagcctggacaagcggggaaccctgccctggtgtccgcctatggcacgggactcgaagggggcaccacaggtatccagtcggaattctttattaacaccacccgagcaggtccagggacattatccgtcaccatcgaaggcccatccaaggttaaaatggattgccaggaaacacctgaagggtacaaagtcatgtacacccccatggctcctggtaactacctgatcagcgtcaaatacggtgggcccaaccacatcgtgggcagtcccttcaaggccaaggtgacaggccagcgtctagttagccctggctcagccaacgagacctcatccatcctggtggagtcagtgaccaggtcgtctacagagacctgctatagcgccattcccaaggcatcctcggacgccagcaaggtgacctctaagggggcagggctctcaaaggcctttgtgggccagaagagttccttcctggtggactgcagcaaagctggctccaacatgctgctgatcggggtccatgggcccaccaccccctgcgaggaggtctccatgaagcatgtaggcaaccagcaatacaacgtcacatacgtcgtcaaggagaggggcgattatgtgctggctgtgaagtggggggaggaacacatccctggcagcccttttcatgtcacagtgccttaaaacagttttctc

SEQ ID NO: 62675 - DNA, 408 bp, Artificial Sequence
  derived and/or modified sequence
tagctggccgttgaggggccttccaaggttgacattcagaccgaggacttggaagatggaacatgtaaagtctcttactttccgactgttccgggcgtgtacatcgtttccactaagttcgccgacgagcacgtccctgaaatcaactcgagcgacatgtccgcacatgtcacatctcccagtggacgcgtaacagaagccgagatcgttcccatgggaaagaactctcactgtgttcgtttcgttcctcaggagatgggcgtgcacaccgtttcagtcaaatacagagggcagcatgtcaccggtagccctttccagttcaccgttggcccactaggtgaaggcggtgctcataaggtgcgagcaggagggcctgggctggagagaggtgaagctggggtcccctag

SEQ ID NO: 62676 - DNA, 7902 bp, Artificial Sequence
  derived and/or modified sequence
atgcctgttacggaaaaggacctggccgaggacgctccctggaagaaaatacagcagaacactttcacccgttggtgcaacgagcacctgaaatgtgtgaataagagaatcggaaatctccagacggatttgtcagacgggctgaggttgatcgccttgttagaggtattgtcacaaaagagaatgtatcgaaaatatcatcagcgcccaaccttccgtcaaatgcagcttgaaaacgtatctgtcgcactagaattcctggaccgcgagagtatcaagctcgtcagcatcgattccaaggccatagtggacgggaacctgaaattgatactggggctggtttggaccctcattctgcattattctattagtatgcccgtgtgggaggatgaaggcgacgacgacgctaagaagcagacgcctaagcagcgactactgggctggattcagaataagataccttacctccccataacgaatttcaatcagaactggcaggatggaaaagccctaggggcactcgttgactcctgtgcccccgggctgtgccccgattgggagagttgggatccacagaaacctgttgataatgccagagaggctatgcagcaggccgatgattggctgggagtgccacaagtaataaccccagaggagataatccatccagacgtggatgaacacagtgtcatgacttacctctcacagttcccaaaagctaagctcaagccgggcgctccactgaaaccgaaactcaatcctaaaaaggcaagagcatatgggcggggtatcgaaccaactggaaacatggtgaagcagcctgccaaattcacagtggatactatttcggccggccagggagatgtgatggtcttcgttgaggaccccgaaggcaacaaggaggaggcccaggttacacctgatagcgacaagaacaagacgtattccgttgagtacttgccgaaagtaactggcctgcataaagtgactgtgctatttgcaggacagcatatcagcaagtccccctttgaggtgtcagtcgataaggctcagggtgacgccagcaaggtgactgccaaaggcccggggctcgaggcagtagggaacattgccaataagcctacctacttcgatatttatactgctggagccggggttggggacatcggggtagaggtcgaagacccgcagggcaaaaacacagttgaacttttggtcgaggataaaggcaatcaggtttaccggtgtgtttataagccaatgcagccaggccctcacgtggtgaagatcttcttcgctggtgacacaatacccaagtctcccttcgtagtgcaagtgggtgaggcctgcaatcctaatgcatgtcgcgcatcagggagaggactccagcccaaaggagttcgtatacgcgaaaccacggactttaaggtggacaccaaggctgcaggatctggcgagcttggtgttacaatgaaaggacccaagggcttagaagaacttgtgaaacagaaggatttcctagacggagtctatgcctttgagtactatccatcaacccccggcagatatagcattgcaattacttggggtggccatcatatccctaagtcccctttcgaggttcaggtcggcccggaggctggcatgcagaaggtgcgagcatgggggccagggctgcacggcggaattgtggggcgctccgctgacttcgtggtggaaagcatcggcagcgaggtgggctccctcggatttgcaatcgagggtccctcgcaagctaagatcgagtataatgatcagaatgacgggtcctgcgacgttaaatattggccaaaggagccgggcgagtacgcagttcatataatgtgcgatgatgaggacatcaaggattcaccatatatggccttcatccatcctgctactggaggctacaatcccgatctggtacgagcttatggacctgggttagaaaagtcaggctgtattgttaacaatctggcggagtttactgtcgaccctaaggatgctggcaaagcgcccctgaaaatttttgcccaagatggcgaaggccagcgaatcgacattcagatgaagaataggatggatggaacatacgcgtgtagctataccccagtaaaggctattaaacatactatcgctgtggtgtgggggggagtgaacataccccactctccatacagagtaaacattggtcaggggagtcatccccagaaggtgaaagtgttcggccctggcgtggagaggtccgggttgaaggcaaacgaaccaacccattttactgttgactgcaccgaggccggtgaaggcgacgtgagcgtgggaatcaaatgcgacgctcgcgtgttgagtgaggatgaggaggatgtggatttcgacatcatccataatgccaacgacacgtttactgtgaaatatgtgccccccgccgccggtcggtacacaatcaaagttctttttgcttcacaggagatcccagcgtcccctttccgcgtgaaagttgacccaagccacgatgcctcgaaagtgaaagcagagggccccggactgtccaaggccggggtggagaacggcaagccaactcatttcacggtatatacaaaaggtgccgggaaagcccccttgaatgtgcaatttaattcgcctcttcctggggacgcagtgaaggacttggatataatcgacaattacgactactcccacacagttaagtacactccaacacagcagggcaatatgcaggttttggtgacatatggcggagacccaattccaaagagcccgtttaccgtaggcgttgctgcacccctggacctttccaaaattaagttgaacggattggagaatcgtgttgaggtcggaaaagaccaagagttcacagtggacactcgaggagccggcggccagggcaaattggacgtcactatactctccccgagccggaaggtcgtcccgtgtctcgtgaccccagtgacagggcgggaaaactctaccgccaagttcatacctcgggaggaggggctctacgctgtcgacgtcacctatgacggacaccccgtgcccggttccccttacactgttgaagcaagtctgccacctgatccctcgaaggtgaaggcacacgggccagggctggaggggggtctagtggggaaaccagctgaattcactatcgacactaagggtgccggaacagggggacttggcctgacggtggaagggccatgtgaggctaaaatcgaatgtagcgataatggcgatggaacatgcagtgtctcctacctgccgaccaaacctggcgagtacttcgtgaacatactattcgaagaggtgcacattcccggatccccattcaaagcagacatcgaaatgcccttcgatccaagtaaggtggtcgcctcgggtcctggtttagaacacggaaaagtgggcgaagctggcttgttgtctgtcgactgctccgaggcaggtccaggcgcccttggcctggaggctgtctccgatagtggaactaaggccgaagtctctatacaaaacaacaaggatggaacgtatgccgttacctatgtccctctgaccgctgggatgtacaccctgaccatgaagtatgggggtgagctcgtgccccatttccctgcacgtgtgaaggtcgagccagcagtggacacctccagaatcaaggtgtttgggcccggaatagagggcaaggatgtgtttagagaagcaacaactgatttcaccgtggactccagaccactgactcaggtggggggagatcacattaaggctcacattgctaacccttccggagctagtacggaatgtttcgttacggacaacgccgatggcacttatcaggtggagtacacacccttcgagaaaggtctccatgtggtggaagttacatacgacgacgtccccatcccgaacagtccgtttaaggtggcagtgaccgaaggctgccagccaagtcgagtgcaggcgcagggccccggcctgaaggaagcctttaccaataagcccaacgtgttcacagttgtcacaagaggcgcaggcattggtgggctgggaattaccgtcgaaggtccatctgagtcaaagataaattgtagggataacaaggatggcagctgcagcgcagagtatatacctttcgctccgggcgactacgacgtaaacataacttacggtggtgcccacatccctgggtcaccctttcgagtgccagttaaagatgtggtcgatccctccaaggtgaaaatagctgggccgggactgggtagtggagttcgtgctagagtcctgcaatcctttaccgtggactcaagtaaagccgggttagcacccctcgaggtccgagtactcgggcccagggctgatgacacagattcccagtcctggcgcagcccacttaaagctctgtccgaatttttcaaaggtgatcctaaaggcgacttcaacaagactggtctggtggaacccgttaatgtagtggacaatggtgacggtacacacactgtgacatatacaccatcccaagagggaccttatatggtgtctgtcaagtacgctgacgaagaaatcccgcggtctccttttaaagtcaaggttctgccaacttacgacgcctccaaggtgactgcttccgggccaggactgtcctcgtacggggtcccagcctctttgcctgttgatttcgcaattgatgccagagatgcaggggagggccttcttgctgtgcagataaccgatcaggaggggaagccaaagcgtgctattgtccatgacaataaggacggcacctacgcggtgacctatatccccgacaagacaggccgatatatgataggggtgacatacggcggtgacgacatcccgttgtcaccctatcgcattagggcgacgcagaccggtgacgcatctaagtgtttagccaccggccccggaatcgcgtctaccgtcaagaccggggaagaggttgggttcgtcgtagatgccaagaccgctggcaaaggcaaagtgacgtgtacagttctgacacctgacgggaccgaggcagaagcagatgtgattgagaacgaagacgggacctacgacattttttataccgccgccaagccagggacgtacgtcatttatgtgagattcgggggcgtggacattcctaatagtccattcactgtgatggcgaccgacggggaggttactgccgtggaagaagctcccgtaaatgcctgtccacctggatttcgaccctgggtcacagaggaggcatacgttccagtttcggatatgaatggacttggatttaaaccctttgacttggtaataccctttgcagtgcgaaagggcgaaatcacaggtgaagttcatatgcctagcggcaaaacggccacaccggagattgttgataacaaggacggtacagtgacggtgcgatatgcacctactgaagttgggctgcacgaaatgcacattaagtacatgggttcacacatcccagagagccctctgcagttctacgtgaattaccctaactctgggtccgtgtctgcctatggtccggggttggtgtatggagtcgccaacaagacagccaccttcactattgtaacagaggacgctggagaaggagggctggacttagctatagaaggtcctagcaaggccgagatttcatgcattgacaataaggatggcacctgtaccgtcacctaccttcccaccctgcccggcgattattccattctggtcaagtacaacgataagcacatccctggatccccattcacagccaagataaccgacgactctagacgatgctcccaggtgaaactcggtagcgcagctgacttcttactggatatctcagaaacagatctgagttctctaacagcctccattaaggctccatccggccgcgatgagccttgtttgctgaaacggctgcccaataaccatatcggcatcagctttataccccgagaggtgggagagcatctggtaagcataaagaagaacgggaaccacgtagcaaattcccctgtgagtatcatggtggtccagtctgaaataggggatgcaaggcgggccaaagtatatgggcgaggcctgagtgagggccgcacgtttgagatgtccgatttcatcgttgacaccagggacgccggatacggaggaatcagtctcgcagtggaaggcccaagtaaagtcgatatacaaacagaagatctggaggatggtacctgtaaagtgagctatttccctacagtaccaggagtctacatcgtatcaaccaagtttgctgacgaacacgtaccggggagcccattcacagtaaaaatctctggggaaggcagagtgaaggaaagtattactagaacatcccgagcccctagcgtcgctacagtgggcagcatctgtgacctgaacctcaagatcccagagatcaatagctctgacatgagcgcacatgtcacctctccaagcgggagggtcaccgaggccgaaatcgtccccatgggcaaaaatagccattgtgtgcgttttgtcccgcaggaaatgggtgtgcataccgtgtctgtgaaatataggggacagcatgtcacaggctcaccatttcaatttaccgtggggccactgggtgaggggggcgctcacaaggtgcgggccggcggtcccggtcttgaaagaggtgaagccggcgtccctgccgagtttagcatctggacccgggaagcgggggctgggggactatctatcgctgttgagggcccttctaaggctgaaatcaccttcgacgatcacaaaaatggatcctgtggcgtgtcctacatagctcaggaacccgggaattatgaagtttccattaaattcaacgacgagcacattccagaatctccctacctggtccctgtcatcgcgcccagtgacgatgccaggagactaacagtcatgagtctgcaggagagcgggctaaaggtgaatcagccagcttccttcgcaattagactcaatggcgccaagggtaaaatcgacgccaaggtgcatagtccatcaggggcagtcgaagagtgccacgtttcagaattggaacccgacaagtacgccgtacgctttatcccccatgagaacggagttcacaccatcgatgtgaaattcaatggctcccatgtcgtaggcagccccttcaaggtgcgggtgggtgaacccggtcaggcaggaaatcctgccctggtttctgcttatggtacgggcctggagggaggcactaccgggattcagtcagaatttttcatcaataccactagagctgggcccggcacacttagtgtgactattgagggcccgagtaaagtgaagatggactgtcaggaaacacccgaggggtataaagtgatgtatacgcccatggcacctggcaattacctcattagtgtgaagtatggagggcctaaccacatcgtcggttcacctttcaaagccaaggtgacgggccagagactcgtgtctcctgggtccgccaacgaaacctccagtattctggtagaaagcgtgaccaggagcagtacagagacttgttattcagctatccctaaggcttctagtgacgctagcaaggtcacctctaagggtgctggcctgtccaaagcttttgtaggtcagaaatcctcctttctcgttgattgctctaaagcgggcagtaacatgctgctcattggcgtgcatggccccactactccgtgcgaagaagtgtctatgaaacacgtgggaaaccagcagtacaatgtgacctatgttgtaaaggagaggggagattacgtgctggcggtcaagtggggcgaggagcatatccctggatcccctttccacgtcacagttccttag

SEQ ID NO: 62677 - DNA, 408 bp, Artificial Sequence
  derived and/or modified sequence
tgactggccgtggagggccccagcaaggtggacatccagacagaggacctggaggatggcacctgcaaggtgtcctacttccccaccgtgcctggggtgtacatcgtgtccaccaagtttgctgatgagcacgtgcctgagatcaacagcagtgacatgtctgcccacgtgaccagccccagcggccgggtgacagaagctgagatcgtgcccatgggcaagaacagccactgtgtgcgctttgtgccccaggagatgggcgtgcacacagtgtctgtgaagtaccggggccagcacgtgacaggcagccccttccagttcaccgtgggccccctgggggagggcggggcccacaaggtgcgggccggcggccctggcctggagcggggggaggccggcgtgccctag

SEQ ID NO: 62678 - DNA, 7902 bp, Artificial Sequence
  derived and/or modified sequence
atgcctgtgacagagaaggacctggccgaggatgccccctggaagaagatccagcagaacaccttcacccgctggtgcaatgagcacctgaagtgtgtgaacaagagaattggcaacctgcagacagacctgagtgatggcctgcggctgattgccctgctggaggtgctgagccagaagaggatgtacaggaagtaccaccagaggcccaccttccggcagatgcagctggagaatgtgtctgtggccctggagttcctggaccgggagagcatcaagctggtgtccattgacagcaaggccatcgtggatggcaacctgaagctgatcctgggcctggtgtggaccctcatcctgcactacagcatctccatgcctgtgtgggaggatgaaggagatgatgatgccaagaagcagacccccaagcagaggctgctgggctggatccagaacaagatcccctacctgcccatcaccaacttcaaccagaactggcaggacggcaaggccctgggcgccctggtggacagctgtgcccctggcctgtgcccagactgggagagctgggacccccagaagcctgtggacaatgcccgggaggccatgcagcaggctgatgactggctgggcgtgccccaggtgatcaccccagaggagatcatccacccagatgtggatgagcacagcgtgatgacctacctgagccagttccccaaggccaagctgaagccaggggcccccctgaagcccaagctgaaccccaagaaggcccgggcctacggccggggcatcgagcccactggaaacatggtgaagcagcctgccaagttcaccgtggacaccatctctgctggccagggagatgtgatggtgtttgtggaggaccctgagggcaacaaggaggaggcccaggtgaccccagacagcgacaagaacaagacctacagcgtggagtacctgcccaaggtgacaggcctgcacaaggtgacagtgctgtttgctggccagcacatcagcaagagcccctttgaggtgtctgtggacaaggcccagggagatgccagcaaggtgacagccaagggccctggcctggaggccgtgggcaacatcgccaacaagcccacctactttgacatctacacagctggggccggcgtgggggacattggagtggaggtggaggacccccagggcaagaacacagtggagctgctggtggaggacaagggcaaccaggtgtaccgctgtgtgtacaagcccatgcagcccggcccccacgtggtgaagatcttctttgctggggacaccatccccaagagcccctttgtggtgcaggtgggggaggcctgcaaccccaatgcctgccgggccagcggccggggcctgcagcccaagggcgtgcgcatccgggagaccacagacttcaaggtggacaccaaggccgccggcagcggggagctgggcgtgaccatgaagggccccaagggcctggaggagctggtgaagcagaaggacttcctggatggagtgtatgcctttgagtactaccccagcaccccaggccgctacagcatcgccatcacctggggcggccaccacatccccaagagcccctttgaggtgcaggtgggccctgaggccggcatgcagaaggtgcgggcctggggccctggcctgcacggcggcatcgtgggccgctctgctgactttgtggtggagagcatcggcagcgaggtgggcagcctgggctttgccatcgagggccccagccaggccaagattgagtacaatgaccagaatgatggcagctgtgatgtgaagtactggcccaaggagcctggagaatatgctgtgcacatcatgtgtgatgatgaggacatcaaggacagcccctacatggccttcatccacccagccaccggcggctacaacccagacctggtgcgggcctacggccctggcctggagaagagcggctgcatcgtgaacaacctggccgagttcaccgtggaccccaaggatgctgggaaggcccccctgaagatctttgcccaggatggagagggccagagaattgacatccagatgaagaacaggatggatggcacctacgcctgcagctacacccctgtgaaggccatcaagcacaccatcgctgtggtgtggggcggcgtgaacatcccccacagcccctacagagtgaacatcggccagggcagccacccccagaaggtgaaggtgtttggacctggggtggagaggagcggcctgaaggccaatgagcccacccacttcaccgtggactgcacagaggccggggagggagatgtgtctgtgggcatcaagtgtgatgcccgggtgctgtctgaagatgaagaagatgtggactttgacatcatccacaatgccaatgacaccttcaccgtgaagtatgtgcccccagctgctggccgctacaccatcaaggtgctgtttgccagccaggagatcccagccagccccttccgggtgaaggtggaccccagccatgatgccagcaaggtgaaggccgagggccctggcctgagcaaggccggcgtggagaatggcaagcccacccacttcaccgtgtacaccaagggagctgggaaggcccccctgaatgtgcagttcaacagccccctgcctggagatgctgtgaaggacctggacatcatcgacaactatgactacagccacacagtgaagtacacccccacccagcagggcaacatgcaggtgctggtgacctacggcggggaccccatccccaagagccccttcaccgtgggcgtggccgcccccctggacctgagcaagatcaagctgaatggcctggagaacagagtggaggtgggcaaggaccaggagttcaccgtggacaccagaggagctgggggccagggcaagctggatgtgaccatcctgagccccagcaggaaggtggtgccctgcctggtgacccctgtgacaggccgggagaacagcacagccaagttcatcccccgggaggagggcctgtatgctgtggatgtgacctatgatggccaccctgtgcccggcagcccctacacagtggaggccagcctgcccccagaccccagcaaggtgaaggcccacggccctggcctggagggcggcctggtgggcaagccagctgagttcaccatcgacaccaagggggccggcaccggcggcctgggcctgactgtggagggcccctgtgaggccaagattgagtgcagcgacaatggagatggcacctgcagcgtgtcctacctgcccaccaagccaggagagtactttgtgaacatcctgtttgaggaggtgcacatccctggcagccccttcaaggctgacatcgagatgccctttgaccccagcaaggtggtggccagcggccctggcctggagcacggcaaggtgggggaggccggcctgctgtctgtggactgcagcgaggccggccctggggccctgggcctggaggccgtgtctgacagcggcaccaaggccgaggtgtccatccagaacaacaaggatggcacctatgctgtgacctacgtgcccctgacagctggcatgtacaccctgaccatgaagtatggaggagagctggtgccccacttccctgcccgggtgaaggtggagcctgctgtggacaccagccgcatcaaggtgtttggacctggcatcgagggcaaggatgtgttccgggaggccaccacagacttcaccgtggacagccggcccctgacccaggtgggcggggaccacatcaaggcccacatcgccaaccccagcggggccagcacagaatgttttgtgacagacaatgctgatggcacctaccaggtggagtacaccccatttgagaagggcctgcacgtggtggaggtgacctatgatgatgtgcccatccccaacagccccttcaaggtggccgtgacagagggctgccagcccagccgggtgcaggcccagggccctggcctgaaggaggccttcaccaacaagcccaacgtgttcaccgtggtgaccaggggggccggcatcggcggcctgggcatcaccgtggagggccccagcgagagcaagatcaactgccgggacaacaaggatggcagctgcagcgctgagtacatcccctttgcccctggggactatgatgtgaacatcacctatggaggagcccacatccctggcagccccttccgggtgcctgtgaaggatgtggtggaccccagcaaggtgaagattgctggccctggcctgggcagcggcgtgcgggcccgggtgctgcagagcttcaccgtggacagcagcaaggccggcctggcccccctggaggtgcgggtgctgggccccagggcagatgacacagacagccagagctggaggagccccctgaaggccctgtctgagttcttcaagggggaccccaagggggacttcaacaagacaggcctggtggagcctgtgaatgtggtggacaatggagatggcacccacacagtgacctacacccccagccaggagggcccctacatggtgtctgtgaagtatgcagatgaggagatccccaggagccccttcaaggtgaaggtgctgcccacctatgatgccagcaaggtgacagccagcggccctggcctgagcagctatggagtgcctgccagcctgcctgtggactttgccattgatgccagagatgctggggagggcctgctggccgtgcagatcacagaccaggagggcaagcccaagagggccatcgtgcatgacaacaaggatggcacctatgctgtgacctacatcccagacaagacaggccgctacatgattggagtgacctatggaggagatgacatccccctgagcccctaccgcatccgggccacccagacaggagatgccagcaagtgcctggccactggacctggcatcgccagcacagtgaagacaggagaggaggtgggctttgtggtggatgccaagacagctgggaagggcaaggtgacctgcaccgtgctgaccccagatggaacagaagctgaggctgatgtgattgaaaatgaagatggcacctatgacatcttctacacagctgccaagccaggcacctacgtgatctacgtgcgctttggaggagtggacatccccaacagccccttcaccgtgatggccacagatggagaggtgacagctgtggaggaggcccctgtgaatgcctgccccccaggcttccggccctgggtgacagaggaggcctacgtgcctgtgtctgacatgaatggcctgggcttcaagccctttgacctggtgatcccctttgctgtgaggaagggggagatcaccggggaggtgcacatgcccagcggcaagacagccaccccagaaattgtggacaacaaggatggcaccgtgacagtgcgctatgcccccacagaggtgggcctgcacgagatgcacatcaagtacatgggcagccacatccctgagagccccctgcagttctacgtgaactaccccaacagcggctctgtgtctgcctacggccctggcctggtgtatggagtggccaacaagacagccaccttcaccatcgtgacagaagatgctggggagggcggcctggacctggccatcgagggccccagcaaggccgagatcagctgcatcgacaacaaggatggcacctgcaccgtgacctacctgcccaccctgcccggggactacagcatcctggtgaagtacaatgacaagcacatccctggcagccccttcaccgccaagatcacagatgacagccgccgctgcagccaggtgaagctgggcagcgctgctgacttcctgctggacatcagcgagacagacctgagcagcctgacagccagcatcaaggcccccagcggcagagatgagccctgcctgctgaagaggctgcccaacaaccacatcggcatctccttcatcccccgggaggtgggggagcacctggtgtccatcaagaagaatggaaatcatgtggccaacagccctgtgtccatcatggtggtgcagagcgagattggagatgcccggcgggccaaggtgtatggccggggcctgtctgagggccgcacctttgagatgtctgacttcatcgtggacaccagagatgctggctatggaggcatcagcctggccgtggagggccccagcaaggtggacatccagacagaggacctggaggatggcacctgcaaggtgtcctacttccccaccgtgcctggggtgtacatcgtgtccaccaagtttgctgatgagcacgtgcccggcagccccttcaccgtgaagatctctggagagggccgggtgaaggagagcatcaccaggaccagccgggcccccagcgtggccaccgtgggcagcatctgtgacctgaacctgaagatccctgagatcaacagcagtgacatgtctgcccacgtgaccagccccagcggccgggtgacagaggccgagatcgtgcccatgggcaagaacagccactgtgtgcgctttgtgccccaggagatgggcgtgcacacagtgtctgtgaagtaccggggccagcacgtgacaggcagccccttccagttcaccgtgggccccctgggggagggcggggcccacaaggtgcgggccggcggccctggcctggagcggggggaggccggcgtgcctgctgagttcagcatctggacccgggaggccggggccggcggcctgagcattgctgtggagggccccagcaaggccgagatcacctttgatgaccacaagaatggcagctgtggggtgtcctacatcgcccaggagcccggcaactatgaggtgtccatcaagttcaatgatgagcacatccctgagagcccctacctggtgcctgtgattgcccccagtgatgatgcccggcggctgactgtgatgagcctgcaggagagcggcctgaaggtgaaccagcctgccagctttgccatccggctgaatggagccaagggcaagattgatgccaaggtgcacagccccagcggggctgtggaggagtgccacgtgtctgagctggagccagacaagtatgctgtgcgcttcatcccccatgaaaatggagtgcacaccattgatgtgaagttcaacggcagccacgtggtgggcagccccttcaaggtgcgggtgggggagcccggccaggccggcaacccagccctggtgtctgcctatggaacaggcctggagggcggcaccaccggcatccagagcgagttcttcatcaacaccaccagggctggccctggcaccctgtctgtgaccatcgagggccccagcaaggtgaagatggactgccaggagaccccagagggctacaaggtgatgtacacccccatggcccctggcaactacctgatctctgtgaagtatggaggccccaaccacatcgtgggcagccccttcaaggccaaggtgacaggccagaggctggtgtccccaggcagcgccaatgagaccagcagcatcctggtggagagcgtgaccaggagcagcacagagacctgctacagcgccatccccaaggccagcagtgatgccagcaaggtgaccagcaaaggagctggcctgagcaaggcctttgtgggccagaagagcagcttcctggtggactgcagcaaggccggcagcaacatgctgctgattggagtgcacggccccaccaccccctgtgaggaggtgtccatgaagcacgtgggcaaccagcagtacaacgtgacctacgtggtgaaggagcggggggactatgtgctggccgtgaagtggggcgaggagcacatccctggcagccccttccacgtgacagtgccctag

SEQ ID NO: 62679 - DNA, 408 bp, Artificial Sequence
  derived and/or modified sequence
tgactggccgtggagggccccagcaaggtggacatccagaccgaggacttggaggacggtacgtgcaaggttagctacttccctacagttcccggcgtctacatcgtctcgaccaaattcgcggatgaacatgtccccgaaattaactcaagcgacatgtccgcacacgtgaccagcccgagcggtcgggttaccgaggctgaaatagtccctatgggaaaaaatagccactgcgtgcgttttgttccccaggaaatgggagtacacacagtgtccgttaagtatcgcggtcagcatgtgaccgggtcccctttccagttcacagtgggacccctgggcgaaggcggagcccacaaagtaagagcaggtggtcctggtcttgagaggggcgaggctggcgtcccctag

SEQ ID NO: 62680 - DNA, 7902 bp, Artificial Sequence
  derived and/or modified sequence
atgcccgtgaccgagaaggacctggccgaggacgccccctggaagaaaattcagcagaacacttttacgcgctggtgcaatgaacatctgaaatgcgtcaacaagcggattggaaacttacaaacagatctgagtgacgggctgcggctgatcgcattgttggaggtgctctcacagaagcgtatgtaccggaagtatcatcagcggcccaccttccgtcagatgcagctagaaaacgtctcagtggccctcgaatttctcgacagagaatctatcaagctcgtaagtatcgattctaaggcgatcgtggacggtaatctcaaattgatcctagggttggtatggaccctgatacttcactactccatttctatgccagtctgggaggatgaaggggatgatgacgctaagaaacagacgccaaaacagagactacttggctggatacagaataagatcccctacctgcctatcacaaactttaaccagaactggcaggacgggaaggccttgggcgccttggttgattcctgtgcacctgggctgtgccctgactgggaaagttgggatcctcagaagcccgtcgataatgccagagaggcgatgcagcaggccgacgactggctcggggttcctcaggtgattacccctgaggagatcattcaccccgacgtggacgagcattcagtaatgacttatctgtcacagttccccaaagctaagctgaaaccaggtgctcctctcaaaccgaagctgaatcccaagaaagcccgtgcatatggcaggggcattgagccgacagggaacatggtgaaacagccagcaaagtttaccgtagatacgatcagtgcaggacaaggagatgtcatggtgttcgtggaggatcctgagggcaacaaagaggaggcgcaggttactccggattccgacaagaacaagacttattcagtggaatatctgccaaaggtgacgggcctgcacaaagtgactgtcttgtttgcaggacagcatatctccaaatctccttttgaggtttcggttgataaagcccaaggggatgcaagtaaggtgaccgctaaaggcccgggcctggaagccgttggcaacatcgcaaataagccgacctactttgacatctataccgctggtgccggcgtcggggatatcggcgtggaggtcgaggacccacagggaaagaatactgtcgagctgctggtcgaggacaaggggaatcaggtgtatagatgcgtatacaagcccatgcagccaggacctcacgtcgtaaagattttctttgccggcgacaccatccccaaatcacccttcgtcgtccaggttggcgaggcttgcaacccaaatgcttgccgagcatccggtcgaggactccagccaaaaggagtgcgaatccgagaaacgacagacttcaaggttgacaccaaggccgccggtagcggagaactgggcgtgaccatgaaaggtcccaagggtctggaagaactggtgaagcagaaggattttctggatggcgtctacgcatttgagtattatccaagtactcccggcaggtacagcatagccattacgtggggtggacatcatattcccaaatccccttttgaggtgcaagttgggccagaggctggcatgcagaaggtccgggcttgggggcccgggctgcatggggggattgtcggaagatctgctgatttcgtggtcgagagcataggcagcgaggtcggatccctgggtttcgcaatcgagggaccatcccaagctaagatagaatataatgaccagaacgatggcagctgtgatgttaagtattggccaaaggagcctggcgagtacgcggtccacatcatgtgtgacgacgaggacattaaggatagtccatatatggcgtttatacatccagctaccggaggttacaatccagacctggtgagggcttatgggcccggcctcgaaaaatcagggtgtatcgtgaacaatctggcagagttcactgttgacccaaaagacgctggaaaagcacctttaaaaatcttcgctcaggacggcgaggggcagaggattgacattcagatgaagaacaggatggacgggacctatgcctgcagctatacaccagtaaaggctattaaacacaccatcgctgtagtgtggggaggcgtaaacatacctcacagcccctatcgggtaaacatcggacagggctcccatcctcagaaggtcaaggtgttcggaccgggcgtcgagagatctggcctgaaggctaatgagcctacccattttacggtggactgtaccgaggccggtgagggcgacgtgagtgtgggcataaagtgtgatgccagagtgctgtcagaggatgaggaggatgtggacttcgacattatccacaatgccaacgacacctttaccgttaaatatgtacctcctgccgccggacgatacacaatcaaagttctgttcgctagccaagaaattccagcatccccctttagagtaaaagtggacccaagtcatgacgcctcaaaagtcaaggctgagggacctggcctgagtaaagctggcgtcgagaatggaaagcccacccatttcaccgtttacacgaagggcgctggcaaagccccccttaatgtgcagttcaacagcccacttcccggagatgcagtcaaagacctggatataattgataactacgattattcacacacagtcaagtatactcctacgcagcaggggaatatgcaggttctggtcacttacggcggcgaccctattcccaagtccccattcactgtaggggtggctgccccgctggacctcagtaaaattaagctcaacggccttgaaaacagggtggaggttgggaaagaccaggagtttacagtggatactcgcggggccggcgggcagggcaaactcgacgtgactattctgagtccctcgcgcaaagtggttccttgcctagtgacccccgtgactggccgggaaaatagtacagctaagttcatccccagggaggagggcctttacgctgtggatgtgacatacgacggccacccagttcccggctccccttatacggttgaggcaagccttcctccagacccttcaaaggtgaaggcccacggccccggactggaggggggcctggtcggcaagcccgccgagtttacaattgacaccaaaggagccggcactggaggtttaggcctgacagtggagggtccctgcgaagccaagatagaatgttctgataatggggatggcacgtgctcagtctcctacttacccacaaagcccggagagtattttgtcaacatactgtttgaagaggtgcacattccaggctcacctttcaaagcggatattgagatgccattcgatccaagcaaggtggtggcctcgggccctggtctggagcatggtaaagttggtgaggcggggctcctgtcagtcgactgcagcgaagccggacctggcgcattgggactcgaagctgttagcgacagtggtacgaaggccgaagtcagcatccagaacaacaaagacggtacctacgcagtgacatatgtcccgctgacagccggaatgtacacacttacaatgaagtacggaggcgaactggtgccacacttcccagcaagggtcaaggtcgagcctgcggtcgatacatccaggatcaaagtgtttggaccgggaatcgagggcaaggatgtgttccgcgaggcaaccacagatttcaccgtcgatagcagacctttaacacaggtcggcggtgatcatataaaggcccacatcgctaatccttcaggcgcctccaccgagtgttttgttaccgacaatgctgacggcacctatcaggtggagtatacaccgtttgaaaaggggctccacgtggtggaagtgacctacgatgatgttcccattccaaatagcccatttaaagttgctgttacggagggatgccaaccttcaagagtacaggcccagggcccaggactgaaggaagcttttaccaacaagcccaacgtctttaccgtggttacccggggggctggtattggcggtctgggcatcaccgtcgaagggccatctgagtcaaagatcaactgccgcgataataaggatggatcttgctccgccgagtatattcccttcgcacccggtgattacgacgttaatattacctatggcggcgctcacattcctggaagtccctttcgcgttcccgtaaaggacgtcgtcgacccaagtaaggtcaagatcgcagggccaggcctgggatctggagtgcgggcaagggtgctccaatccttcaccgtcgattcctcaaaggcgggcctggcgcccctcgaagtccgcgtgctgggccccagggcggacgataccgacagccagtcttggagatcgcctctgaaggccctaagcgagttctttaagggtgaccccaagggggatttcaacaaaacaggcctggtcgaacccgtgaatgttgtggataatggcgacggaactcacaccgtgacatacactccatctcaggaggggccgtacatggtgagtgtcaaatacgccgacgaggaaatcccccgaagccctttcaaggtgaaagttctaccgacctatgatgcatcaaaagtgactgcctccggaccaggcttgagctcatatggtgtgcctgcttcactgcctgtggattttgctattgatgccagagatgctggcgagggcctgttggctgtgcaaatcacagatcaggaaggcaagcccaagcgcgctattgtgcatgacaataaggacggcacctacgccgtgacatacatcccggataagaccggaagatacatgataggcgttacatatgggggtgacgacatcccgctttctccttatagaattagggctactcagactggagacgcttctaaatgcttggctacgggacctggcatcgcatccaccgttaaaacaggcgaggaggtgggattcgtcgtcgacgcgaaaactgccggcaagggcaaagttacttgtaccgtgctcaccccagatggaaccgaggcagaggccgatgtcattgagaacgaagacggaacctacgatatcttctacacggctgccaaaccgggaacctatgtgatttacgtgaggtttgggggagtggacatcccaaatagtccgttcaccgtgatggccaccgatggggaggttaccgccgttgaggaagcaccagtgaatgcctgccctcctggttttaggccgtgggtcactgaggaggcctacgtccctgtctcagatatgaatggactgggctttaagcctttcgacctggtgatccccttcgccgtcaggaagggcgaaattactggagaagttcatatgcctagcggaaagaccgcaactcctgaaatcgttgataataaagacgggacggttacagtccgctacgctcctacggaggttgggctgcacgagatgcacataaagtacatgggaagccatatccccgagtctccacttcagttttatgtgaactaccccaacagcggatcagtaagcgcttatgggccaggcctggtctatggagtggccaacaagactgccactttcacaatcgtgaccgaagacgcaggtgagggtgggctagacctagccattgagggccccagcaaagctgagattagttgtattgacaacaaggatggcacttgtactgtgacatacctgcctacgttgcccggtgattactccatccttgtgaaatataatgacaagcatatcccgggctctccctttaccgctaagattaccgatgacagccgccgctgctctcaagttaagctgggctcagccgccgacttcctcctggatatctccgagactgatctgtcatccttaactgcctcaataaaggctccatccgggcgggacgagccatgtctgctcaagcgattacctaacaaccatattgggatctccttcatcccaagagaggtcggcgagcacttagtgagtataaagaagaacgggaaccacgtagcaaatagccctgtaagtatcatggttgttcagtctgagatcggcgatgcgaggcgggccaaggtgtacggtcgcgggttgtctgaagggcgcacattcgagatgtccgattttatcgtggatacccgcgacgcaggttatgggggtatttcactggcagtggagggaccaagtaaagtggacattcagaccgaagatttggaggatggaacctgtaaagtcagctatttcccaactgtgccaggcgtctacatcgtgagcacaaagttcgctgacgagcacgtacctggatccccctttaccgttaagatatccggtgaaggcagggtcaaggagtcaattaccaggacatcacgcgctcccagtgtggccactgtcggctccatatgtgacctgaatctaaaaatccccgagatcaatagcagcgacatgtccgcccacgtgaccagcccttccggacgggtcacagaggctgagatcgtcccgatgggcaagaacagtcactgtgttagatttgtgcctcaagagatgggcgtgcatacagtgagcgtgaagtataggggacagcacgtgacgggcagtccgttccagttcactgtaggcccactgggcgaggggggagcacataaagtgagggccggcggccctggcctggagcgaggagaggccggggtgccagcagagtttagcatttggaccagagaggcaggagctggcggactatctatcgcagtggagggaccgagcaaagccgaaatcacattcgatgaccataaaaatggaagctgcggagtatcatacatcgcgcaagagcctgggaactatgaggtctccatcaagttcaacgatgagcatataccagaatcaccttacttagttcctgttatagcaccaagtgatgacgctaggaggctcacggtgatgtcgctccaggagtccggacttaaagtaaatcagccagcctcctttgccataagactgaacggcgcaaagggaaaaatagacgctaaggttcactcccctagtggggcagtcgaggagtgtcacgtgagtgagctggaacccgataagtacgccgttcggttcatcccgcacgagaatggggtgcacacaatcgacgtcaagttcaatgggtcccacgtggtcggatctccttttaaggtgagagtgggagagccaggccaggccggcaacccggccctggtctctgcatatggcaccggactggaaggcggcacaacaggtattcagtcggaattctttataaacacaacaagggctggtccgggcacattatcggtgaccatcgaaggaccttccaaagtaaagatggattgccaggaaacgcccgagggttacaaggtcatgtacacacccatggctccagggaactaccttatctccgttaagtatggaggaccgaatcacatcgtgggtagcccttttaaggccaaggtgaccggccagagattggtatccccaggctctgccaatgaaacaagctcaatcctcgtggaaagcgtaactcgcagttccacagagacctgttacagcgcaatccccaaagcttctagcgacgcctccaaagtgaccagcaaaggcgcagggctcagtaaagcatttgtcggacagaaatcttcttttctcgtggactgcagcaaggccggatccaacatgctgctgataggcgtgcacgggcccaccacgccgtgcgaagaagttagcatgaagcacgtggggaatcagcagtataacgttacatatgtggttaaggagcggggagactacgtcctggcagtgaaatggggtgaggagcatatcccaggatctcctttccatgttactgtgccctag

SEQ ID NO: 62681 - DNA, 408 bp, Artificial Sequence
  derived and/or modified sequence
taactggctgtagaaggtcccagcaaagtggacatccagactgaagacttggaggatggaacctgtaaggtgtcgtacttccccacggttcctggagtctatattgttagcaccaagtttgccgatgagcacgtgcctgagatcaatagttctgatatgagcgcgcacgtaacatcacctagtggacgggtgacagaggcagaaatcgtcccaatgggcaaaaactcccattgtgtgcggttcgtgccacaggagatgggggtgcacaccgtgagtgtgaaatatcggggtcagcacgtcactggaagcccatttcagttcaccgtaggcccactgggggaaggaggcgctcacaaggtacgagcagggggtcctggcctggagcggggagaagccggagtgccatag

SEQ ID NO: 62682 - DNA, 7901 bp, Artificial Sequence
  derived and/or modified sequence
atgcccgtgactgagaaagatctcgcagaggatgcgccatggaagaagattcagcagaacacatttacacggtggtgtaatgagcacctaaaatgcgttaacaaacgcattggaaatctgcagactgatctgagtgatgggctgaggctcatcgcgcttctggaagtgttgtctcagaagcgcatgtaccggaagtatcatcaaagaccaacttttaggcaaatgcagctagaaaatgtcagcgtggcccttgaatttcttgatcgggaatcaattaagctcgtgtccatcgacagtaaggctattgtggacggcaacttgaaactcatcttgggactggtttggacactgatcctccactattctatctcaatgccagtgtgggaggatgagggcgacgatgacgccaaaaagcagacacctaagcagcgacttttaggctggatccagaacaagatcccatacctccctatcactaacttcaaccagaactggcaggacggtaaggcacttggagccctcgtggatagctgcgcgcctggattgtgccccgactgggaatcctgggacccccagaagccagtggataatgctcgggaagccatgcaacaggcggatgattggctcggggtgcctcaggtgataactcccgaggagattatccatccggacgtagacgagcactcagttatgacgtacctcagccaattccctaaagccaagcttaaaccgggtgcaccactgaaacccaagctaaatcccaagaaggcaagggcctatggtcgcggaatcgagcctactggtaatatggttaaacagcccgcaaaatttacagtggacactatttctgctggtcaaggcgatgtcatggtgtttgtggaggaccctgagggaaataaagaagaggcccaggtcacaccggatagtgataagaataaaacctacagcgtggagtacttacccaaggtgacaggcttgcacaaggtcactgtgctcttcgccggacaacatatctcaaagtctccttttgaggtgtcagtggataaggctcagggggatgcgagtaaggttactgctaagggcccagggctcgaagccgtgggcaacatcgccaacaagcccacctactttgatatctataccgccggtgcgggtgtaggtgacatcggcgtggaagtcgaagatccacaggggaagaataccgtcgagcttttggtagaagacaaaggcaaccaggtgtaccgatgcgtatacaagcctatgcagcctgggccacacgttgtaaagatatttttcgccggagataccattcccaagtccccctttgtggtccaggtgggcgaggcttgcaatcccaatgcttgccgggctagcgggaggggactccaacctaagggagtacggatacgagagactacagacttcaaggtcgacaccaaagcagctggctccggcgagctcggtgttacaatgaagggacctaagggtttggaagagttggtcaagcagaaagatttccttgacggggtatacgctttcgagtactaccctagtaccccagggaggtacagcatcgccattacatggggcggacaccacatccccaagtcaccattcgaagtccaggtcgggccagaggccggaatgcagaaggtgagagcttggggtccagggctgcacggagggatcgtgggacgaagcgcggacttcgttgttgagagcattggtagcgaagtgggctcccttggatttgctatagaaggccctagtcaggctaagatcgagtataatgaccagaacgatggctcttgtgatgtgaaatactggccaaaagaaccaggcgagtacgctgttcacattatgtgtgatgacgaagacatcaaggactccccttatatggcatttatccatcccgctactggcggttacaaccctgacctggtacgcgcatacggtcctggactagaaaaaagtggatgtatcgtgaacaacttagcagagttcaccgtcgacccgaaggatgccggtaaggcccctctcaagattttcgcccaggacggtgaagggcaaaggatagatattcagatgaagaaccgcatggacggtacctacgcctgttcgtatacaccagtgaaggccatcaagcatacgatcgctgtggtatgggggggagtaaatatccctcacagcccttaccgcgtgaatatcgggcagggctctcacccacagaaagtcaaggtgttcggtccaggcgttgagagaagtggtctgaaggcaaatgagccaactcacttcaccgttgactgtaccgaggcaggcgagggtgacgtctccgtcggtatcaagtgcgatgcgagggtgttatccgaggatgaggaagacgtggacttcgatatcatccacaatgccaacgacacattcaccgtcaagtatgtccctcctgccgcaggccgatacaccatcaaggttctctttgcttcccaggaaattcctgcttctcctttccgcgtgaaagtggatccttctcacgatgccagcaaggtgaaagcagaggggcctggtctgagtaaggcaggagtcgaaaacggcaaacccacccacttcaccgtctacacaaagggggctggcaaagcccctctcaatgtccagtttaattctccattgcctggagatgctgtgaaggacctcgatattattgacaactacgactacagtcacaccgtaaagtacacgcccacacaacagggaaatatgcaggtcttagtaacttacggaggagacccgatccctaaaagccccttcaccgtgggagttgccgcacctctggacctctccaagattaagctgaacgggctggagaatcgtgtagaagtgggcaaagatcaggagttcacggtggacacaagaggggctggtggccagggaaagctggacgtaactatcctttcaccctcccgtaaagttgtcccgtgcttggtgacccctgttaccggcagggagaacagcacagccaagttcatccccagggaagaaggcctctacgccgtggatgtcacatacgacggacatccggtgcccggatctccttacaccgtggaagcaagcttgccacccgaccctagcaaagtgaaggcccacggaccagggctggaaggtggcctggtaggaaaacctgctgaattcacaatagacaccaagggggctggcacaggaggacttggactgactgtggagggcccatgcgaggccaaaattgaatgttccgacaatggggatggcacctgttctgtttcttatctacctactaagcccggagaatactttgtcaatatcctgttcgaggaggtgcacatccctggctccccttttaaggcagacatcgagatgccctttgacccttctaaggtcgtggcaagcggcccaggtctggagcacggcaaggtgggagaagcaggactgctgtctgtcgactgctccgaggccggtcctggcgctctggggttggaagcagtttccgattccggcactaaggcagaggtgagcattcagaataacaaggatggcacatacgctgtgacctacgtccctctgactgccggaatgtatacgctgacaatgaagtacgggggagaactggtgccgcacttccccgcacgggtcaaggtcgaaccagccgtggatactagtaggatcaaggtgtttggtccgggaattgagggcaaggatgtcttcagggaagcgaccacagattttaccgtcgattctaggccactgacccaggtgggaggggatcatatcaaggcccacattgccaatccatcaggcgcaagtaccgaatgttttgtgacagacaatgcggacggcacttatcaagtggagtacacaccgttcgagaaaggcttgcacgtcgtggaggtgacatacgacgatgtgcccattcctaacagcccgtttaaagtggccgtcacggaaggatgccaacccagccgcgtgcaggctcagggccctggcctgaaggaagccttcactaataaacccaatgtcttcacggtggtgactcgtggggctggcatcggtggcctcggaattacggtggaaggtccatctgagtccaagattaactgccgggataacaaggacggaagttgttcagcagaatatattcctttcgctcctggagactatgacgtcaatatcacttacggcggagcccatatcccaggctccccttttagggtgccagtcaaagacgtggtggaccccagtaaagttaagatcgctgggcctggcctgggctccggagtacgcgcaagagtcctgcagtctttcacggtggacagctcaaaagccggactcgcgcctctggaagttagagttctggggcctcgtgcagacgatacagacagccagtcatggcggtcccccctgaaagcactgtccgagttttttaaaggggacccaaagggagatttcaataagacagggctggtggagccagtcaatgtggtcgacaatggggatgggacccacacagtgacctatacaccatcccaggagggtccttacatggtctccgtcaaatatgctgatgaggagatcccgaggtctcctttcaaagtgaaagtgctccctacgtacgacgccagcaaagtcacggctagtggaccaggactgagcagttacggggtccccgcttccctgccagtagacttcgcgattgacgctagggacgcgggagaaggtctgctcgcagttcagattacagatcaggaagggaaacccaaacgggcaatcgtgcatgataataaggacggtacatacgcagtcacatacatccctgacaaaactgggagatatatgatcggcgtgacatacgggggagatgacatcccactctccccttataggatacgcgcaacccagaccggtgatgcttctaagtgcctagctaccgggccagggatcgcgtctacagtcaagacaggcgaggaggtcgggtttgtcgtcgacgccaaaacagcgggaaaaggaaaagttacctgcacagttctcacccccgacgggaccgaggcagaggccgacgtgatcgagaatgaggacggtacctatgacatcttttacaccgcggcaaaacctgggacttacgtgatctacgtacgcttcgggggagtagacatccccaacagccccttcactgttatggccaccgatggggaagttacggccgtcgaagaggcccctgtcaacgcctgccctcccggattcaggccatgggtgaccgaggaggcctacgtgcccgtgtctgatatgaatggtttagggtttaagccattcgatctggtcatcccattcgctgtccggaagggcgagataactggcgaagtccacatgccctctggcaaaacagctactccagagattgtagataacaaagatggtaccgtgaccgtgcgttatgccccaactgaagtaggcctccacgaaatgcacatcaagtatatgggcagccatatacccgaatccccattgcagttctatgtgaactacccaaattctggaagcgtcagtgcatacgggccaggactcgtgtatggtgtcgcgaacaaaactgctaccttcaccatcgtgactgaagatgctggggaaggcggactcgacttagccatcgaaggtccctccaaggccgagatctcttgcatagacaacaaggacggtacttgcacagtgacatatttaccaaccctgcctggagattactccatcctggtgaaatataatgataagcacatcccaggttctcccttcaccgctaagattactgacgattcccgcagatgttcccaggtcaaactcggttccgctgctgactttttactggatatctcagagaccgacctgtcgagcctgactgcatccattaaagcaccctctggtagagacgagccctgtctgcttaaacgtttgcccaataatcatattgggattagctttattcctcgcgaggtcggagagcatctagtatcgatcaaaaaaaacggcaaccacgttgcaaactccccggtttcaataatggtcgtccagtccgaaatcggtgatgccagaagagccaaagtgtatggtcgcggactgagcgagggtaggacgttcgagatgagtgactttatcgtagatacccgagatgccggatatggtggcatcagcctggccgtcgaaggcccaagtaaagttgatattcagaccgaagacttggaagacggcacatgcaaggtctcttacttccctactgttccgggtgtgtacatcgtctcgacaaaatttgcagatgagcatgtgcccggatcaccattcacagtcaagatttcaggtgaaggtcgagtaaaggaaagcataacacggacgagtcgggctccatcagtggctaccgtcggcagtatttgtgatctgaacctgaaaatacctgaaatcaattcgagcgacatgtccgcacacgtgaccagtccgagcggccgtgttaccgaggcagagatagttccgatgggcaagaactcccactgtgttcgattcgtaccgcaggaaatgggagtccacacagtttccgtcaagtaccgcggacagcacgttaccgggagccccttccagtttactgtgggacctctgggtgaaggaggcgctcacaaagtcagggccggaggacctggcctggagcgaggggaagccggtgtgcctgctgagttcagtatttggactagagaagctggagcaggcggactgtcaatcgctgtcgaaggccctagcaaagccgaaattacatttgatgaccataagaatggatcttgcggagtatcctacatagctcaagagcctggaaactacgaagtgtctattaagtttaatgatgagcacatccctgaatccccgtacctggtaccggtgatagcaccctcggatgatgctagaaggctcacagttatgtctcttcaggaaagtgggctgaaagttaaccagccagcatcgtttgctattagactaaacggtgctaaggggaaaatagatgccaaggtgcactccccttccggcgctgtggaggagtgccatgtgtccgagcttgaacccgacaagtacgcagtcagattcattccccatgagaatggtgtacacacgatcgacgtgaaatttaatggcagccatgtcgtgggctcccccttcaaggtgagggttggagaacccggtcaggctggcaaccccgcactggtgtctgcctatggaactggcctggagggcggaaccactgggatccagagcgaattcttcattaatactaccagggccggacctggtaccctctcagtgacgattgagggcccatcaaaggtgaaaatggactgccaggagacaccagagggatataaggtgatgtacactcctatggctcctggaaactacctcatatctgttaaatacggtggcccaaaccacatcgtggggagcccgttcaaggcgaaagttaccggccaacgtcttgtatcgccagggagtgctaacgagacctcctccatcctggtcgaaagtgttaccagatcaagtaccgaaacatgttactccgctattcctaaagcttcttctgacgcgtcaaaggtgacatcaaaaggtgccggactctctaaggccttcgttggacagaagtcctcattcctggtcgactgtagtaaagcaggctccaacatgcttctgattggcgtccacgggcctaccactccgtgcgaggaggtcagcatgaaacatgttgggaatcagcagtacaacgtgacatatgtagtaaaggagaggggcgattatgtgctggcggttaaatggggagaggagcatattccgggaagcccatttcacgtcaccgttcccta

SEQ ID NO: 62683 - DNA, 408 bp, Artificial Sequence
  derived and/or modified sequence
tgactggccgtggagggccccagcaaggtggacatccagaccgaggacctggaggacggcacctgcaaggtgagctacttccccaccgtgcccggcgtgtacatcgtgagcaccaagttcgccgacgagcacgtgcccgagatcaacagcagcgacatgagcgcccacgtgaccagccccagcggcagagtgaccgaggccgagatcgtgcccatgggcaagaacagccactgcgtgagattcgtgccccaggagatgggcgtgcacaccgtgagcgtgaagtacagaggccagcacgtgaccggcagccccttccagttcaccgtgggccccctgggcgagggcggcgcccacaaggtgagagccggcggccccggcctggagagaggcgaggccggcgtgccctag

SEQ ID NO: 62684 - DNA, 7902 bp, Artificial Sequence
  derived and/or modified sequence
atgcccgtgaccgagaaggacctggccgaggacgccccctggaagaagatccagcagaacaccttcaccagatggtgcaacgagcacctgaagtgcgtgaacaagagaatcggcaacctgcagaccgacctgagcgacggcctgagactgatcgccctgctggaggtgctgagccagaagagaatgtacagaaagtaccaccagagacccaccttcagacagatgcagctggagaacgtgagcgtggccctggagttcctggacagagagagcatcaagctggtgagcatcgacagcaaggccatcgtggacggcaacctgaagctgatcctgggcctggtgtggaccctgatcctgcactacagcatcagcatgcccgtgtgggaggacgagggcgacgacgacgccaagaagcagacccccaagcagagactgctgggctggatccagaacaagatcccctacctgcccatcaccaacttcaaccagaactggcaggacggcaaggccctgggcgccctggtggacagctgcgcccccggcctgtgccccgactgggagagctgggacccccagaagcccgtggacaacgccagagaggccatgcagcaggccgacgactggctgggcgtgccccaggtgatcacccccgaggagatcatccaccccgacgtggacgagcacagcgtgatgacctacctgagccagttccccaaggccaagctgaagcccggcgcccccctgaagcccaagctgaaccccaagaaggccagagcctacggcagaggcatcgagcccaccggcaacatggtgaagcagcccgccaagttcaccgtggacaccatcagcgccggccagggcgacgtgatggtgttcgtggaggaccccgagggcaacaaggaggaggcccaggtgacccccgacagcgacaagaacaagacctacagcgtggagtacctgcccaaggtgaccggcctgcacaaggtgaccgtgctgttcgccggccagcacatcagcaagagccccttcgaggtgagcgtggacaaggcccagggcgacgccagcaaggtgaccgccaagggccccggcctggaggccgtgggcaacatcgccaacaagcccacctacttcgacatctacaccgccggcgccggcgtgggcgacatcggcgtggaggtggaggacccccagggcaagaacaccgtggagctgctggtggaggacaagggcaaccaggtgtacagatgcgtgtacaagcccatgcagcccggcccccacgtggtgaagatcttcttcgccggcgacaccatccccaagagccccttcgtggtgcaggtgggcgaggcctgcaaccccaacgcctgcagagccagcggcagaggcctgcagcccaagggcgtgagaatcagagagaccaccgacttcaaggtggacaccaaggccgccggcagcggcgagctgggcgtgaccatgaagggccccaagggcctggaggagctggtgaagcagaaggacttcctggacggcgtgtacgccttcgagtactaccccagcacccccggcagatacagcatcgccatcacctggggcggccaccacatccccaagagccccttcgaggtgcaggtgggccccgaggccggcatgcagaaggtgagagcctggggccccggcctgcacggcggcatcgtgggcagaagcgccgacttcgtggtggagagcatcggcagcgaggtgggcagcctgggcttcgccatcgagggccccagccaggccaagatcgagtacaacgaccagaacgacggcagctgcgacgtgaagtactggcccaaggagcccggcgagtacgccgtgcacatcatgtgcgacgacgaggacatcaaggacagcccctacatggccttcatccaccccgccaccggcggctacaaccccgacctggtgagagcctacggccccggcctggagaagagcggctgcatcgtgaacaacctggccgagttcaccgtggaccccaaggacgccggcaaggcccccctgaagatcttcgcccaggacggcgagggccagagaatcgacatccagatgaagaacagaatggacggcacctacgcctgcagctacacccccgtgaaggccatcaagcacaccatcgccgtggtgtggggcggcgtgaacatcccccacagcccctacagagtgaacatcggccagggcagccacccccagaaggtgaaggtgttcggccccggcgtggagagaagcggcctgaaggccaacgagcccacccacttcaccgtggactgcaccgaggccggcgagggcgacgtgagcgtgggcatcaagtgcgacgccagagtgctgagcgaggacgaggaggacgtggacttcgacatcatccacaacgccaacgacaccttcaccgtgaagtacgtgccccccgccgccggcagatacaccatcaaggtgctgttcgccagccaggagatccccgccagccccttcagagtgaaggtggaccccagccacgacgccagcaaggtgaaggccgagggccccggcctgagcaaggccggcgtggagaacggcaagcccacccacttcaccgtgtacaccaagggcgccggcaaggcccccctgaacgtgcagttcaacagccccctgcccggcgacgccgtgaaggacctggacatcatcgacaactacgactacagccacaccgtgaagtacacccccacccagcagggcaacatgcaggtgctggtgacctacggcggcgaccccatccccaagagccccttcaccgtgggcgtggccgcccccctggacctgagcaagatcaagctgaacggcctggagaacagagtggaggtgggcaaggaccaggagttcaccgtggacaccagaggcgccggcggccagggcaagctggacgtgaccatcctgagccccagcagaaaggtggtgccctgcctggtgacccccgtgaccggcagagagaacagcaccgccaagttcatccccagagaggagggcctgtacgccgtggacgtgacctacgacggccaccccgtgcccggcagcccctacaccgtggaggccagcctgccccccgaccccagcaaggtgaaggcccacggccccggcctggagggcggcctggtgggcaagcccgccgagttcaccatcgacaccaagggcgccggcaccggcggcctgggcctgaccgtggagggcccctgcgaggccaagatcgagtgcagcgacaacggcgacggcacctgcagcgtgagctacctgcccaccaagcccggcgagtacttcgtgaacatcctgttcgaggaggtgcacatccccggcagccccttcaaggccgacatcgagatgcccttcgaccccagcaaggtggtggccagcggccccggcctggagcacggcaaggtgggcgaggccggcctgctgagcgtggactgcagcgaggccggccccggcgccctgggcctggaggccgtgagcgacagcggcaccaaggccgaggtgagcatccagaacaacaaggacggcacctacgccgtgacctacgtgcccctgaccgccggcatgtacaccctgaccatgaagtacggcggcgagctggtgccccacttccccgccagagtgaaggtggagcccgccgtggacaccagcagaatcaaggtgttcggccccggcatcgagggcaaggacgtgttcagagaggccaccaccgacttcaccgtggacagcagacccctgacccaggtgggcggcgaccacatcaaggcccacatcgccaaccccagcggcgccagcaccgagtgcttcgtgaccgacaacgccgacggcacctaccaggtggagtacacccccttcgagaagggcctgcacgtggtggaggtgacctacgacgacgtgcccatccccaacagccccttcaaggtggccgtgaccgagggctgccagcccagcagagtgcaggcccagggccccggcctgaaggaggccttcaccaacaagcccaacgtgttcaccgtggtgaccagaggcgccggcatcggcggcctgggcatcaccgtggagggccccagcgagagcaagatcaactgcagagacaacaaggacggcagctgcagcgccgagtacatccccttcgcccccggcgactacgacgtgaacatcacctacggcggcgcccacatccccggcagccccttcagagtgcccgtgaaggacgtggtggaccccagcaaggtgaagatcgccggccccggcctgggcagcggcgtgagagccagagtgctgcagagcttcaccgtggacagcagcaaggccggcctggcccccctggaggtgagagtgctgggccccagagccgacgacaccgacagccagagctggagaagccccctgaaggccctgagcgagttcttcaagggcgaccccaagggcgacttcaacaagaccggcctggtggagcccgtgaacgtggtggacaacggcgacggcacccacaccgtgacctacacccccagccaggagggcccctacatggtgagcgtgaagtacgccgacgaggagatccccagaagccccttcaaggtgaaggtgctgcccacctacgacgccagcaaggtgaccgccagcggccccggcctgagcagctacggcgtgcccgccagcctgcccgtggacttcgccatcgacgccagagacgccggcgagggcctgctggccgtgcagatcaccgaccaggagggcaagcccaagagagccatcgtgcacgacaacaaggacggcacctacgccgtgacctacatccccgacaagaccggcagatacatgatcggcgtgacctacggcggcgacgacatccccctgagcccctacagaatcagagccacccagaccggcgacgccagcaagtgcctggccaccggccccggcatcgccagcaccgtgaagaccggcgaggaggtgggcttcgtggtggacgccaagaccgccggcaagggcaaggtgacctgcaccgtgctgacccccgacggcaccgaggccgaggccgacgtgatcgagaacgaggacggcacctacgacatcttctacaccgccgccaagcccggcacctacgtgatctacgtgagattcggcggcgtggacatccccaacagccccttcaccgtgatggccaccgacggcgaggtgaccgccgtggaggaggcccccgtgaacgcctgcccccccggcttcagaccctgggtgaccgaggaggcctacgtgcccgtgagcgacatgaacggcctgggcttcaagcccttcgacctggtgatccccttcgccgtgagaaagggcgagatcaccggcgaggtgcacatgcccagcggcaagaccgccacccccgagatcgtggacaacaaggacggcaccgtgaccgtgagatacgcccccaccgaggtgggcctgcacgagatgcacatcaagtacatgggcagccacatccccgagagccccctgcagttctacgtgaactaccccaacagcggcagcgtgagcgcctacggccccggcctggtgtacggcgtggccaacaagaccgccaccttcaccatcgtgaccgaggacgccggcgagggcggcctggacctggccatcgagggccccagcaaggccgagatcagctgcatcgacaacaaggacggcacctgcaccgtgacctacctgcccaccctgcccggcgactacagcatcctggtgaagtacaacgacaagcacatccccggcagccccttcaccgccaagatcaccgacgacagcagaagatgcagccaggtgaagctgggcagcgccgccgacttcctgctggacatcagcgagaccgacctgagcagcctgaccgccagcatcaaggcccccagcggcagagacgagccctgcctgctgaagagactgcccaacaaccacatcggcatcagcttcatccccagagaggtgggcgagcacctggtgagcatcaagaagaacggcaaccacgtggccaacagccccgtgagcatcatggtggtgcagagcgagatcggcgacgccagaagagccaaggtgtacggcagaggcctgagcgagggcagaaccttcgagatgagcgacttcatcgtggacaccagagacgccggctacggcggcatcagcctggccgtggagggccccagcaaggtggacatccagaccgaggacctggaggacggcacctgcaaggtgagctacttccccaccgtgcccggcgtgtacatcgtgagcaccaagttcgccgacgagcacgtgcccggcagccccttcaccgtgaagatcagcggcgagggcagagtgaaggagagcatcaccagaaccagcagagcccccagcgtggccaccgtgggcagcatctgcgacctgaacctgaagatccccgagatcaacagcagcgacatgagcgcccacgtgaccagccccagcggcagagtgaccgaggccgagatcgtgcccatgggcaagaacagccactgcgtgagattcgtgccccaggagatgggcgtgcacaccgtgagcgtgaagtacagaggccagcacgtgaccggcagccccttccagttcaccgtgggccccctgggcgagggcggcgcccacaaggtgagagccggcggccccggcctggagagaggcgaggccggcgtgcccgccgagttcagcatctggaccagagaggccggcgccggcggcctgagcatcgccgtggagggccccagcaaggccgagatcaccttcgacgaccacaagaacggcagctgcggcgtgagctacatcgcccaggagcccggcaactacgaggtgagcatcaagttcaacgacgagcacatccccgagagcccctacctggtgcccgtgatcgcccccagcgacgacgccagaagactgaccgtgatgagcctgcaggagagcggcctgaaggtgaaccagcccgccagcttcgccatcagactgaacggcgccaagggcaagatcgacgccaaggtgcacagccccagcggcgccgtggaggagtgccacgtgagcgagctggagcccgacaagtacgccgtgagattcatcccccacgagaacggcgtgcacaccatcgacgtgaagttcaacggcagccacgtggtgggcagccccttcaaggtgagagtgggcgagcccggccaggccggcaaccccgccctggtgagcgcctacggcaccggcctggagggcggcaccaccggcatccagagcgagttcttcatcaacaccaccagagccggccccggcaccctgagcgtgaccatcgagggccccagcaaggtgaagatggactgccaggagacccccgagggctacaaggtgatgtacacccccatggcccccggcaactacctgatcagcgtgaagtacggcggccccaaccacatcgtgggcagccccttcaaggccaaggtgaccggccagagactggtgagccccggcagcgccaacgagaccagcagcatcctggtggagagcgtgaccagaagcagcaccgagacctgctacagcgccatccccaaggccagcagcgacgccagcaaggtgaccagcaagggcgccggcctgagcaaggccttcgtgggccagaagagcagcttcctggtggactgcagcaaggccggcagcaacatgctgctgatcggcgtgcacggccccaccaccccctgcgaggaggtgagcatgaagcacgtgggcaaccagcagtacaacgtgacctacgtggtgaaggagagaggcgactacgtgctggccgtgaagtggggcgaggagcacatccccggcagccccttccacgtgaccgtgccctag

SEQ ID NO: 62685 - protein, 2422 aa, Artificial Sequence
  derived and/or modified sequence
MQEHSTRRRSLSLCPDWESWDPQKPVDNAREAMQQADDWLGVPQVITPEEIIHPDVDEHSVMTYLSQFPKAKLKPGAPLKPKLNPKKARAYGRGIEPTGNMVKQPAKFTVDTISAGQGDVMVFVEDPEGNKEEAQVTPDSDKNKTYSVEYLPKVTGLHKVTVLFAGQHISKSPFEVSVDKAQGDASKVTAKGPGLEAVGNIANKPTYFDIYTAGAGVGDIGVEVEDPQGKNTVELLVEDKGNQVYRCVYKPMQPGPHVVKIFFAGDTIPKSPFVVQVGEACNPNACRASGRGLQPKGVRIRETTDFKVDTKAAGSGELGVTMKGPKGLEELVKQKDFLDGVYAFEYYPSTPGRYSIAITWGGHHIPKSPFEVQVGPEAGMQKVRAWGPGLHGGIVGRSADFVVESIGSEVGSLGFAIEGPSQAKIEYNDQNDGSCDVKYWPKEPGEYAVHIMCDDEDIKDSPYMAFIHPATGGYNPDLVRAYGPGLEKSGCIVNNLAEFTVDPKDAGKAPLKIFAQDGEGQRIDIQMKNRMDGTYACSYTPVKAIKHTIAVVWGGVNIPHSPYRVNIGQGSHPQKVKVFGPGVERSGLKANEPTHFTVDCTEAGEGDVSVGIKCDARVLSEDEEDVDFDIIHNANDTFTVKYVPPAAGRYTIKVLFASQEIPASPFRVKVDPSHDASKVKAEGPGLSKAGVENGKPTHFTVYTKGAGKAPLNVQFNSPLPGDAVKDLDIIDNYDYSHTVKYTPTQQGNMQVLVTYGGDPIPKSPFTVGVAAPLDLSKIKLNGLENRVEVGKDQEFTVDTRGAGGQGKLDVTILSPSRKVVPCLVTPVTGRENSTAKFIPREEGLYAVDVTYDGHPVPGSPYTVEASLPPDPSKVKAHGPGLEGGLVGKPAEFTIDTKGAGTGGLGLTVEGPCEAKIECSDNGDGTCSVSYLPTKPGEYFVNILFEEVHIPGSPFKADIEMPFDPSKVVASGPGLEHGKVGEAGLLSVDCSEAGPGALGLEAVSDSGTKAEVSIQNNKDGTYAVTYVPLTAGMYTLTMKYGGELVPHFPARVKVEPAVDTSRIKVFGPGIEGKDVFREATTDFTVDSRPLTQVGGDHIKAHIANPSGASTECFVTDNADGTYQVEYTPFEKGLHVVEVTYDDVPIPNSPFKVAVTEGCQPSRVQAQGPGLKEAFTNKPNVFTVVTRGAGIGGLGITVEGPSESKINCRDNKDGSCSAEYIPFAPGDYDVNITYGGAHIPGSPFRVPVKDVVDPSKVKIAGPGLGSGVRARVLQSFTVDSSKAGLAPLEVRVLGPRGLVEPVNVVDNGDGTHTVTYTPSQEGPYMVSVKYADEEIPRSPFKVKVLPTYDASKVTASGPGLSSYGVPASLPVDFAIDARDAGEGLLAVQITDQEGKPKRAIVHDNKDGTYAVTYIPDKTGRYMIGVTYGGDDIPLSPYRIRATQTGDASKCLATGPGIASTVKTGEEVGFVVDAKTAGKGKVTCTVLTPDGTEAEADVIENEDGTYDIFYTAAKPGTYVIYVRFGGVDIPNSPFTVMATDGEVTAVEEAPVTEEAYVPVSDMNGLGFKPFDLVIPFAVRKGEITGEVHMPSGKTATPEIVDNKDGTVTVRYAPTEVGLHEMHIKYMGSHIPESPLQFYVNYPNSGSVSAYGPGLVYGVANKTATFTIVTEDAGEGGLDLAIEGPSKAEISCIDNKDGTCTVTYLPTLPGDYSILVKYNDKHIPGSPFTAKITDDSRRCSQVKLGSAADFLLDISETDLSSLTASIKAPSGRDEPCLLKRLPNNHIGISFIPREVGEHLVSIKKNGNHVANSPVSIMVVQSEIGDARRAKVYGRGLSEGRTFEMSDFIVDTRDAGYGGISLAVEGPSKVDIQTEDLEDGTCKVSYFPTVPGVYIVSTKFADEHVPGSPFTVKISGEGRVKESITRTSRAPSVATVGSICDLNLKIPEINSSDMSAHVTSPSGRVTEAEIVPMGKNSHCVRFVPQEMGVHTVSVKYRGQHVTGSPFQFTVGPLGEGGAHKVRAGGPGLERGEAGVPAEFSIWTREAGAGGLSIAVEGPSKAEITFDDHKNGSCGVSYIAQEPGNYEVSIKFNDEHIPESPYLVPVIAPSDDARRLTVMSLQESGLKVNQPASFAIRLNGAKGKIDAKVHSPSGAVEECHVSELEPDKYAVRFIPHENGVHTIDVKFNGSHVVGSPFKVRVGEPGQAGNPALVSAYGTGLEGGTTGIQSEFFINTTRAGPGTLSVTIEGPSKVKMDCQETPEGYKVMYTPMAPGNYLISVKYGGPNHIVGSPFKAKVTGQRLVSPGSANETSSILVESVTRSSTETCYSAIPKASSDASKVTSKGAGLSKAFVGQKSSFLVDCSKAGSNMLLIGVHGPTTPCEEVSMKHVGNQQYNVTYVVKERGDYVLAVKWGEEHIPGSPFHVTVP

SEQ ID NO: 62686 - protein, 2591 aa, Artificial Sequence
  derived and/or modified sequence
MPVTEKDLAEDAPWKKIQQNTFTRWCNEHLKCVNKRIGNLQTDLSDGLRLIALLEVLSQKRMYRKYHQRPTFRQMQLENVSVALEFLDRESIKLVSIDSKAIVDGNLKLILGLVWTLILHYSISMPVWEDEGDDDAKKQTPKQRLLGWIQNKIPYLPITNFNQNWQDGKALGALVDSCAPGLCPDWESWDPQKPVDNAREAMQQADDWLGVPQVITPEEIIHPDVDEHSVMTYLSQFPKAKLKPGAPLKPKLNPKKARAYGRGIEPTGNMVKQPAKFTVDTISAGQGDVMVFVEDPEGNKEEAQVTPDSDKNKTYSVEYLPKVTGLHKVTVLFAGQHISKSPFEVSVDKAQGDASKVTAKGPGLEAVGNIANKPTYFDIYTAGAGVGDIGVEVEDPQGKNTVELLVEDKGNQVYRCVYKPMQPGPHVVKIFFAGDTIPKSPFVVQVGEACNPNACRASGRGLQPKGVRIRETTDFKVDTKAAGSGELGVTMKGPKGLEELVKQKDFLDGVYAFEYYPSTPGRYSIAITWGGHHIPKSPFEVQVGPEAGMQKVRAWGPGLHGGIVGRSADFVVESIGSEVGSLGFAIEGPSQAKIEYNDQNDGSCDVKYWPKEPGEYAVHIMCDDEDIKDSPYMAFIHPATGGYNPDLVRAYGPGLEKSGCIVNNLAEFTVDPKDAGKAPLKIFAQDGEGQRIDIQMKNRMDGTYACSYTPVKAIKHTIAVVWGGVNIPHSPYRVNIGQGSHPQKVKVFGPGVERSGLKANEPTHFTVDCTEAGEGDVSVGIKCDARVLSEDEEDVDFDIIHNANDTFTVKYVPPAAGRYTIKVLFASQEIPASPFRVKVDPSHDASKVKAEGPGLSKAGVENGKPTHFTVYTKGAGKAPLNVQFNSPLPGDAVKDLDIIDNYDYSHTVKYTPTQQGNMQVLVTYGGDPIPKSPFTVGVAAPLDLSKIKLNGLENRVEVGKDQEFTVDTRGAGGQGKLDVTILSPSRKVVPCLVTPVTGRENSTAKFIPREEGLYAVDVTYDGHPVPGSPYTVEASLPPDPSKVKAHGPGLEGGLVGKPAEFTIDTKGAGTGGLGLTVEGPCEAKIECSDNGDGTCSVSYLPTKPGEYFVNILFEEVHIPGSPFKADIEMPFDPSKVVASGPGLEHGKVGEAGLLSVDCSEAGPGALGLEAVSDSGTKAEVSIQNNKDGTYAVTYVPLTAGMYTLTMKYGGELVPHFPARVKVEPAVDTSRIKVFGPGIEGKDVFREATTDFTVDSRPLTQVGGDHIKAHIANPSGASTECFVTDNADGTYQVEYTPFEKGLHVVEVTYDDVPIPNSPFKVAVTEGCQPSRVQAQGPGLKEAFTNKPNVFTVVTRGAGIGGLGITVEGPSESKINCRDNKDGSCSAEYIPFAPGDYDVNITYGGAHIPGSPFRVPVKDVVDPSKVKIAGPGLGSGVRARVLQSFTVDSSKAGLAPLEVRVLGPRGLVEPVNVVDNGDGTHTVTYTPSQEGPYMVSVKYADEEIPRSPFKVKVLPTYDASKVTASGPGLSSYGVPASLPVDFAIDARDAGEGLLAVQITDQEGKPKRAIVHDNKDGTYAVTYIPDKTGRYMIGVTYGGDDIPLSPYRIRATQTGDASKCLATGPGIASTVKTGEEVGFVVDAKTAGKGKVTCTVLTPDGTEAEADVIENEDGTYDIFYTAAKPGTYVIYVRFGGVDIPNSPFTVMATDGEVTAVEEAPVTEEAYVPVSDMNGLGFKPFDLVIPFAVRKGEITGEVHMPSGKTATPEIVDNKDGTVTVRYAPTEVGLHEMHIKYMGSHIPESPLQFYVNYPNSGSVSAYGPGLVYGVANKTATFTIVTEDAGEGGLDLAIEGPSKAEISCIDNKDGTCTVTYLPTLPGDYSILVKYNDKHIPGSPFTAKITDDSRRCSQVKLGSAADFLLDISETDLSSLTASIKAPSGRDEPCLLKRLPNNHIGISFIPREVGEHLVSIKKNGNHVANSPVSIMVVQSEIGDARRAKVYGRGLSEGRTFEMSDFIVDTRDAGYGGISLAVEGPSKVDIQTEDLEDGTCKVSYFPTVPGVYIVSTKFADEHVPGSPFTVKISGEGRVKESITRTSRAPSVATVGSICDLNLKIPEINSSDMSAHVTSPSGRVTEAEIVPMGKNSHCVRFVPQEMGVHTVSVKYRGQHVTGSPFQFTVGPLGEGGAHKVRAGGPGLERGEAGVPAEFSIWTREAGAGGLSIAVEGPSKAEITFDDHKNGSCGVSYIAQEPGNYEVSIKFNDEHIPESPYLVPVIAPSDDARRLTVMSLQESGLKVNQPASFAIRLNGAKGKIDAKVHSPSGAVEECHVSELEPDKYAVRFIPHENGVHTIDVKFNGSHVVGSPFKVRVGEPGQAGNPALVSAYGTGLEGGTTGIQSEFFINTTRAGPGTLSVTIEGPSKVKMDCQETPEGYKVMYTPMAPGNYLISVKYGGPNHIVGSPFKAKVTGQRLVSPGSANETSSILVESVTRSSTETCYSAIPKASSDASKVTSKGAGLSKAFVGQKSSFLVDCSKAGSNMLLIGVHGPTTPCEEVSMKHVGNQQYNVTYVVKERGDYVLAVKWGEEHIPGSPFHVTVP

SEQ ID NO: 62687 - DNA, 8762 bp, Artificial Sequence
  derived and/or modified sequence
atgcaagaacatagcacccggaggagaagtctcagtctgtgcccagactgggaatcctgggacccgcagaagcctgtggataatgcacgagaagccatgcagcaggcagatgactggctgggtgtcccacaggtcatcactcctgaagaaatcattcacccggatgtggacgagcactcagttatgacttacctgtcccagttccccaaagccaagctcaagccgggggctcctctcaaacccaaactcaacccgaagaaagccagggcctatggcagaggaatcgagcccactggaaacatggtgaagcagccagccaagttcactgtggacaccatcagcgccgggcaaggagacgtgatggtgtttgttgaggacccagaagggaacaaagaggaggcacaagtgacccctgacagtgacaagaacaagacatactctgtggagtatctgcccaaggtcaccgggctacacaaagtcacagtcctctttgcaggacagcacatctccaagagcccatttgaagtgagtgttgacaaggcccagggagatgccagtaaagtcactgcaaaaggtccagggttggaagctgtagggaacatcgccaataagcccacctactttgacatctatacggcaggagctggtgtgggtgacattggtgtggaggtggaagatccccaggggaagaacaccgtggagttgctcgtggaagacaaaggaaaccaggtgtatcgatgtgtgtacaaacccatgcagcctggccctcacgtggtcaagatcttctttgctggggacactattcctaagagtcccttcgttgtgcaggttggggaagcctgcaatccaaatgcctgccgggccagtggccgaggcctacaacccaaaggcgtccgtatccgggagaccacagatttcaaggttgacaccaaagctgcaggaagtggggagctcggtgtaaccatgaagggtcctaagggtctggaggagctggtgaagcagaaagactttctggatggggtctacgcattcgagtattaccccagcaccccggggagatacagcattgccatcacatgggggggacaccacattccaaagagcccctttgaagttcaagttggccctgaagcgggtatgcagaaagtccgtgcttggggccctgggctccatggtgggattgtcgggcggtcagcggacttcgtggtagaatccattggctctgaagtggggtctctggggtttgccattgaaggcccctctcaggcaaagattgagtacaacgaccagaatgatggatcgtgtgatgtcaaatactggcccaaggagcctggcgaatatgctgttcacatcatgtgtgacgacgaagacatcaaggacagcccgtacatggccttcatccacccagccacgggaggctacaaccctgatctggttcgagcatacgggccaggtttggagaaatctggatgcattgtcaacaacctggccgagttcactgtggatcctaaggatgctggaaaagctcccttaaagatatttgctcaggatggggaaggccaacgcattgacatccagatgaagaaccggatggacggcacatatgcatgctcatacaccccggtgaaggccatcaagcacaccattgctgtggtctggggaggcgtgaacatcccgcacagcccctacagggtcaacatcgggcaaggtagccatcctcagaaggtcaaagtgtttgggccaggtgtggagagaagtggtctgaaggcaaatgaacctacacacttcacggtggactgtactgaggctggggaaggtgatgtcagtgttggcattaagtgtgatgcccgggtgttaagtgaagatgaggaagacgtggattttgacattattcacaatgccaatgatacgttcacagtcaaatatgtgcctcctgctgctgggcgatacactatcaaagttctctttgcatctcaggaaatccccgccagccctttcagagtcaaagttgacccttcccacgatgccagcaaagtgaaggcagaaggcccagggctcagcaaagcaggtgtggaaaatgggaaaccgacccacttcactgtctacaccaagggggctgggaaagccccgctcaacgtgcagttcaacagccctcttcctggcgatgcagtgaaggatttggatatcatcgataattatgactactctcacacggttaaatatacacccacccaacagggcaacatgcaggttctggtgacttacggtggcgatcccatccctaaaagccctttcactgtgggtgttgctgcaccgctggatctgagcaagataaaactcaatgggctggaaaacagggtggaagttgggaaggatcaggagttcaccgttgataccaggggggcaggaggccaggggaagctggacgtgacaatcctcagcccctctcggaaggtcgtgccatgcctagtgacacctgtgacaggccgggagaacagcacggccaagttcatccctcgggaggaggggctgtatgctgtagacgtgacctacgatggacaccctgtgcccgggagcccctacacagtggaggcctcgctgccaccagatcccagcaaggtgaaggcccacggtcccggcctcgaaggtggtctcgtgggcaagcctgccgagttcaccatcgataccaaaggagctggtactggaggtctgggcttaacggtggaaggtccgtgcgaggccaaaatcgagtgctccgacaatggtgatgggacctgctccgtctcttaccttcccacaaaacccggggagtacttcgtcaacatcctctttgaagaagtccacatacctgggtctcccttcaaagctgacattgaaatgccctttgacccctctaaagtcgtggcatcggggccaggtctcgagcacgggaaggtgggtgaagctggcctccttagcgtcgactgctcggaagcgggaccgggggccctgggcctggaagctgtctcggactcgggaacaaaagccgaagtcagtattcagaacaacaaagatggcacctacgcggtgacctacgtgcccctgacggccggcatgtacacgttgaccatgaagtatggtggcgaactcgtgccacacttccccgcccgggtcaaggtggagcccgccgtggacaccagcaggatcaaagtctttggaccaggaatagaagggaaagatgtgttccgggaagctaccaccgactttacagttgactctcggccgctgacccaggttgggggtgaccacatcaaggcccacattgccaacccctcaggggcctccaccgagtgctttgtcacagacaatgcggatgggacctaccaggtggaatacacaccctttgagaaaggtctccatgtagtggaggtgacatatgatgacgtgcctatcccaaacagtcccttcaaggtggctgtcactgaaggctgccagccatctagggtgcaagcccaaggacctggattgaaagaggcctttaccaacaagcccaatgtcttcaccgtggttaccagaggcgcaggaattggtgggcttggcataactgttgagggaccatcagagtcgaagataaattgcagagacaacaaggatggcagctgcagtgctgagtacattcctttcgcaccgggggattacgatgttaatatcacatatggaggagcccacatccccggcagccccttcagggttcctgtgaaggatgttgtggaccccagcaaggtcaagattgccggccccgggctgggctcaggcgtccgagcccgtgtcctgcagtccttcacggtggacagcagcaaggctggcctggctccgctggaagtgagggttctgggcccacgaggcttggtggagccagtgaacgtggtggacaatggagatggcacacacacagtaacctacaccccatctcaggagggaccttacatggtctcagttaaatatgctgatgaagagattcctcgcagtcccttcaaggtcaaggtccttcccacatatgatgccagcaaagtgactgccagtggccccggccttagttcctatggtgtgcctgccagtctacctgtggactttgcaattgatgcccgagatgccggggaaggcctgcttgctgttcaaataacggaccaagaaggaaaacccaaaagagccattgtccatgacaataaagatggcacgtatgctgtcacctacatccccgacaagactgggcgctatatgattggagtcacctacgggggtgacgacatcccactttctccttatcgcatccgagccacacagacgggtgatgccagcaagtgcctggccacgggtcctggaatcgcctccactgtgaaaactggcgaagaagtaggctttgtggttgatgccaagactgccgggaagggtaaagtgacctgcacggttctgaccccagatggcactgaggccgaggccgatgtcattgagaatgaagatggaacctatgacatcttctacacagctgccaagccgggcacatatgtgatctatgtgcgcttcggtggtgttgatattcctaacagccccttcactgtcatggccacagatggggaagtcacagccgtggaggaggcaccggtgaccgaagaggcctatgtcccagtgagtgacatgaacggcctgggatttaagccttttgacctggtcattccgtttgctgtcaggaaaggagaaatcactggagaggtccacatgccttctgggaagacagccacacctgagattgtggacaacaaggacggcacggtcactgttagatatgcccccactgaggtcgggctccatgagatgcacatcaaatacatgggcagccacatccctgagagcccactccagttctacgtgaactaccccaacagtggaagtgtttctgcatacggtccaggcctcgtgtatggagtggccaacaaaactgccaccttcaccatcgtcacagaggatgcaggagaaggtggtctggacttggctattgagggcccctcaaaagcagaaatcagctgcattgacaataaagatgggacatgcacagtgacctacctgccgactctgccaggcgactacagcattctggtcaagtacaatgacaagcacatccctggcagccccttcacagccaagatcacagatgacagcaggcggtgctcccaggtgaagttgggctcagccgctgacttcctgctcgacatcagtgagactgacctcagcagcctgacggccagcattaaggccccatctggccgagacgagccctgtctcctgaagaggctgcccaacaaccacattggcatctccttcatcccccgggaagtgggcgaacatctggtcagcatcaagaaaaatggcaaccatgtggccaacagccccgtgtctatcatggtggtccagtcggagattggtgacgcccgccgagccaaagtctatggccgcggcctgtcagaaggccggactttcgagatgtctgacttcatcgtggacacaagggatgcaggttatggtggcatatccttggcggtggaaggccccagcaaagtggacatccagacggaggacctggaagatggcacctgcaaagtctcctacttccctaccgtgcctggggtttatatcgtctccaccaaattcgctgacgagcacgtgcctgggagcccatttaccgtgaagatcagtggggagggaagagtcaaagagagcatcacccgcaccagtcgggccccgtccgtggccactgtcgggagcatttgtgacctgaacctgaaaatcccagaaatcaacagcagtgatatgtcggcccacgtcaccagcccctctggccgtgtgactgaggcagagattgtgcccatggggaagaactcacactgcgtccggtttgtgccccaggagatgggcgtgcacacggtcagcgtcaagtaccgtgggcagcacgtcaccggcagccccttccagttcaccgtggggccacttggtgaaggaggcgcccacaaggtgcgggcaggaggccctggcctggagagaggagaagcgggagtcccagctgagttcagcatttggacccgggaagcaggcgctggaggcctctccatcgctgttgagggccccagtaaggccgagattacattcgatgaccataaaaatgggtcgtgcggtgtatcttatattgcccaagagcctggtaactacgaggtgtccatcaagttcaatgatgagcacatcccggaaagcccctacctggtgccggtcatcgcaccctccgacgacgcccgccgcctcactgttatgagccttcaggaatcgggattaaaagttaaccagccagcatcctttgctataaggttgaatggcgcaaaaggcaagattgatgcaaaggtgcacagcccctctggagccgtggaggagtgccacgtgtctgagctggagccagataagtatgctgttcgcttcatccctcatgagaatggtgtccacaccatcgatgtcaagttcaatgggagccacgtggttggaagccccttcaaagtgcgcgttggggagcctggacaagcggggaaccctgccctggtgtccgcctatggcacgggactcgaagggggcaccacaggtatccagtcggaattctttattaacaccacccgagcaggtccagggacattatccgtcaccatcgaaggcccatccaaggttaaaatggattgccaggaaacacctgaagggtacaaagtcatgtacacccccatggctcctggtaactacctgatcagcgtcaaatacggtgggcccaaccacatcgtgggcagtcccttcaaggccaaggtgacaggccagcgtctagttagccctggctcagccaacgagacctcatccatcctggtggagtcagtgaccaggtcgtctacagagacctgctatagcgccattcccaaggcatcctcggacgccagcaaggtgacctctaagggggcagggctctcaaaggcctttgtgggccagaagagttccttcctggtggactgcagcaaagctggctccaacatgctgctgatcggggtccatgggcccaccaccccctgcgaggaggtctccatgaagcatgtaggcaaccagcaatacaacgtcacatacgtcgtcaaggagaggggcgattatgtgctggctgtgaagtggggggaggaacacatccctggcagcccttttcatgtcacagtgccttaaaacagttttctcaaatcctggagagagttcttgtggttgcttttgttgcttgtttgtaattcattttatacaaagccctccagcctgtttgtggggctgaaaccccatccctaaaatattgctgttgtaaaatgccttcagaaataagtcctagactggactcttgagggacatattggagaatcttaagaaatgcaagcttgttcagggggctgagaagatcctgagtacactaggtgcaaaccagaactcttggtggaacagaccagccactgcagcagacagaccaggaacacaatgagactgacatttcaaaaaaacaaaactggctagcctgagctgctggttcactcttcagcatttatgaaacaaggctaggggaagatgggcagagaaaaaggggacacctagtttggttgtcatttggcaaaggagatgacttaaaatccgcttaatctcttccagtgtccgtgttaatgtatttggctattagatcactagcactgctttaccgctcctcatcgccaacacccccatgctctgtggccttcttacacttctcagagggcagagtggcagccgggcaccctacagaaactcagagggcagagtggcagccaggcccacatgtctctcaagtacctgtcccctcgctctggtgattatttcttgcagaatcaccacacgagaccatcccggcagtcatggttttgctttagttttccaagtccgtttcagtcccttccttggtctgaagaaattctgcagtggcgagcagtttcccacttgccaaagatcccttttaaccaacactagcccttgtttttaacacacgctccagcccttcatcagcctgggcagtcttaccaaaatgtttaaagtgatctcagaggggcccatggattaacgccctcatcccaaggtccgtcccatgacataacactccacacccgccccagccaacttcatgggtcactttttctggaaaataatgatctgtacagacaggacagaatgaaactcctgcgggtctttggcctgaaagttgggaatggttgggggagagaagggcagcagcttattggtggtcttttcaccattggcagaaacagtgagagctgtgtggtgcagaaatccagaaatgaggtgtagggaattttgcctgccttcctgcagacctgagctggctttggaatgaggttaaagtgtcagggacgttgcctgagcccaaatgtgtagtgtggtctgggcaggcagacctttaggttttgctgcttagtcctgaggaagtggccactcttgtggcaggtgtagtatctggggcgagtgttgggggtaaaagcccaccctacagaaagtggaacagcccggagcctgatgtgaaaggaccacgggtgttgtaagctgggacacggaagccaaactggaatcaaacgccgactgtaaattgtatcttataacttattaaataaaacatttgctccgtaaagttg

SEQ ID NO: 62688 - DNA, 9430 bp, Artificial Sequence
  derived and/or modified sequence
gcggccaggggcgggcggccgcagagcagcaccggccgtggctccggtagcagcaagttcgaaccccgctcccgctccgcttcggttctcgctccttcggcccttgggcctccaaacaccagtccccggcagctcgttgcgcattgcgctctccccgccaccaggatgccggtaaccgagaaggatctagctgaggacgcgccttggaagaagatccagcagaacacgttcacacgctggtgcaacgagcacctcaagtgcgtgaacaaacgcatcggcaacctgcagaccgacctgagcgacgggctgcggctcatcgcgctgctcgaggtgctcagccagaagcgcatgtaccgcaagtaccatcagcggcccacctttcgccagatgcagctcgagaatgtgtccgtggcgctcgagttcctggaccgtgagagcatcaagctcgtgtccatcgatagcaaagccattgtggatgggaacctgaagctcatcttgggtctggtgtggacgctgatcctccactactccatctccatgcccgtgtgggaggatgaaggggatgatgatgccaagaagcagacgccaaagcagaggctgctggggtggattcagaacaagatcccctacttgcccatcaccaactttaaccagaactggcaagacggcaaagccctgggagccctggtagacagctgtgctccaggtctgtgcccagactgggaatcctgggacccgcagaagcctgtggataatgcacgagaagccatgcagcaggcagatgactggctgggtgtcccacaggtcatcactcctgaagaaatcattcacccggatgtggacgagcactcagttatgacttacctgtcccagttccccaaagccaagctcaagccgggggctcctctcaaacccaaactcaacccgaagaaagccagggcctatggcagaggaatcgagcccactggaaacatggtgaagcagccagccaagttcactgtggacaccatcagcgccgggcaaggagacgtgatggtgtttgttgaggacccagaagggaacaaagaggaggcacaagtgacccctgacagtgacaagaacaagacatactctgtggagtatctgcccaaggtcaccgggctacacaaagtcacagtcctctttgcaggacagcacatctccaagagcccatttgaagtgagtgttgacaaggcccagggagatgccagtaaagtcactgcaaaaggtccagggttggaagctgtagggaacatcgccaataagcccacctactttgacatctatacggcaggagctggtgtgggtgacattggtgtggaggtggaagatccccaggggaagaacaccgtggagttgctcgtggaagacaaaggaaaccaggtgtatcgatgtgtgtacaaacccatgcagcctggccctcacgtggtcaagatcttctttgctggggacactattcctaagagtcccttcgttgtgcaggttggggaagcctgcaatccaaatgcctgccgggccagtggccgaggcctacaacccaaaggcgtccgtatccgggagaccacagatttcaaggttgacaccaaagctgcaggaagtggggagctcggtgtaaccatgaagggtcctaagggtctggaggagctggtgaagcagaaagactttctggatggggtctacgcattcgagtattaccccagcaccccggggagatacagcattgccatcacatgggggggacaccacattccaaagagcccctttgaagttcaagttggccctgaagcgggtatgcagaaagtccgtgcttggggccctgggctccatggtgggattgtcgggcggtcagcggacttcgtggtagaatccattggctctgaagtggggtctctggggtttgccattgaaggcccctctcaggcaaagattgagtacaacgaccagaatgatggatcgtgtgatgtcaaatactggcccaaggagcctggcgaatatgctgttcacatcatgtgtgacgacgaagacatcaaggacagcccgtacatggccttcatccacccagccacgggaggctacaaccctgatctggttcgagcatacgggccaggtttggagaaatctggatgcattgtcaacaacctggccgagttcactgtggatcctaaggatgctggaaaagctcccttaaagatatttgctcaggatggggaaggccaacgcattgacatccagatgaagaaccggatggacggcacatatgcatgctcatacaccccggtgaaggccatcaagcacaccattgctgtggtctggggaggcgtgaacatcccgcacagcccctacagggtcaacatcgggcaaggtagccatcctcagaaggtcaaagtgtttgggccaggtgtggagagaagtggtctgaaggcaaatgaacctacacacttcacggtggactgtactgaggctggggaaggtgatgtcagtgttggcattaagtgtgatgcccgggtgttaagtgaagatgaggaagacgtggattttgacattattcacaatgccaatgatacgttcacagtcaaatatgtgcctcctgctgctgggcgatacactatcaaagttctctttgcatctcaggaaatccccgccagccctttcagagtcaaagttgacccttcccacgatgccagcaaagtgaaggcagaaggcccagggctcagcaaagcaggtgtggaaaatgggaaaccgacccacttcactgtctacaccaagggggctgggaaagccccgctcaacgtgcagttcaacagccctcttcctggcgatgcagtgaaggatttggatatcatcgataattatgactactctcacacggttaaatatacacccacccaacagggcaacatgcaggttctggtgacttacggtggcgatcccatccctaaaagccctttcactgtgggtgttgctgcaccgctggatctgagcaagataaaactcaatgggctggaaaacagggtggaagttgggaaggatcaggagttcaccgttgataccaggggggcaggaggccaggggaagctggacgtgacaatcctcagcccctctcggaaggtcgtgccatgcctagtgacacctgtgacaggccgggagaacagcacggccaagttcatccctcgggaggaggggctgtatgctgtagacgtgacctacgatggacaccctgtgcccgggagcccctacacagtggaggcctcgctgccaccagatcccagcaaggtgaaggcccacggtcccggcctcgaaggtggtctcgtgggcaagcctgccgagttcaccatcgataccaaaggagctggtactggaggtctgggcttaacggtggaaggtccgtgcgaggccaaaatcgagtgctccgacaatggtgatgggacctgctccgtctcttaccttcccacaaaacccggggagtacttcgtcaacatcctctttgaagaagtccacatacctgggtctcccttcaaagctgacattgaaatgccctttgacccctctaaagtcgtggcatcggggccaggtctcgagcacgggaaggtgggtgaagctggcctccttagcgtcgactgctcggaagcgggaccgggggccctgggcctggaagctgtctcggactcgggaacaaaagccgaagtcagtattcagaacaacaaagatggcacctacgcggtgacctacgtgcccctgacggccggcatgtacacgttgaccatgaagtatggtggcgaactcgtgccacacttccccgcccgggtcaaggtggagcccgccgtggacaccagcaggatcaaagtctttggaccaggaatagaagggaaagatgtgttccgggaagctaccaccgactttacagttgactctcggccgctgacccaggttgggggtgaccacatcaaggcccacattgccaacccctcaggggcctccaccgagtgctttgtcacagacaatgcggatgggacctaccaggtggaatacacaccctttgagaaaggtctccatgtagtggaggtgacatatgatgacgtgcctatcccaaacagtcccttcaaggtggctgtcactgaaggctgccagccatctagggtgcaagcccaaggacctggattgaaagaggcctttaccaacaagcccaatgtcttcaccgtggttaccagaggcgcaggaattggtgggcttggcataactgttgagggaccatcagagtcgaagataaattgcagagacaacaaggatggcagctgcagtgctgagtacattcctttcgcaccgggggattacgatgttaatatcacatatggaggagcccacatccccggcagccccttcagggttcctgtgaaggatgttgtggaccccagcaaggtcaagattgccggccccgggctgggctcaggcgtccgagcccgtgtcctgcagtccttcacggtggacagcagcaaggctggcctggctccgctggaagtgagggttctgggcccacgaggcttggtggagccagtgaacgtggtggacaatggagatggcacacacacagtaacctacaccccatctcaggagggaccttacatggtctcagttaaatatgctgatgaagagattcctcgcagtcccttcaaggtcaaggtccttcccacatatgatgccagcaaagtgactgccagtggccccggccttagttcctatggtgtgcctgccagtctacctgtggactttgcaattgatgcccgagatgccggggaaggcctgcttgctgttcaaataacggaccaagaaggaaaacccaaaagagccattgtccatgacaataaagatggcacgtatgctgtcacctacatccccgacaagactgggcgctatatgattggagtcacctacgggggtgacgacatcccactttctccttatcgcatccgagccacacagacgggtgatgccagcaagtgcctggccacgggtcctggaatcgcctccactgtgaaaactggcgaagaagtaggctttgtggttgatgccaagactgccgggaagggtaaagtgacctgcacggttctgaccccagatggcactgaggccgaggccgatgtcattgagaatgaagatggaacctatgacatcttctacacagctgccaagccgggcacatatgtgatctatgtgcgcttcggtggtgttgatattcctaacagccccttcactgtcatggccacagatggggaagtcacagccgtggaggaggcaccggtgaccgaagaggcctatgtcccagtgagtgacatgaacggcctgggatttaagccttttgacctggtcattccgtttgctgtcaggaaaggagaaatcactggagaggtccacatgccttctgggaagacagccacacctgagattgtggacaacaaggacggcacggtcactgttagatatgcccccactgaggtcgggctccatgagatgcacatcaaatacatgggcagccacatccctgagagcccactccagttctacgtgaactaccccaacagtggaagtgtttctgcatacggtccaggcctcgtgtatggagtggccaacaaaactgccaccttcaccatcgtcacagaggatgcaggagaaggtggtctggacttggctattgagggcccctcaaaagcagaaatcagctgcattgacaataaagatgggacatgcacagtgacctacctgccgactctgccaggcgactacagcattctggtcaagtacaatgacaagcacatccctggcagccccttcacagccaagatcacagatgacagcaggcggtgctcccaggtgaagttgggctcagccgctgacttcctgctcgacatcagtgagactgacctcagcagcctgacggccagcattaaggccccatctggccgagacgagccctgtctcctgaagaggctgcccaacaaccacattggcatctccttcatcccccgggaagtgggcgaacatctggtcagcatcaagaaaaatggcaaccatgtggccaacagccccgtgtctatcatggtggtccagtcggagattggtgacgcccgccgagccaaagtctatggccgcggcctgtcagaaggccggactttcgagatgtctgacttcatcgtggacacaagggatgcaggttatggtggcatatccttggcggtggaaggccccagcaaagtggacatccagacggaggacctggaagatggcacctgcaaagtctcctacttccctaccgtgcctggggtttatatcgtctccaccaaattcgctgacgagcacgtgcctgggagcccatttaccgtgaagatcagtggggagggaagagtcaaagagagcatcacccgcaccagtcgggccccgtccgtggccactgtcgggagcatttgtgacctgaacctgaaaatcccagaaatcaacagcagtgatatgtcggcccacgtcaccagcccctctggccgtgtgactgaggcagagattgtgcccatggggaagaactcacactgcgtccggtttgtgccccaggagatgggcgtgcacacggtcagcgtcaagtaccgtgggcagcacgtcaccggcagccccttccagttcaccgtggggccacttggtgaaggaggcgcccacaaggtgcgggcaggaggccctggcctggagagaggagaagcgggagtcccagctgagttcagcatttggacccgggaagcaggcgctggaggcctctccatcgctgttgagggccccagtaaggccgagattacattcgatgaccataaaaatgggtcgtgcggtgtatcttatattgcccaagagcctggtaactacgaggtgtccatcaagttcaatgatgagcacatcccggaaagcccctacctggtgccggtcatcgcaccctccgacgacgcccgccgcctcactgttatgagccttcaggaatcgggattaaaagttaaccagccagcatcctttgctataaggttgaatggcgcaaaaggcaagattgatgcaaaggtgcacagcccctctggagccgtggaggagtgccacgtgtctgagctggagccagataagtatgctgttcgcttcatccctcatgagaatggtgtccacaccatcgatgtcaagttcaatgggagccacgtggttggaagccccttcaaagtgcgcgttggggagcctggacaagcggggaaccctgccctggtgtccgcctatggcacgggactcgaagggggcaccacaggtatccagtcggaattctttattaacaccacccgagcaggtccagggacattatccgtcaccatcgaaggcccatccaaggttaaaatggattgccaggaaacacctgaagggtacaaagtcatgtacacccccatggctcctggtaactacctgatcagcgtcaaatacggtgggcccaaccacatcgtgggcagtcccttcaaggccaaggtgacaggccagcgtctagttagccctggctcagccaacgagacctcatccatcctggtggagtcagtgaccaggtcgtctacagagacctgctatagcgccattcccaaggcatcctcggacgccagcaaggtgacctctaagggggcagggctctcaaaggcctttgtgggccagaagagttccttcctggtggactgcagcaaagctggctccaacatgctgctgatcggggtccatgggcccaccaccccctgcgaggaggtctccatgaagcatgtaggcaaccagcaatacaacgtcacatacgtcgtcaaggagaggggcgattatgtgctggctgtgaagtggggggaggaacacatccctggcagcccttttcatgtcacagtgccttaaaacagttttctcaaatcctggagagagttcttgtggttgcttttgttgcttgtttgtaattcattttatacaaagccctccagcctgtttgtggggctgaaaccccatccctaaaatattgctgttgtaaaatgccttcagaaataagtcctagactggactcttgagggacatattggagaatcttaagaaatgcaagcttgttcagggggctgagaagatcctgagtacactaggtgcaaaccagaactcttggtggaacagaccagccactgcagcagacagaccaggaacacaatgagactgacatttcaaaaaaacaaaactggctagcctgagctgctggttcactcttcagcatttatgaaacaaggctaggggaagatgggcagagaaaaaggggacacctagtttggttgtcatttggcaaaggagatgacttaaaatccgcttaatctcttccagtgtccgtgttaatgtatttggctattagatcactagcactgctttaccgctcctcatcgccaacacccccatgctctgtggccttcttacacttctcagagggcagagtggcagccgggcaccctacagaaactcagagggcagagtggcagccaggcccacatgtctctcaagtacctgtcccctcgctctggtgattatttcttgcagaatcaccacacgagaccatcccggcagtcatggttttgctttagttttccaagtccgtttcagtcccttccttggtctgaagaaattctgcagtggcgagcagtttcccacttgccaaagatcccttttaaccaacactagcccttgtttttaacacacgctccagcccttcatcagcctgggcagtcttaccaaaatgtttaaagtgatctcagaggggcccatggattaacgccctcatcccaaggtccgtcccatgacataacactccacacccgccccagccaacttcatgggtcactttttctggaaaataatgatctgtacagacaggacagaatgaaactcctgcgggtctttggcctgaaagttgggaatggttgggggagagaagggcagcagcttattggtggtcttttcaccattggcagaaacagtgagagctgtgtggtgcagaaatccagaaatgaggtgtagggaattttgcctgccttcctgcagacctgagctggctttggaatgaggttaaagtgtcagggacgttgcctgagcccaaatgtgtagtgtggtctgggcaggcagacctttaggttttgctgcttagtcctgaggaagtggccactcttgtggcaggtgtagtatctggggcgagtgttgggggtaaaagcccaccctacagaaagtggaacagcccggagcctgatgtgaaaggaccacgggtgttgtaagctgggacacggaagccaaactggaatcaaacgccgactgtaaattgtatcttataacttattaaataaaacatttgctccgtaaa

SEQ ID NO: 62689 - DNA, 7269 bp, Artificial Sequence
  derived and/or modified sequence
atgcaagagcacagtactagacgccggtctctcagcctgtgccctgactgggagtcctgggatccgcaaaaacccgtggataatgccagggaagccatgcaacaggcagatgactggttgggagttcctcaggtgattacccctgaagagattattcacccggatgttgatgaacactccgtgatgacatacctctcacagtttcctaaagccaagttgaagcccggcgctcctctgaagcccaagctgaatcccaaaaaggcccgcgcatacggccgcggtattgagcccaccggtaatatggtaaaacagccggccaaattcaccgtagacacaatatctgcagggcaaggagatgtgatggttttcgtggaggacccagagggcaacaaggaggaagctcaggtgacccccgacagcgataagaacaaaacctattccgtggagtatctccccaaggttacaggcttacataaggtgaccgtcctctttgcggggcagcacatctccaagtccccttttgaggtctctgtagacaaagcccagggggacgcctcaaaggtgaccgctaaaggccccggactggaggcggtgggtaatattgccaacaagcccacctactttgacatttacaccgccggagccggcgtgggtgatatcggcgtcgaggtcgaggacccgcagggcaaaaatactgtggagttactggtggaggataagggcaatcaagtctaccgctgtgtgtacaagcccatgcagcccggccctcatgtggttaagatctttttcgcaggggataccattcctaaatcaccctttgtggtgcaggtgggtgaagcttgcaatcccaacgcatgtagggcaagcggtagaggcttgcagcctaagggagtgcggattcgggaaactaccgatttcaaggttgatacaaaggcggcgggatctggggaactaggcgtgactatgaagggaccaaagggattggaggaactcgtaaaacaaaaggacttcctcgacggcgtgtacgctttcgagtactatccatcaactccagggcggtactccattgctatcacttggggcggacaccatatccccaagagcccttttgaagtccaagtgggtccagaggcaggaatgcagaaagtacgggcttggggccctgggctgcatggtggaattgtggggagatccgctgattttgtggttgaaagcattggttctgaggtggggagtctggggttcgctattgaagggccctcccaagccaagatcgagtacaatgaccaaaacgatggaagctgtgatgtaaagtactggccgaaagagcctggtgagtacgctgtgcacattatgtgtgatgatgaagacattaaggattctccatacatggctttcatccatcccgctacaggcggatataatccagaccttgttcgggcatatggtcccgggttggagaagtctggatgtattgtaaacaatctcgcagagttcacagttgatccaaaggacgccgggaaggcccctcttaaaattttcgcccaggacggcgaaggccagagaatagacattcagatgaagaacagaatggatggcacatatgcctgcagctacacacctgtgaaggctataaaacacacaatcgccgttgtctggggcggcgtaaacatcccacacagcccgtaccgggtgaacatcggtcaaggctctcacccgcaaaaagtgaaggtttttgggccaggagttgagaggtcaggactgaaagcaaacgagcctacccacttcaccgtagactgcacagaggccggcgaaggcgatgtgtcagtcggcataaagtgtgatgctcgagtcctttctgaggacgaagaggacgtcgatttcgatattatacacaatgccaatgacacttttactgttaaatacgttccccctgccgccggtagatatacaatcaaggtcctcttcgcctcccaagagatcccagcatcaccgtttcgcgtgaaggtagatcccagccatgatgcatcaaaggtcaaagccgagggcccgggactttctaaagccggcgtggagaatggaaaaccaacacactttaccgtgtatacaaaaggcgcaggtaaggcccccctgaacgtacagtttaatagccccttgcccggtgacgcagtaaaagacttagacataatagataactacgactatagccacacagttaagtacacgccaactcagcaggggaacatgcaagttctcgtcacatacgggggcgaccccatcccaaagagcccattcaccgtgggagtggctgctcctctggatctatcaaaaatcaaactgaacggattggaaaatcgggtcgaggtcggtaaagaccaggaatttacggtcgacactcggggcgccggggggcagggcaagttggacgtcactattctaagcccttccaggaaggtggtgccttgtctcgtcactcctgtgactggcagggagaatagcacggccaagtttatcccccgggaggagggactttacgcagtggatgtcacttacgatggccatccagtgccaggcagtccatataccgtagaggcatctttacccccggacccgtccaaagtcaaggctcatggcccaggattggagggaggacttgtcggcaagcccgccgagttcactattgacaccaagggagcaggaacaggcggcctgggcctgactgtggaggggccttgcgaggcgaagatagaatgttcagacaacggtgatggaacatgctcggtctcatacctgcctaccaaaccaggcgagtactttgtgaacatcctgttcgaggaggtgcatatccctgggagcccattcaaggccgacatcgaaatgccatttgatccttcaaaggtagtggcctctgggcccggtctcgaacatgggaaagttggagaggcgggactactaagcgtggactgttctgaagctggcccaggcgccttaggcttggaggcagtttccgactcgggaacaaaggccgaagtgagcattcaaaataacaaagatggaacatacgccgttacatacgtgccacttaccgcaggcatgtacacactgacaatgaagtacggcggcgaactggtgccccactttcctgcccgcgtgaaagtcgaaccagctgtggacactagccgaatcaaagttttcggacctggcatcgagggcaaggatgtttttcgcgaggcgactactgactttactgtggactctcggcctctcacacaggtcggtggcgatcacatcaaagcacatattgcgaaccctagcggagcctccacagagtgcttcgtcactgataatgctgacggcacttatcaggtggaatatacgccatttgaaaaaggactccatgtcgtagaggtcacctacgatgatgtgccaatcccaaactccccctttaaggtcgccgttaccgaagggtgccagccctctcgcgttcaggcccaggggccaggtctgaaggaggcctttacaaataaacccaatgtgttcacggtggtgacccgcggcgccggcataggcggcctggggataacagtagaaggaccatccgagtctaaaatcaattgccgcgataataaggacggatcttgtagcgccgagtacatccccttcgcccctggggattacgatgtgaatataacctatggaggtgctcatattcccggcagcccctttcgtgttcctgtaaaagatgttgtggacccatcaaaagtgaaaatcgccggcccaggcctgggctcaggagtgagggctcgtgttttacagtccttcaccgtcgactcctccaaggctggtctcgcacccttagaagttcgagttctgggacctcgtggactagtggaaccagtcaatgtcgtggataatggagatgggacgcacaccgtgacatacaccccctcacaggaagggccctacatggtgtcagtgaaatatgctgatgaggaaattcctcgaagtccctttaaagttaaagtgctgcccacctatgatgcctctaaggtcaccgcctcgggccctgggctgtcaagctatggggtcccggcgtcactgccggtcgatttcgcaatcgacgcccgggacgcaggggaaggtcttcttgccgtccagatcactgatcaggaaggaaagccaaaacgggcaatcgtgcacgataacaaagatgggacgtatgccgtgacttatattcctgacaagacaggacggtacatgattggggttacatatggaggggacgacatacctctttcgccttaccgtatccgcgccacccagactggggacgcctccaagtgtctggcaactgggccaggtattgcctccacggtgaaaacaggagaggaggttggtttcgttgtggatgctaaaaccgctggcaagggcaaagttacctgcaccgtccttacccctgacggcacagaggcagaagctgatgtgatcgaaaatgaagacggcacatatgatatcttctacactgcggcgaaaccaggtacatacgttatctacgtgcggtttggcggggtggacataccaaattccccattcacggttatggccactgacggagaggtcacggctgtggaagaggccccagttaccgaggaggcatacgttcccgtaagcgatatgaatggcctgggattcaagccttttgacctggttattcccttcgccgtgagaaaaggagaaataactggagaggtgcatatgccaagcggaaagacagcaacacccgagatcgtcgacaataaagatggcactgtgaccgtcagatacgcgccgaccgaagtggggctgcatgaaatgcacataaagtatatgggatcacacatacccgagagccctttgcaattctatgtaaactacccaaattccgggtctgtgagcgcatacggtccaggattggtatacggtgtcgctaataagacagccacgtttacgatagtgaccgaggacgctggggagggcggcctcgacctcgctatcgaggggccaagtaaggctgaaatttcatgcatcgacaataaagatggcacctgcactgttacatatctccccacactgccaggggactactccatcctcgtgaaatacaacgataagcacatccctggatctccctttactgcaaagatcactgatgattcgcgacggtgcagtcaagtgaagctggggtctgccgctgactttctgcttgacatttctgagaccgacctgtcatcattgaccgcaagtataaaagctccttcgggccgcgatgaaccatgcttgctcaaacggctgccaaataatcacatcggaatctcttttattccgagagaggtcggtgagcatttggtgtctatcaagaagaatgggaaccatgtggctaattccccggttagtatcatggtcgtgcagagtgaaatcggagacgccaggcgcgctaaagtctacggcaggggcttatccgaaggcagaaccttcgagatgtcagacttcattgtcgatactcgtgatgcaggctatgggggcatctccttggccgtagaagggccctcaaaagtggacatacagaccgaggatctggaggatggaacatgcaaggtgagctactttcccacagtcccaggcgtgtacatcgtgtcaaccaaatttgccgacgagcacgtcccgggcagcccattcactgtaaaaatttcaggagaaggcagggtaaaggagagcattacacgcactagccgcgccccctctgtggccactgtgggctcaatttgcgatctcaacctgaagattccagaaattaactcttccgatatgtccgcccatgtgacatccccatctgggcgggtaactgaggccgaaatcgttcccatgggtaagaactcacactgcgtccgcttcgtgccccaagaaatgggtgtgcacacggtttctgttaaatataggggacagcacgtgacaggatctccctttcagtttactgtcgggcctctgggtgagggaggcgcacataaggtcagagccgggggccctgggctggaaagaggagaggccggcgttccggccgagttttcgatctggactagagaagctggtgcaggtggcctttcaatcgcagtggagggaccgtctaaagccgaaatcacatttgatgaccacaagaacggaagctgtggagtgagctacattgcccaggaacctggcaactacgaagtgtctattaagtttaatgatgaacacattcccgagtccccctatctcgtgcctgtgatcgcaccctcagatgacgcaaggaggctgaccgtgatgtctttgcaagagtctggtctgaaggtaaaccagccagccagcttcgctatccgcttaaacggtgccaaaggaaagatagatgcgaaggttcactccccaagcggagctgttgaagaatgccatgtctccgagctggaacccgataaatatgccgtccgatttatcccacacgaaaacggtgtccacaccatagacgtgaaattcaacggatcgcatgtagtgggttctccattcaaggtgagggtgggagaaccagggcaggcagggaatccagccctggtatccgcctatggcactggcctggaggggggaaccacagggatccaatccgagttctttataaacaccactcgcgccgggccaggcacgctgtcggtcacaatcgagggccctagcaaagtgaagatggattgtcaagaaactccggaagggtataaggttatgtatacacctatggcaccaggaaattacctcatctcagtgaagtatggtggccccaaccacattgtcggttcaccttttaaagctaaagtgacagggcaaagactggtctctcccggaagcgccaatgaaacgtcaagtattttagtcgagtcagtgacacggagctctaccgaaacctgttacagcgccatcccgaaggcctcttctgacgctagtaaggtcactagcaaaggagccggactgtccaaagctttcgtcggtcagaagagctcctttctcgtggattgtagtaaggccggtagtaacatgttgctgatcggtgtgcacggccccacgaccccctgcgaggaggtttcgatgaagcacgttggtaatcagcagtataatgtcacctacgttgttaaagagcgcggagattacgtcctggccgtcaagtggggggaggagcacatcccagggtcccctttccacgttacggttccctag

SEQ ID NO: 62690 - DNA, 7776 bp, Artificial Sequence
  derived and/or modified sequence
atgcccgtcacagaaaaagacttggccgaagacgccccttggaagaagattcagcagaatacctttacgaggtggtgcaatgaacacttgaaatgtgtcaacaaaagaatcgggaatctgcaaacagatctgagcgatggcctcaggctgatcgccctccttgaagtgctcagccaaaagcgcatgtacaggaaatatcaccaacggccgaccttccggcagatgcagctggaaaatgtgtcagtagccttggagttcctcgatcgggaaagcatcaagctcgtctcaatagactccaaggcgattgtggacggtaacctgaagctcattctcgggctggtgtggacgttgattttgcactactccatctcaatgccggtctgggaggatgagggggatgatgacgcaaagaagcagaccccaaaacagagactgctcggatggatccaaaataagatcccctatttgcccatcacaaatttcaaccagaattggcaagacggtaaggccttgggggcactggtcgatagctgcgctccaggcctgtgtccagattgggaatcatgggacccacagaagccggtggacaacgccagagaggctatgcaacaagctgacgactggctcggcgtcccgcaggtcatcactcccgaagaaattatccacccagacgttgatgagcactccgtgatgacttacctgtcacagtttccaaaggcaaagctgaagccaggcgcccctctcaaacctaagctaaatcctaaaaaagctcgtgcttacggacgaggcatcgagcccaccgggaacatggttaaacagcccgccaaattcacggtggacaccatctccgctggacaaggcgatgtcatggtctttgttgaagatcctgaaggcaataaagaagaggctcaggtgacacccgacagcgataaaaataagacctacagtgtggagtatctgccgaaggtcaccggcctgcataaagttactgttcttttcgctggccaacatattagtaaatctcccttcgaggtcagtgttgacaaagcacagggggacgcaagcaaggtgacggcaaagggtccaggcctcgaagccgttggcaacatagccaataaacccacttatttcgatatctacactgcaggagctggcgtgggagatattggcgtggaggtggaagaccctcaggggaagaataccgttgagctgctggtagaagacaaaggcaaccaagtctataggtgcgtctataaaccaatgcaaccaggaccgcacgtggtcaagatcttctttgctggagatacaatcccaaagagcccctttgtagtgcaggtgggggaggcctgcaacccaaacgcgtgcagggctagcggacggggcctgcagcctaagggagttcgaattcgggagacaacagacttcaaggtggatactaaagcagccggctctggagagttaggtgtgacaatgaaaggccctaaaggcttagaagagctggtaaagcaaaaagacttcctggacggagtctatgccttcgaatattaccccagtacccccgggaggtacagcatcgctattacctggggaggtcatcacatcccaaagagtcccttcgaagtgcaggttggacctgaggcgggaatgcagaaggtacgggcttggggtccagggcttcatggtggtatcgtcgggcgcagcgcagattttgtcgtggagagcattggctccgaggttggctccctggggtttgctattgagggcccttcacaggctaaaattgagtataatgaccagaacgatggcagttgtgacgtcaagtattggccgaaagagcccggtgagtatgcggtacatatcatgtgcgacgatgaagatattaaggatagcccctacatggcattcatccaccccgctacgggcggttataaccctgacttagtgagagcctatggaccaggtttagagaaaagtggttgcatagtgaacaacttagccgaatttaccgttgaccctaaggatgctggcaaggcccccctgaaaatcttcgctcaggatggagaaggtcagcggatcgacatacagatgaaaaatcgtatggacggcacctatgcgtgcagctatacacctgtcaaggccattaagcatactatcgcagtggtttggggcggggtgaacatccctcactcaccctaccgggtgaatatcggccagggaagtcacccacaaaaagttaaagtattcgggcctggcgtggaaaggtctggactcaaagccaacgaacccacacacttcaccgtagactgtaccgaggccggcgaaggagatgtaagcgtcggtataaagtgtgatgcgagagtcctgtccgaggacgaagaggatgtcgactttgacattatccacaatgcaaatgataccttcaccgttaaatacgtgccccccgccgcgggccggtataccattaaagtcctattcgcgagccaggagattcctgcctccccattccgagtgaaggtggatccatcccatgatgcctcaaaggttaaagcagaagggcccgggctgtccaaggcaggggtcgagaacggaaaacccacccatttcacagtgtacaccaagggtgctgggaaggcacctctgaacgttcagtttaactcccctttgcccggtgatgccgtaaaggatctggacatcattgacaattatgactactcccacactgtgaagtacaccccaacgcagcaaggaaacatgcaggttctcgtaacgtacggaggcgaccctattcctaaatctccttttacggtgggcgtggcagccccgctagatctttcaaagatcaagctcaacggcctagagaacagagttgaagtcggaaaagaccaggaattcacagtggatacaagaggcgcaggtggtcaggggaagctggatgtgaccattctgagcccatcacgcaaagtcgtaccgtgcttggtgacacccgttacagggagggagaactcaacggcaaaattcattcctcgcgaagaaggcctctatgccgtggacgtcacatatgacggacaccctgtgcctggatccccatatacggtggaggcctcactccctcccgacccatcaaaagtaaaggcacatgggccagggctggagggcgggctggtcgggaagcccgctgagttcaccatagacaccaaaggggccggaactggagggctcggcctcacagttgagggcccatgtgaggccaaaatcgaatgttctgataacggagatggtacctgttcagtcagctatctaccaacaaaaccaggggagtactttgtaaacattctattcgaagaggtgcatatcccaggttctcccttcaaagcagacatagaaatgccttttgatccttccaaagtcgtggctagtggtccagggttagagcacggtaaagtcggagaggcgggattgctgagcgtggactgctcagaggcgggacctggcgccctgggccttgaggccgtatctgactccggcacgaaagccgaagtgtccatccagaacaacaaagacggaacttacgcagttacctacgtgcctctgactgctggtatgtacacgctcactatgaagtacggaggcgagcttgtccctcatttcccagcacgggtcaaagtcgagccagctgtcgacaccagccgcattaaagtgttcggaccagggatcgagggcaaggatgtttttcgcgaggcgacgacggactttaccgtggattcccgcccactcactcaggtaggaggcgaccacattaaagctcacatcgcaaatccctcaggggcctctacagagtgtttcgtgaccgataacgccgacggtacctaccaggttgagtacacaccattcgaaaagggcctgcatgtggtagaggtgacttatgatgatgtacccatccctaacagtcccttcaaagtcgcagttactgaaggctgccagccttccagggtccaggctcagggccccggactgaaggaggccttcaccaacaaaccaaatgtgttcactgttgtgacacggggcgcaggaataggcggcttgggcatcactgtcgagggcccttccgagagcaagattaactgccgagacaataaagatggaagctgctctgctgaatacataccctttgctcctggggactatgatgtgaacatcacctacggcggtgctcatattccgggaagtccatttagagttccagtgaaggacgttgttgacccttctaaggtgaaaattgctggcccaggattgggaagcggagtgcgcgccagggttctgcagagtttcacagtggacagctccaaggctggcttagcacccctggaggtgcgtgtccttgggccaagggggctggttgagcccgttaatgtcgtggacaacggggacggcacccatacagttacctataccccctctcaggaaggcccgtacatggtgagcgtgaaatatgcagacgaggagatcccacgatctcctttcaaggtaaaggtgttgcccacttatgacgcttctaaggtcactgccagcgggccagggttgtcctcgtacggggtaccagcgagcctgcctgtggactttgctatcgacgccagggatgccggggaggggcttctcgcagtacaaatcacagatcaggaagggaaacccaaaagagctattgtacacgacaataaagatgggacatacgcggtcacgtacatcccggacaaaaccggaaggtacatgataggagtaacttatggcggagacgatattcctctgagcccttaccgcattagagccacccaaaccggggacgcatccaagtgtctcgccacagggccaggcatagcgtccaccgtaaagactggcgaggaggtgggcttcgtggtagacgctaaaaccgccggaaagggaaaagttacctgtacagtcctcacacccgatgggacggaggccgaagcagatgtaatcgaaaacgaagatggcacctatgacatcttctatacagctgcaaagcctgggacatacgtaatctacgtgaggttcggcggtgtagatattccaaattctccttttacggtcatggccacggatggggaagtgacggccgttgaagaagcccctgtaaccgaggaagcttatgtccctgtcagcgatatgaatggtcttggattcaagccctttgacctggtgattcctttcgccgtgaggaaaggggaaataaccggtgaggttcatatgccatccgggaagactgctacgcctgagatcgtcgataataaggatggcaccgtgacagttagatacgcgcccaccgaagtcggtcttcacgagatgcacattaagtacatgggctctcacattcccgaatctccactccagttttatgtgaactacccaaacagtgggagcgtaagtgcctacggcccaggcctcgtgtatggcgttgctaacaagacggcgacttttaccatcgtcactgaggacgctggagaagggggtctggatctggccatcgagggcccaagcaaggccgaaatcagctgcattgacaacaaagatggaacttgtacagtgacgtacctccccacgctcccaggtgactactcaatcctggttaagtataacgacaagcacattcccggatcccccttcactgcaaaaattacagatgatagtcgccggtgtagtcaggtaaaactcggatcggccgcagactttctgttagatatctcggaaactgacctgtctagtctgaccgccagcatcaaagccccaagcgggcgggatgaaccttgcctgctgaaaaggcttccaaataaccatataggaatctcatttatcccccgcgaggtgggtgaacatctcgtaagcataaagaaaaatggaaaccatgtcgcaaatagcccagtgtcaattatggtcgtgcagagtgaaattggcgatgctaggcgggctaaagtgtacggacgagggctttcagagggaaggacatttgagatgtccgatttcatcgtcgacaccagagatgcaggttatgggggcatctctctggccgttgagggaccaagtaaggtggacatacagactgaggacctggaagacggaacctgtaaggtgagctacttccccacagttcctggcgtgtatatcgtgtcaaccaagtttgccgatgaacacgtgcccgggtccccttttacagtgaagatttcaggagaggggcgagtgaaagagtcaattacacgcaccagtcgggctccgtcagtggccaccgtgggatccatttgcgacctgaatctaaaaatccccgaaattaactcctccgacatgtccgctcacgtgacttcccctagtgggcgagtgactgaggccgagatcgttccgatgggcaagaacagccattgcgtgcgctttgtgcctcaagagatgggtgttcacaccgtatcagtgaagtatcgcggtcagcacgtgaccgggagcccatttcaatttactgtagggccactaggcgaaggcggcgcacataaggtccgggctggcgggcctggccttgagagaggtgaagctggagtgccagctgagttctctatttggacacgcgaggctggcgccgggggtttgagtattgctgtggaggggccctccaaggcggaaatcaccttcgacgatcacaagaatggatcttgtggcgtgtcttacatcgcccaagagcccggtaactacgaagtgagcatcaagttcaacgacgaacatatccccgagtctccttaccttgtgcctgtgatcgcgccgtcggacgatgccaggcgtcttactgtcatgtcgctccaggaatccgggctgaaggtcaaccagccagcctcttttgcgataagacttaacggggccaaaggcaagatcgacgccaaggtgcactcgccaagtggagccgttgaggagtgtcacgtttccgaacttgaaccagacaagtacgccgtacggtttatcccgcacgaaaacggtgtgcatacaattgacgtgaaattcaatggctcgcacgtggtggggagccccttcaaagtgcgggtgggagaaccggggcaggctgggaaccctgctctggtcagcgcgtacggaaccggcttagagggcggcacaactggtatccagagtgagttctttattaataccactcgagccgggccaggtaccctgtcagtcactatagaagggccctctaaagtcaagatggattgtcaggaaacccccgagggctataaagttatgtacacccctatggctcccggaaattatctcatctctgtgaagtacgggggtccgaaccacattgtgggatcgccatttaaggctaaggtcacgggccagcggctcgtgagcccagggagcgcaaatgaaacctcatcgatcctggtagaaagcgtgacgcgcagctcgacagagacttgctactccgccatccccaaagccagctctgacgccagcaaggtgacatccaaaggcgctggcctgagtaaagcatttgtgggccagaagtctagctttcttgtggattgcagtaaggcgggatcaaatatgctcctgatcggagtccatggccctaccactccttgcgaagaagtatcgatgaaacacgtgggcaatcagcagtacaatgtaacgtatgtggtcaaggagcgtggagactatgtcctggccgtgaagtggggagaagagcatattcccggttcaccgttccacgtgaccgtcccctag

SEQ ID NO: 62691 - DNA, 7269 bp, Artificial Sequence
  derived and/or modified sequence
atgcaggagcacagcacccggcggcgcagcctgagcctgtgcccagactgggagagctgggacccccagaagcctgtggacaatgcccgggaggccatgcagcaggctgatgactggctgggcgtgccccaggtgatcaccccagaggagatcatccacccagatgtggatgagcacagcgtgatgacctacctgagccagttccccaaggccaagctgaagccaggggcccccctgaagcccaagctgaaccccaagaaggcccgggcctacggccggggcatcgagcccaccggcaacatggtgaagcagcctgccaagttcaccgtggacaccatctctgctggccagggagatgtgatggtgtttgtggaggaccctgagggcaacaaggaggaggcccaggtgaccccagacagcgacaagaacaagacctacagcgtggagtacctgcccaaggtgacaggcctgcacaaggtgacagtgctgtttgctggccagcacatcagcaagagcccctttgaggtgtctgtggacaaggcccagggagatgccagcaaggtgacagccaagggccctggcctggaggccgtgggcaacatcgccaacaagcccacctactttgacatctacacagctggagctggggtgggggacatcggcgtggaggtggaggacccccagggcaagaacacagtggagctgctggtggaggacaagggcaaccaggtgtaccgctgtgtgtacaagcccatgcagcccggcccccacgtggtgaagatcttctttgctggggacaccatccccaagagcccctttgtggtgcaggtgggggaggcctgcaaccccaatgcctgccgggccagcggccggggcctgcagcccaagggcgtgcgcatccgggagaccacagacttcaaggtggacaccaaggctgctggcagcggggagctgggcgtgaccatgaagggccccaagggcctggaggagctggtgaagcagaaggacttcctggatggagtgtatgcctttgagtactaccccagcaccccaggccgctacagcatcgccatcacctggggcggccaccacatccccaagagcccctttgaggtgcaggtgggccctgaggccggcatgcagaaggtgcgggcctggggccctggcctgcatggaggcatcgtgggccgctctgctgactttgtggtggagagcatcggcagcgaggtgggcagcctgggctttgccatcgagggccccagccaggccaagattgagtacaatgaccagaatgatggcagctgtgatgtgaagtactggcccaaggagcccggggagtatgctgtgcacatcatgtgtgatgatgaggacatcaaggacagcccctacatggccttcatccacccagccactggaggctacaacccagacctggtgcgggcctacggccctggcctggagaagagcggctgcatcgtgaacaacctggccgagttcaccgtggaccccaaggatgctgggaaggcccccctgaagatctttgcccaggatggagagggccagagaattgacatccagatgaagaacaggatggatggcacctacgcctgcagctacacccctgtgaaggccatcaagcacaccatcgctgtggtgtggggcggcgtgaacatcccccacagcccctacagagtgaacatcggccagggcagccacccccagaaggtgaaggtgtttggacctggggtggagaggagcggcctgaaggccaatgagcccacccacttcaccgtggactgcacagaagctggggagggagatgtgtctgtgggcatcaagtgtgatgcccgggtgctgtctgaagatgaggaggatgtggactttgacatcatccacaatgccaatgacaccttcaccgtgaagtatgtgcccccagctgctggccgctacaccatcaaggtgctgtttgccagccaggagatcccagccagccccttccgggtgaaggtggaccccagccatgatgccagcaaggtgaaggccgagggccctggcctgagcaaggccggcgtggagaatggcaagcccacccacttcaccgtgtacaccaagggggccggcaaggcccccctgaatgtgcagttcaacagccccctgcctggagatgctgtgaaggacctggacatcatcgacaactatgactacagccacacagtgaagtacacccccacccagcagggcaacatgcaggtgctggtgacctatggaggagaccccatccccaagagccccttcaccgtgggcgtggccgcccccctggacctgagcaagatcaagctgaatggcctggagaacagagtggaggtgggcaaggaccaggagttcaccgtggacaccaggggggccggcggccagggcaagctggatgtgaccatcctgagccccagcaggaaggtggtgccctgcctggtgacccctgtgactggaagagagaacagcacagccaagttcatcccccgggaggagggcctgtatgctgtggatgtgacctatgatggccaccctgtgcccggcagcccctacacagtggaggccagcctgcccccagaccccagcaaggtgaaggcccacggccctggcctggagggcggcctggtgggcaagccagctgagttcaccatcgacaccaagggagctggcactggaggcctgggcctgactgtggagggcccctgtgaggccaagattgaatgtagtgacaatggagatggcacctgcagcgtgtcctacctgcccaccaagccaggagagtactttgtgaacatcctgtttgaggaggtgcacatccctggcagccccttcaaggctgacatcgagatgccctttgaccccagcaaggtggtggccagcggccctggcctggagcacggcaaggtgggggaggccggcctgctgtctgtggactgcagcgaggccggccctggggccctgggcctggaggccgtgtctgattctggcaccaaggccgaggtgtccatccagaacaacaaggatggcacctatgctgtgacctacgtgcccctgacagctggcatgtacaccctgaccatgaagtatggaggagagctggtgccccacttccctgcccgggtgaaggtggagcctgctgtggacaccagccgcatcaaggtgtttggacctggcatcgagggcaaggatgtgttccgggaggccaccacagacttcaccgtggacagccggcccctgacccaggtgggcggggaccacatcaaggcccacatcgccaaccccagcggggccagcacagagtgctttgtgacagacaatgctgatggcacctaccaggtggagtacaccccatttgagaagggcctgcacgtggtggaggtgacctatgatgatgtgcccatccccaacagccccttcaaggtggccgtgacagagggctgccagcccagccgggtgcaggcccagggccctggcctgaaggaggccttcaccaacaagcccaacgtgttcaccgtggtgaccagaggagctggcattggaggcctgggcatcaccgtggagggccccagcgagagcaagatcaactgccgggacaacaaggatggcagctgcagcgctgagtacatcccctttgcccctggggactatgatgtgaacatcacctacggcggggcccacatccctggcagccccttccgggtgcctgtgaaggatgtggtggaccccagcaaggtgaagattgctggccctggcctgggcagcggcgtgcgggcccgggtgctgcagagcttcaccgtggacagcagcaaggccggcctggcccccctggaggtgcgggtgctgggcccccggggcctggtggagcctgtgaatgtggtggacaatggagatggcacccacacagtgacctacacccccagccaggagggcccctacatggtgtctgtgaagtatgcagatgaggagatccccaggagccccttcaaggtgaaggtgctgcccacctatgatgccagcaaggtgacagccagcggccctggcctgagcagctatggagtgcctgccagcctgcctgtggactttgccattgatgccagagatgctggggagggcctgctggccgtgcagatcacagaccaggagggcaagcccaagagggccatcgtgcatgacaacaaggatggcacctatgctgtgacctacatcccagacaagacaggccgctacatgattggagtgacctatggaggagatgacatccccctgagcccctaccgcatccgggccacccagacaggagatgccagcaagtgcctggccactggacctggcatcgccagcacagtgaagacaggagaggaggtgggctttgtggtggatgccaagacagctgggaagggcaaggtgacctgcaccgtgctgaccccagatggaacagaagctgaggctgatgtgattgaaaatgaagatggcacctatgacatcttctacacagctgccaagccaggcacctacgtgatctacgtgcgctttggaggagtggacatccccaacagccccttcaccgtgatggccacagatggagaggtgacagctgtggaggaggcccctgtgacagaggaggcctacgtgcctgtgtctgacatgaatggcctgggcttcaagccctttgacctggtgatcccctttgctgtgaggaaaggagagatcactggagaggtgcacatgcccagcggcaagacagccaccccagagatcgtggacaacaaggatggcaccgtgacagtgcgctatgcccccacagaggtgggcctgcacgagatgcacatcaagtacatgggcagccacatccctgagagccccctgcagttctacgtgaactaccccaacagcggctctgtgtctgcctacggccctggcctggtgtatggagtggccaacaagacagccaccttcaccatcgtgacagaagatgctggggagggcggcctggacctggccatcgagggccccagcaaggccgagatcagctgcatcgacaacaaggatggcacctgcaccgtgacctacctgcccaccctgcccggggactacagcatcctggtgaagtacaatgacaagcacatccctggcagccccttcaccgccaagatcacagatgacagccgccgctgcagccaggtgaagctgggcagcgctgctgacttcctgctggacatcagcgagacagacctgagcagcctgacagccagcatcaaggcccccagcggcagagatgagccctgcctgctgaagaggctgcccaacaaccacatcggcatctccttcatcccccgggaggtgggggagcacctggtgtccatcaagaagaatggaaaccacgtggccaacagccctgtgtccatcatggtggtgcagagcgagattggagatgcccggcgggccaaggtgtatggccggggcctgtctgagggccgcacctttgagatgtctgacttcatcgtggacaccagagatgctggctacggcggcatcagcctggccgtggagggccccagcaaggtggacatccagacagaggacctggaggatggcacctgcaaggtgtcctacttccccaccgtgcctggggtgtacatcgtgtccaccaagtttgctgatgaacatgtgcccggcagccccttcaccgtgaagatcagcggggagggccgggtgaaggagagcatcaccaggaccagccgggcccccagcgtggccaccgtgggcagcatctgtgacctgaacctgaagatccctgagatcaacagcagtgacatgtctgcccacgtgaccagccccagcggccgggtgacagaagctgagatcgtgcccatgggcaagaacagccactgtgtgcgctttgtgccccaggagatgggcgtgcacacagtgtctgtgaagtaccggggccagcacgtgacaggcagccccttccagttcaccgtgggccccctgggggagggcggggcccacaaggtgcgggccggcggccctggcctggagcggggggaggccggcgtgcctgctgagttcagcatctggacccgggaggccggggccggcggcctgagcattgctgtggagggccccagcaaggccgagatcacctttgatgaccacaagaatggcagctgtggggtgtcctacatcgcccaggagcccggcaactatgaggtgtccatcaagttcaatgatgagcacatccctgagagcccctacctggtgcctgtgattgcccccagtgatgatgcccggcggctgactgtgatgagcctgcaggagagcggcctgaaggtgaaccagcctgccagctttgccatccggctgaatggagccaagggcaagattgatgccaaggtgcacagccccagcggggctgtggaggagtgccacgtgtctgagctggagccagacaagtatgctgtgcgcttcatcccccatgaaaatggagtgcacaccattgatgtgaagttcaacggcagccacgtggtgggcagccccttcaaggtgcgggtgggggagcccggccaggccggcaacccagccctggtgtctgcctacggcaccggcctggagggcggcaccaccggcatccagagcgagttcttcatcaacaccacccgggccggccctggcaccctgtctgtgaccatcgagggccccagcaaggtgaagatggactgccaggagaccccagagggctacaaggtgatgtacacccccatggcccctggcaactacctgatctctgtgaagtatggaggccccaaccacatcgtgggcagccccttcaaggccaaggtgacaggccagaggctggtgtccccaggcagcgccaatgagaccagcagcatcctggtggagagcgtgaccaggagcagcacagagacctgctacagcgccatccccaaggccagcagtgatgccagcaaggtgaccagcaagggggccggcctgagcaaggcctttgtgggccagaagagcagcttcctggtggactgcagcaaggccggcagcaacatgctgctgattggagtgcacggccccaccaccccctgtgaggaggtgtccatgaagcacgtgggcaaccagcagtacaacgtgacctacgtggtgaaggagcggggggactatgtgctggccgtgaagtggggcgaggagcacatccctggcagccccttccacgtgacagtgccctag

SEQ ID NO: 62692 - DNA, 7776 bp, Artificial Sequence
  derived and/or modified sequence
atgcctgtgacagagaaggacctggccgaggatgccccctggaagaagatccagcagaacaccttcacccgctggtgcaatgagcacctgaagtgtgtgaacaagagaattggcaacctgcagacagacctgagtgatggcctgcggctgattgccctgctggaggtgctgagccagaagaggatgtacaggaagtaccaccagaggcccaccttccggcagatgcagctggagaatgtgtctgtggccctggagttcctggaccgggagagcatcaagctggtgtccattgacagcaaggccatcgtggatggcaacctgaagctgatcctgggcctggtgtggaccctcatcctgcactacagcatctccatgcctgtgtgggaggatgaaggagatgatgatgccaagaagcagacccccaagcagaggctgctgggctggatccagaacaagatcccctacctgcccatcaccaacttcaaccagaactggcaggacggcaaggccctgggcgccctggtggacagctgtgcccctggcctgtgcccagactgggagagctgggacccccagaagcctgtggacaatgcccgggaggccatgcagcaggctgatgactggctgggcgtgccccaggtgatcaccccagaggagatcatccacccagatgtggatgagcacagcgtgatgacctacctgagccagttccccaaggccaagctgaagccaggggcccccctgaagcccaagctgaaccccaagaaggcccgggcctacggccggggcatcgagcccactggaaacatggtgaagcagcctgccaagttcaccgtggacaccatctctgctggccagggagatgtgatggtgtttgtggaggaccctgagggcaacaaggaggaggcccaggtgaccccagacagcgacaagaacaagacctacagcgtggagtacctgcccaaggtgacaggcctgcacaaggtgacagtgctgtttgctggccagcacatcagcaagagcccctttgaggtgtctgtggacaaggcccagggagatgccagcaaggtgacagccaagggccctggcctggaggccgtgggcaacatcgccaacaagcccacctactttgacatctacacagctggggccggcgtgggggacattggagtggaggtggaggacccccagggcaagaacacagtggagctgctggtggaggacaagggcaaccaggtgtaccgctgtgtgtacaagcccatgcagcccggcccccacgtggtgaagatcttctttgctggggacaccatccccaagagcccctttgtggtgcaggtgggggaggcctgcaaccccaatgcctgccgggccagcggccggggcctgcagcccaagggcgtgcgcatccgggagaccacagacttcaaggtggacaccaaggccgccggcagcggggagctgggcgtgaccatgaagggccccaagggcctggaggagctggtgaagcagaaggacttcctggatggagtgtatgcctttgagtactaccccagcaccccaggccgctacagcatcgccatcacctggggcggccaccacatccccaagagcccctttgaggtgcaggtgggccctgaggccggcatgcagaaggtgcgggcctggggccctggcctgcacggcggcatcgtgggccgctctgctgactttgtggtggagagcatcggcagcgaggtgggcagcctgggctttgccatcgagggccccagccaggccaagattgagtacaatgaccagaatgatggcagctgtgatgtgaagtactggcccaaggagcctggagaatatgctgtgcacatcatgtgtgatgatgaggacatcaaggacagcccctacatggccttcatccacccagccaccggcggctacaacccagacctggtgcgggcctacggccctggcctggagaagagcggctgcatcgtgaacaacctggccgagttcaccgtggaccccaaggatgctgggaaggcccccctgaagatctttgcccaggatggagagggccagagaattgacatccagatgaagaacaggatggatggcacctacgcctgcagctacacccctgtgaaggccatcaagcacaccatcgctgtggtgtggggcggcgtgaacatcccccacagcccctacagagtgaacatcggccagggcagccacccccagaaggtgaaggtgtttggacctggggtggagaggagcggcctgaaggccaatgagcccacccacttcaccgtggactgcacagaggccggggagggagatgtgtctgtgggcatcaagtgtgatgcccgggtgctgtctgaagatgaagaagatgtggactttgacatcatccacaatgccaatgacaccttcaccgtgaagtatgtgcccccagctgctggccgctacaccatcaaggtgctgtttgccagccaggagatcccagccagccccttccgggtgaaggtggaccccagccatgatgccagcaaggtgaaggccgagggccctggcctgagcaaggccggcgtggagaatggcaagcccacccacttcaccgtgtacaccaagggagctgggaaggcccccctgaatgtgcagttcaacagccccctgcctggagatgctgtgaaggacctggacatcatcgacaactatgactacagccacacagtgaagtacacccccacccagcagggcaacatgcaggtgctggtgacctacggcggggaccccatccccaagagccccttcaccgtgggcgtggccgcccccctggacctgagcaagatcaagctgaatggcctggagaacagagtggaggtgggcaaggaccaggagttcaccgtggacaccagaggagctgggggccagggcaagctggatgtgaccatcctgagccccagcaggaaggtggtgccctgcctggtgacccctgtgacaggccgggagaacagcacagccaagttcatcccccgggaggagggcctgtatgctgtggatgtgacctatgatggccaccctgtgcccggcagcccctacacagtggaggccagcctgcccccagaccccagcaaggtgaaggcccacggccctggcctggagggcggcctggtgggcaagccagctgagttcaccatcgacaccaagggggccggcaccggcggcctgggcctgactgtggagggcccctgtgaggccaagattgagtgcagcgacaatggagatggcacctgcagcgtgtcctacctgcccaccaagccaggagagtactttgtgaacatcctgtttgaggaggtgcacatccctggcagccccttcaaggctgacatcgagatgccctttgaccccagcaaggtggtggccagcggccctggcctggagcacggcaaggtgggggaggccggcctgctgtctgtggactgcagcgaggccggccctggggccctgggcctggaggccgtgtctgacagcggcaccaaggccgaggtgtccatccagaacaacaaggatggcacctatgctgtgacctacgtgcccctgacagctggcatgtacaccctgaccatgaagtatggaggagagctggtgccccacttccctgcccgggtgaaggtggagcctgctgtggacaccagccgcatcaaggtgtttggacctggcatcgagggcaaggatgtgttccgggaggccaccacagacttcaccgtggacagccggcccctgacccaggtgggcggggaccacatcaaggcccacatcgccaaccccagcggggccagcacagaatgttttgtgacagacaatgctgatggcacctaccaggtggagtacaccccatttgagaagggcctgcacgtggtggaggtgacctatgatgatgtgcccatccccaacagccccttcaaggtggccgtgacagagggctgccagcccagccgggtgcaggcccagggccctggcctgaaggaggccttcaccaacaagcccaacgtgttcaccgtggtgaccaggggggccggcatcggcggcctgggcatcaccgtggagggccccagcgagagcaagatcaactgccgggacaacaaggatggcagctgcagcgctgagtacatcccctttgcccctggggactatgatgtgaacatcacctatggaggagcccacatccctggcagccccttccgggtgcctgtgaaggatgtggtggaccccagcaaggtgaagattgctggccctggcctgggcagcggcgtgcgggcccgggtgctgcagagcttcaccgtggacagcagcaaggccggcctggcccccctggaggtgcgggtgctgggcccccggggcctggtggagcctgtgaatgtggtggacaatggagatggcacccacacagtgacctacacccccagccaggagggcccctacatggtgtctgtgaagtatgcagatgaggagatccccaggagccccttcaaggtgaaggtgctgcccacctatgatgccagcaaggtgacagccagcggccctggcctgagcagctatggagtgcctgccagcctgcctgtggactttgccattgatgccagagatgctggggagggcctgctggccgtgcagatcacagaccaggagggcaagcccaagagggccatcgtgcatgacaacaaggatggcacctatgctgtgacctacatcccagacaagacaggccgctacatgattggagtgacctatggaggagatgacatccccctgagcccctaccgcatccgggccacccagacaggagatgccagcaagtgcctggccaccggccctggcatcgccagcacagtgaagacaggagaggaggtgggctttgtggtggatgccaagacagctgggaagggcaaggtgacctgcaccgtgctgaccccagatggaacagaggccgaggctgatgtgattgaaaatgaagatggcacctatgacatcttctacacagctgccaagccaggcacctacgtgatctacgtgcgctttggaggagtggacatccccaacagccccttcaccgtgatggccacagatggagaggtgacagctgtggaggaggcccctgtgacagaggaggcctacgtgcctgtgtctgacatgaatggcctgggcttcaagccctttgacctggtgatcccctttgctgtgaggaagggggagatcaccggggaggtgcacatgcccagcggcaagacagccaccccagaaattgtggacaacaaggatggcaccgtgacagtgcgctatgcccccacagaggtgggcctgcacgagatgcacatcaagtacatgggcagccacatccctgagagccccctgcagttctacgtgaactaccccaacagcggctctgtgtctgcctacggccctggcctggtgtatggagtggccaacaagacagccaccttcaccatcgtgacagaagatgctggggagggcggcctggacctggccatcgagggccccagcaaggccgagatcagctgcatcgacaacaaggatggcacctgcaccgtgacctacctgcccaccctgcccggggactacagcatcctggtgaagtacaatgacaagcacatccctggcagccccttcaccgccaagatcacagatgacagccgccgctgcagccaggtgaagctgggcagcgctgctgacttcctgctggacatcagcgagacagacctgagcagcctgacagccagcatcaaggcccccagcggcagagatgagccctgcctgctgaagaggctgcccaacaaccacatcggcatctccttcatcccccgggaggtgggggagcacctggtgtccatcaagaagaatggaaatcatgtggccaacagccctgtgtccatcatggtggtgcagagcgagattggagatgcccggcgggccaaggtgtatggccggggcctgtctgagggccgcacctttgagatgtctgacttcatcgtggacaccagagatgctggctatggaggcatcagcctggccgtggagggccccagcaaggtggacatccagacagaggacctggaggatggcacctgcaaggtgtcctacttccccaccgtgcctggggtgtacatcgtgtccaccaagtttgctgatgagcacgtgcccggcagccccttcaccgtgaagatctctggagagggccgggtgaaggagagcatcaccaggaccagccgggcccccagcgtggccaccgtgggcagcatctgtgacctgaacctgaagatccctgagatcaacagcagtgacatgtctgcccacgtgaccagccccagcggccgggtgacagaggccgagatcgtgcccatgggcaagaacagccactgtgtgcgctttgtgccccaggagatgggcgtgcacacagtgtctgtgaagtaccggggccagcacgtgacaggcagccccttccagttcaccgtgggccccctgggggagggcggggcccacaaggtgcgggccggcggccctggcctggagcggggggaggccggcgtgcctgctgagttcagcatctggacccgggaggccggggccggcggcctgagcattgctgtggagggccccagcaaggccgagatcacctttgatgaccacaagaatggcagctgtggggtgtcctacatcgcccaggagcccggcaactatgaggtgtccatcaagttcaatgatgagcacatccctgagagcccctacctggtgcctgtgattgcccccagtgatgatgcccggcggctgactgtgatgagcctgcaggagagcggcctgaaggtgaaccagcctgccagctttgccatccggctgaatggagccaagggcaagattgatgccaaggtgcacagccccagcggggctgtggaggagtgccacgtgtctgagctggagccagacaagtatgctgtgcgcttcatcccccatgaaaatggagtgcacaccattgatgtgaagttcaacggcagccacgtggtgggcagccccttcaaggtgcgggtgggggagcccggccaggccggcaacccagccctggtgtctgcctatggaacaggcctggagggcggcaccaccggcatccagagcgagttcttcatcaacaccaccagggctggccctggcaccctgtctgtgaccatcgagggccccagcaaggtgaagatggactgccaggagaccccagagggctacaaggtgatgtacacccccatggcccctggcaactacctgatctctgtgaagtatggaggccccaaccacatcgtgggcagccccttcaaggccaaggtgacaggccagaggctggtgtccccaggcagcgccaatgagaccagcagcatcctggtggagagcgtgaccaggagcagcacagagacctgctacagcgccatccccaaggccagcagtgatgccagcaaggtgaccagcaaaggagctggcctgagcaaggcctttgtgggccagaagagcagcttcctggtggactgcagcaaggccggcagcaacatgctgctgattggagtgcacggccccaccaccccctgtgaggaggtgtccatgaagcacgtgggcaaccagcagtacaacgtgacctacgtggtgaaggagcggggggactatgtgctggccgtgaagtggggcgaggagcacatccctggcagccccttccacgtgacagtgccctag

SEQ ID NO: 62693 - DNA, 7269 bp, Artificial Sequence
  derived and/or modified sequence
atgcaggagcacagcacccggcggcggagcctgagcctgtgccccgattgggagagttgggatcctcagaaacccgtagacaatgctcgcgaagccatgcagcaggctgacgattggttaggagtgcctcaggtgatcacccccgaggagatcatccaccccgacgtggacgaacacagtgtgatgacctatctatctcagttccccaaggccaagctgaagccgggagctcctttaaagccaaaattaaatcccaagaaggccagagcctatggaagagggatagaacccaccggtaatatggtgaaacagcctgcgaaatttactgtagatacaatctcagccggccaaggcgacgtgatggtgttcgtggaagatccagaaggcaacaaagaggaagcccaggttacccccgatagcgacaagaacaagacctattccgtggagtaccttcctaaagtgaccgggctacataaagtcaccgtcttgtttgcaggccagcacatcagcaagagtccttttgaggtgtccgtggataaagcccaaggagacgctagcaaagtgactgccaaggggcccggcttggaggctgtagggaacatcgctaataaacccacttacttcgacatttacacggcaggtgccggcgtaggagacatcggtgttgaggttgaagacccccaaggaaagaatactgtggagctgctcgtagaggacaagggaaatcaggtgtaccggtgcgtgtacaagccaatgcagcccggccctcacgttgtgaagatcttcttcgccggagacacaatccctaaatctcccttcgtggtccaggtcggcgaggcctgcaacccaaacgcttgccgagcctctggccgcggtctgcaaccaaaaggggtgaggattcgcgagaccaccgactttaaggtagatacaaaagccgctggaagtggagagctgggggtgacaatgaaagggcccaagggcctcgaggaattggttaaacagaaggattttctcgatggggtgtacgcttttgagtactacccttcaacacccggtaggtactcaatcgccatcacgtgggggggacatcacattcccaagagcccattcgaagtgcaggtgggcccagaagcggggatgcagaaagtgagagcatgggggcctggcctacacggcggcatcgttggcagaagcgccgattttgttgtggagtccattggtagcgaggtcgggtccctgggctttgctattgaaggtccatctcaagcgaagattgagtataatgaccagaatgacggctcctgtgatgtgaagtactggccaaaggaaccgggcgaatacgccgtacacatcatgtgtgacgatgaggacatcaaggacagtccctacatggcttttatccaccccgccactggcgggtataacccagatttagtccgcgcgtatggcccggggctcgagaaatctggttgtatcgtcaataatctggccgagtttaccgtcgatccaaaagatgctgggaaggccccactgaaaatcttcgcccaagatggtgaggggcaaagaattgatatccagatgaagaatcgcatggatggcacttacgcatgttcatacacccccgttaaggctattaaacataccattgcagtggtgtggggcggcgtaaatattccacatagcccttatagagtgaacatcggtcagggatcccatccacagaaagtgaaagtgttcggccctggagtcgagcgctcggggctcaaagcaaacgagccgacacactttacggtggattgcaccgaagccggagaaggcgacgtctcggtgggaataaagtgtgacgcccgcgtgctgtctgaggacgaggaggatgtggacttcgacatcattcacaatgcaaacgacacctttacagtcaagtacgtgcctccggctgcggggcgatacactatcaaggtgctcttcgcttcgcaggaaattcctgcctcccctttcagagtcaaggtggacccttctcacgatgcaagcaaggtgaaagccgaaggccccggcctgagcaaagcaggagtagaaaatgggaagcctacccacttcaccgtttatactaaaggagctggcaaggcacctctcaatgtgcaatttaactcccctctgccgggggacgctgttaaggatctcgatataatcgataattacgactattctcacaccgtgaaatacacacccactcagcagggaaatatgcaggtgctcgtgacatatgggggtgatcctattcctaaaagcccattcacagtaggcgtggccgcccccttagacctgagcaagattaaacttaacggacttgagaatcgggtggaggtcgggaaggatcaggagttcaccgtggacacaagaggagcagggggacaggggaaactagacgtgacaattctgtctcctagccgtaaggtggtcccatgcctggtcactcctgtgacaggtcgggagaactctaccgctaagttcataccacgggaggaaggtttgtacgcagtagatgtcacatacgatggtcatccagttcccggctctccatacactgtggaagccagcctacctccagaccctagcaaggtgaaagcccacggtccaggattagagggcggattagtcggaaagcctgccgaattcactattgacaccaaaggagccggcactggcggtctgggcctgactgtagagggtccatgtgaggctaagatagagtgctcagacaatggtgatggcacatgctccgtttcctatttgcctaccaagcccggcgagtactttgtgaacatcctattcgaagaggtccatatcccggggagcccctttaaggcagatatcgagatgccatttgatccctcaaaagtggttgcctcaggccccggcctggagcatggaaaggtaggtgaggcaggcctgttatcggtggactgctccgaggcgggaccgggtgctttaggccttgaggccgtgtctgattcaggaaccaaggcagaggtgtccatccaaaacaacaaggacggcacatatgccgtgacgtacgtaccacttaccgctgggatgtacactcttactatgaagtacggcggtgaactggtcccccatttccctgcccgggtgaaagtggagcccgcggtggacacgagtcgtattaaggttttcggccctggaatcgagggaaaggatgtgtttagagaggctactacagatttcaccgtcgactctcgcccgctcactcaggtcggcggagaccacatcaaagcacatatagctaatcctagcggcgcttcaactgaatgttttgtgaccgacaatgccgacggaacataccaggtggagtacacccctttcgagaagggcctgcatgtggtggaagtgacatatgacgatgtgcctatcccgaattccccgttcaaagtcgcagtgacagaaggatgtcaaccatcccgggtgcaagctcaggggcccggcctgaaggaggcctttactaataagcccaatgtgttcacagttgttacccgcggggccggcattggaggcctgggtattaccgtggaaggtccttccgaaagcaagataaactgtcgagataacaaagacggcagctgtagcgccgagtacattccattcgctcctggagattacgacgtgaatatcacctatggtggggcccatattcctgggtccccatttagggtacccgtcaaggatgtagtggacccgtctaaagtgaagatcgcaggccccggactgggctcaggggtgagggcacgcgtactccaaagcttcaccgtggacagtagcaaggctgggctcgccccgctggaggtcagggtcctagggcccagaggcctcgtggaacctgtcaacgtcgtagacaatggcgacggtacgcatactgttacctacaccccctcgcaggaagggccttacatggtttccgtcaagtatgcggatgaggagataccgcggagtcccttcaaggtgaaggtgcttccgacctatgatgcatccaaggtcaccgcttcaggtcccggactatcttcttacggggtgcccgcatcgctgccagtggattttgctattgatgcgagggacgccggagaaggtctgctggccgtgcagataacggaccaagaagggaagcccaagagggctatagtccacgacaataaggacggaacctacgcggtgacttacattcccgacaaaaccggccgatacatgataggcgtgacatacggaggggatgacattcctctgtccccgtataggatcagagcaacacaaaccggagatgcctccaagtgcctggcgactgggcccggcattgccagcacggtcaagaccggggaagaagtaggcttcgtcgtcgacgcaaaaactgccggaaaaggtaaagtgacgtgcaccgtgttgacgccagatggcacggaggcagaggcggacgtcatcgagaacgaggacggcacttacgacatcttttacacagctgccaagccaggtacttatgtcatctatgtcaggttcggaggggtggatatcccaaattctccatttaccgttatggctaccgatggagaagtgacagccgttgaggaagctccagtaactgaggaggcatacgtgccagtgtccgacatgaatggacttggctttaagccctttgacttagtgataccgttcgccgtcagaaaaggtgagatcacgggtgaagtccacatgccgtctggtaagactgctacgccagagattgtcgacaacaaagatggaacagtcactgttagatacgcacctaccgaggttggcttgcacgagatgcacatcaagtacatggggtcccacatccccgagtcccccctccagttctatgtcaattatcccaactctgggagcgtgagcgcttatggccccggtttggtctatggagttgcaaacaaaaccgccacattcacaattgtgactgaggatgctggcgagggcggcctcgacctggcaatcgaaggcccttccaaagccgagatctcctgtatcgacaacaaggacgggacgtgtacagtgacgtatctacctaccctgccgggagattacagtattctcgtgaagtacaacgacaaacatattcctgggtctccttttactgccaagattaccgatgattctcgccggtgtagccaagtgaaactggggagtgctgcagatttccttttggacattagtgagaccgacttgagttcactcaccgcttccataaaagcccccagcggccgggatgagccctgtctcctgaagcgtttgcccaataaccatatcggtattagttttatcccgcgagaagttggagaacatctcgtaagcataaagaaaaatgggaatcatgttgccaatagccctgtgtccatcatggttgtccagagcgagatcggggatgcccggagagcaaaagtgtacggccggggcctctctgagggacgaacttttgaaatgtctgacttcattgtcgacacccgcgatgcgggctatggaggtatctctttagcagttgaaggcccgtctaaagtggatatccagacagaggacctggaagatggtacatgcaaagtgtcatatttcccaaccgtgccaggcgtgtacattgtttcaactaagttcgccgacgaacacgtaccgggcagtcccttcactgtaaagatttcaggggagggacgcgtcaaagagagtatcaccaggactagtcgcgcccccagcgttgcgaccgtggggtctatatgcgatctgaacctgaagataccagagattaactcatctgacatgagtgcccacgtgacctcaccctctgggcgagtgacagaggcggagatcgtgcccatgggtaaaaactcacactgtgtacgctttgtcccacaagagatgggagttcacacagtttctgtgaagtatagaggccaacatgtaacaggcagccccttccaattcacagtaggtcccctcggcgaggggggagcgcacaaggtgcgggccggcgggccaggacttgagaggggagaggctggcgtaccagccgagttttcaatttggacgagggaggcaggtgccggagggttaagcatcgccgttgagggacccagtaaggcagagattacattcgacgatcacaagaatggaagttgcggtgtctcctatattgcgcaagaacccggcaactacgaagtgagcattaagtttaatgatgaacatatccccgagtccccctatttggtcccggtaatcgcgccctctgacgatgccaggaggctgactgtgatgtcactgcaggagtccggcctgaaggtgaaccaacccgcctcctttgcaattagattaaacggagcgaaagggaaaattgacgccaaagtacattccccaagtggggccgtggaagagtgtcacgtgagcgagctggaaccagataaatatgcggttcgatttatcccacacgaaaatggagttcatacgatagatgtcaagttcaatggctcccatgtggtggggtcaccatttaaagtcagggttggcgaaccaggacaagccgggaatccagctctcgttagcgcgtacggaactgggctggagggagggacaaccgggatccagagtgaatttttcatcaacacaacccgcgctggccctggaaccctttctgtcacgattgaaggaccctccaaggtgaagatggattgccaagagacccccgaaggatacaaggtgatgtatacacctatggctccaggaaattatctcatttctgtgaagtatggtggaccaaaccacatcgtgggtagcccttttaaagcgaaggtgactggtcagaggctcgtgagtcccgggagcgccaacgaaacatccagcatcctggtcgagtccgttacgagatcttccacagagacttgctattcagccattccaaaggcgtcaagcgacgcgtccaaggtcacctccaagggcgctgggctgagcaaagcctttgtgggacaaaaatcaagctttcttgtggactgttccaaagccggcagcaacatgctgctgatcggcgttcacggtcctacaaccccgtgtgaagaggttagcatgaagcatgtcggtaaccagcagtataatgtcacttacgttgtcaaggagcgaggggattatgtgctcgccgtcaagtggggtgaagagcatatacctgggtccccattccatgtgacagtgccttag

SEQ ID NO: 62694 - DNA, 7776 bp, Artificial Sequence
  derived and/or modified sequence
atgcccgtgaccgagaaggacctggccgaggacgccccctggaagaagattcagcagaataccttcacgagatggtgtaatgagcacttgaaatgtgttaacaaaaggattgggaacttacaaacagatctgtccgatggtctgagactgatcgcactgctagaagtactttcacaaaaaaggatgtatagaaagtaccaccagagaccaacctttagacagatgcaactggagaatgtctcagttgcgctcgagtttcttgatcgggagagcattaagttagtgtccatcgactcgaaggctattgtcgatggcaacctgaaattaatccttggcctggtgtggactctgattctccattactctatctccatgcctgtgtgggaggatgagggagatgacgacgccaagaaacaaacccctaagcagagactactgggctggatccagaacaaaatcccttacctgcccatcacgaatttcaaccagaattggcaggatggcaaagccctgggagctctagtggattcttgcgccccgggtctctgccccgactgggagagttgggacccacagaaaccagtcgacaatgcccgcgaggccatgcagcaggccgatgactggctgggtgtgcctcaggtaatcacccccgaggaaattatccatccagacgtggatgagcactctgtcatgacatacctctctcagtttccaaaagcaaagctgaaacctggggctccacttaaaccgaagttaaacccgaagaaggccagggcctacggaagaggcattgaaccgaccgggaacatggtgaaacagcccgcaaagttcacagtcgacacgatatctgcgggacagggcgacgtcatggtgttcgtggaagacccggaaggaaataaggaagaggcccaggtcacccccgattccgataagaataaaacgtatagtgtggaatatttacccaaagtgactggtctgcacaaggtgaccgtgttgtttgctggtcagcatattagcaagagcccatttgaagtctccgtcgacaaagcccagggcgacgccagtaaagtcacagctaagggacctgggttagaagctgtcggcaacattgcaaacaaaccgacttatttcgatatttacacagccggagctggggttggtgatatcggggttgaggttgaggacccccagggcaaaaacacggtggagcttttggttgaggacaagggaaaccaggtatatcgatgtgtctataaacctatgcaacctggcccacatgttgtaaagattttctttgcaggtgacactattcccaagagcccctttgtggtgcaagtcggcgaagcttgcaatcccaatgcttgccgggcttccggccggggcctgcaacccaagggtgtgcggatccgcgagactactgatttcaaagttgacaccaaggccgccggtagtggtgaattgggagtgacgatgaaggggcccaagggtctagaggaactggttaagcagaaagacttcctggatggagtttacgccttcgaatattatccttcaacacccggacgctatagtatcgctatcacgtggggcgggcaccacattccaaagtcaccctttgaggtgcaggtggggccagaggccgggatgcaaaaagtccgcgcatgggggcctggcctacacggaggtattgtggggcgtagcgcggactttgttgtggagtccataggaagcgaggtgggttcactcggcttcgcaatcgaggggccatcccaggccaagattgaatacaatgatcagaacgacggctcctgtgatgtgaagtattggcctaaagagccaggtgagtacgctgtgcatatcatgtgcgatgatgaagacataaaggactctccatatatggcctttattcatcctgcgactggcggttataatcctgatctcgtacgagcctatgggccaggcctggagaaaagtggctgtatcgtaaataaccttgcggaatttaccgtggatccaaaggacgctggcaaagcacctctcaaaatcttcgctcaggacggcgagggacagcgcatcgacatccaaatgaagaaccggatggacggaacgtacgcctgtagctatacccctgtaaaagccatcaagcatactatagccgtggtgtggggaggagtgaacatccctcacagcccatatcgcgtcaacatcgggcaaggatcacaccctcaaaaggtgaaggtctttgggccgggcgtggaacgaagcgggctgaaagcaaacgagcccacgcatttcacagtagattgcaccgaggcgggcgaaggagatgtgagcgtcgggatcaagtgcgacgcccgggttctgtctgaagatgaggaagatgtagacttcgacatcatccataatgccaacgatacttttaccgtcaaatacgtgcctcctgctgccgggaggtatacaatcaaggtgttattcgctagccaggagattccggccagtccatttagagttaaggtcgaccctagccacgacgcatctaaggtgaaggcagaggggcctggcctctccaaggccggcgtagaaaatggcaaacccacccattttacagtctacaccaaaggagccggtaaggcgcctcttaatgtccaatttaacagtcccctgcccggagatgccgtgaaggatctcgacatcattgataactatgactattctcacaccgtcaagtatacaccaacacagcagggcaacatgcaggtgctagtgacatacgggggcgatccaatccccaagtcccctttcacagtaggagttgccgcaccccttgacctgagcaagatcaagctgaatgggcttgaaaaccgcgtcgaggtgggcaaagatcaagaatttacagtcgatactaggggggctgggggccagggtaagctggacgtgaccatattgagcccttccagaaaggtagtgccatgtctggtgacacctgttaccggcagagaaaacagcaccgcgaagtttattcctcgggaggagggcctgtatgctgtggacgttacctacgacgggcatcctgtaccagggagcccctatacagtggaagcctcccttccccccgatccttcaaaggtcaaagcccacgggcctggactggaggggggtctagtggggaaacctgcagaatttacaattgataccaaaggcgccggcaccggcgggttaggtctgactgtagaggggccatgcgaggctaagatcgagtgctccgataacggcgatgggacctgttctgtgagctacctgcccacaaagcctggcgaatattttgtcaacatcctcttcgaagaggtccatatcccgggatcaccctttaaggcagacattgagatgccttttgacccttcaaaagtcgtagcttcagggccgggcctggagcatgggaaggtgggggaggccggattgttaagcgtagattgtagcgaggccggcccaggagccctgggccttgaagctgtgtctgactctggcacaaaagccgaagtatctatacagaacaacaaagatggaacgtacgccgtcacctacgtgccactgactgccggtatgtacaccctgacaatgaagtacggaggggaactcgtaccccacttcccagcacgagtaaaggtcgagccagcagtggacacatctcgtatcaaggttttcggacctggaattgaaggcaaagacgtgtttagggaggccactactgattttaccgtggattcaagaccactgacccaggtgggaggcgaccatataaaggcccacattgctaatccttcaggcgcatccacggaatgcttcgtcacagacaatgcagatggcacttatcaggtcgagtatactccctttgagaaaggattgcatgtggtggaggtgacgtacgacgatgtgccaataccaaattccccgtttaaggtcgcagtcactgaggggtgccagccttctcgtgtgcaggcacaagggcctggtctgaaggaggcctttaccaataagcctaatgttttcacggtagtgacaaggggcgcaggcatcggtgggctcgggatcacagtggagggcccttcggaatccaagatcaactgcagggataacaaagatggctcttgtagcgccgaatacattccttttgcccctggtgattatgatgttaatatcacttatggaggtgctcatatccccggttctccgttccgcgtacctgtgaaggatgtggtggacccctccaaggttaaaattgctggacctggactaggctccggcgtgagggcccgagttctccagagtttcaccgtggattcctccaaagcaggtctcgccccactagaggtccgagtattgggaccccgagggctggtcgagcccgtcaacgtcgtcgacaatggtgacggaactcacaccgtgacatacactcctagtcaggagggaccatacatggtgtcagtaaaatatgctgatgaagaaatcccccgtagcccctttaaggtgaaagtgctacctacatacgacgcttcaaaagtcaccgcaagtggacctggactttctagctacggagtgccagcaagcctgcccgtggacttcgctattgacgcaagagacgcgggcgaaggactgttggcagtacaaattaccgaccaggagggaaaacccaaaagggccatcgtccatgataacaaggacggaacttatgcagtcacttacatcccagataagaccggccgatatatgataggtgtgacctacggaggggatgacatccctctatccccctaccgtatcagagctacccaaaccggtgatgcctctaagtgcttagcaactgggccgggcatcgccagcactgtcaagactggggaagaggtcggatttgtcgtcgacgccaaaactgctggcaaaggtaaggtaacttgcacagtactgactcctgacggaacagaggccgaggccgatgtgatcgagaatgaagatgggacctacgacatattctatactgccgctaaaccaggcacttatgtgatctacgtaagattcggaggtgtcgatataccgaattctccttttaccgtgatggctactgacggcgaagttactgcagtggaggaggcacctgtgaccgaggaagcctatgttcccgtctctgacatgaacggactggggtttaaaccctttgatctcgttattccattcgccgtccggaagggggagatcaccggtgaggtgcatatgccttcgggcaaaactgcaacccccgaaattgtggacaataaagatggaacggtgacggtgaggtatgctccaacagaggtggggcttcacgagatgcatatcaaatatatggggagccacatcccagagtcccctctccagttttacgtgaattaccccaattcaggctcagtgtctgcgtacgggccgggcctggtgtacggggtagccaataagactgccacttttaccattgtgacagaagacgccggagagggcggcctagacctagccatcgagggaccgtccaaagcagagatctcttgcatcgataataaagatggtacttgcacagtcacgtaccttccaactctgccaggggattactcaatcttagtaaaatacaacgataagcatatccccggctcaccatttaccgcaaagattacagacgactccaggcggtgctcccaggttaagctcggctccgccgcggacttcctcctcgacatctccgagaccgaccttagctcattgaccgcctctatcaaagcccccagtggccgggatgaaccatgtttgttgaagcgccttccaaataaccacatcgggatatcgtttatccctagagaggttggtgagcaccttgtgagtattaagaagaatggtaatcatgtggctaactccccagttagtattatggtggtccagtccgaaatcggagacgcacggcgcgcaaaagtgtacgggcggggactgagcgaagggaggaccttcgagatgtccgacttcatcgttgacacccgggacgctggctacggtggcatatcactggcggtggagggccctagcaaagtggacatccagaccgaggacctagaggatgggacctgcaaggtgtcatatttccccacagtgcctggcgtgtacatcgtttccactaaattcgctgatgagcacgtgccagggagcccgttcaccgtcaagatttctggggagggtagagttaaagaaagcattaccagaacctctcgggcaccctctgtcgctaccgtgggctctatttgcgaccttaatctcaaaattcccgagatcaattctagcgatatgtccgcccatgtaacctcaccgtccgggagagtgactgaggcagaaatcgttcccatgggcaagaactcccactgcgtgcggtttgtcccccaggagatgggtgtacacacagtctcagttaagtatcggggacaacatgtgactgggtctcccttccagttcaccgtaggaccgctgggtgaaggaggcgcccacaaagtgcgcgctggtggccccggactcgaaagaggcgaggcaggagttcccgcagaattttccatctggacacgggaagccggggccgggggcctctccattgctgtggaaggcccgtcaaaagcagaaataacgtttgatgatcacaaaaacggtagctgtggcgtatcatatattgctcaggagcccggcaactacgaagtttcaattaaattcaacgacgagcacatacctgaaagcccataccttgtgcctgttatcgccccctccgacgacgcccggagactcacagtcatgtcccttcaggaaagtgggctgaaagtcaaccagccagcttctttcgcgatccgcctcaacggagcaaaaggaaagatcgacgccaaagtccactccccctcaggtgctgtcgaggagtgtcatgtgagcgagctggagccagacaagtacgccgtgcggtttatccctcatgagaatggtgtccacacaatagacgttaagtttaacggaagtcacgtggttggatccccctttaaagtgcgcgttggtgagcccggccaggctggcaaccctgctttagtttcagcctatggaaccggcctcgaaggagggactactggtattcaaagcgagttttttatcaatacaactcgggctggacccggcaccctgtcggtaactatagaaggaccttctaaggttaagatggactgtcaagaaacgccggaaggatacaaggtgatgtacactccaatggctccgggaaactatctgattagtgttaagtatggggggccaaaccatatcgttggctctcctttcaaagccaaggtgaccgggcaacggttagtatcaccgggctccgctaatgaaacatcttctatcttggtggagtcagtaaccagatcaagtaccgagacctgctattctgccataccaaaggctagtagcgacgccagtaaagtgacatccaagggcgccggtttgtctaaagcctttgtggggcaaaagtcgagctttctggtcgactgttctaaggcagggtcgaacatgctattgattggggtccatggccccaccactccatgcgaggaggtgtccatgaagcatgtgggaaaccagcagtacaatgtcacatacgtggttaaggagagaggcgactatgtacttgcagtcaagtggggagaggagcacatcccaggcagcccctttcacgtgaccgttccttag

SEQ ID NO: 62695 - DNA, 7268 bp, Artificial Sequence
  derived and/or modified sequence
atgcaggaacattccaccagaagaagatctctgtccctgtgtccagattgggaatcctgggacccacagaaaccggtagacaacgccagagaggccatgcaacaggctgatgattggctgggagttcctcaggtcatcacccccgaggagatcatccatcccgacgtcgacgagcacagtgtgatgacttatttatcacagtttcccaaagctaagctcaagcccggagctcctctgaagccaaaactgaatcccaaaaaggcacgagcatacggtcggggtattgagccgacggggaacatggtgaagcagcctgcgaaattcacagtagacactatatctgccggtcagggggacgttatggtatttgtggaagatcctgaaggcaacaaggaggaggcccaggtgacacccgactctgataagaataaaacatattcggttgagtatcttcccaaagtaactggtctccacaaagtcaccgtgctcttcgccggtcagcatatttcaaagtctcccttcgaagtcagtgtcgacaaagcgcagggcgatgcaagcaaagtgacagccaaaggcccaggactggaggccgtgggtaatatcgcaaacaagcctacatacttcgatatctataccgccggtgctggggtgggtgacatcggcgttgaagtggaggacccgcaggggaaaaacacagttgaactcttggtcgaggataaaggtaaccaggtctaccgttgtgtctacaagccgatgcagccgggtcctcacgtggtgaaaatcttttttgccggtgacacgattcctaaaagtccatttgtggtccaagttggagaggcttgcaaccctaacgcctgccgcgctagcgggcgtggcctgcagcctaaaggcgtaagaatcagggaaaccactgactttaaggtagatacgaaggccgcaggatccggagagctaggcgtcactatgaagggacctaagggccttgaagaacttgtcaaacagaaggattttctagacggagtgtatgcttttgagtattatccgagtacacccggacgctactccattgccatcacctggggcggacatcatatccccaaaagccccttcgaagtacaagttggtcctgaagccggaatgcagaaggttcgggcttggggacctgggctgcatggcggtattgtcgggcgaagtgctgatttcgtcgtggagagtatcggatccgaagtcgggtccttaggcttcgccatcgagggtccgtcccaggccaaaatcgaatacaatgatcaaaatgacggcagctgcgatgtcaagtattggcccaaagagcctggggagtacgctgtgcacatcatgtgcgatgacgaagatatcaaggactccccatacatggccttcatccatcctgccactgggggttacaatccagacttggtgcgcgcttacggccctggattagagaaaagcggttgcattgtgaacaatctggccgaatttaccgtggatccaaaggacgctggcaaagctccgctcaagatttttgcgcaggacggggagggccagcggatagacatacagatgaaaaaccgaatggacggaacgtatgcctgttcgtacacacccgttaaggcaattaagcacaccatcgctgtggtctggggtggcgtgaatatcccgcattctccctacagggttaacatcgggcaggggtcccacccacagaaggtcaaggtatttggaccaggcgtcgagaggagcggacttaaagcaaatgaacctacacactttaccgtggattgcacggaggccggtgagggtgatgtctctgttggcattaaatgtgatgcaagagtactgtcagaagacgaggaagatgtggatttcgatatcattcataatgctaatgataccttcaccgttaaatatgtgcccccagctgctggaagatatacaatcaaggttctctttgcatctcaggaaattcccgcttcgcccttccgggttaaggtggacccatcccacgacgcatcaaaagtgaaagcagaggggcctggtctgagtaaagccggtgtggaaaatggcaaacccacacactttactgtgtatacaaagggagctgggaaggctcctctgaatgtccagttcaattctcccctacctggcgacgcagtcaaagatctcgacataatagataactatgattactctcacaccgtgaagtatacacccacccagcaggggaacatgcaggtcttagtaacctacgggggagacccaattccgaaaagcccattcaccgtgggggttgctgcaccactggacctgtctaagattaaactaaatggcctcgagaatagagtcgaggttgggaaggaccaggagttcacagtggacacccgcggagctggcggacagggtaaactggacgtcaccatcttgtctccatccagaaaagtcgtaccctgcctggttactcccgtgactggcagggagaacagtaccgccaagttcattcctcgggaagaaggactgtacgcagtggatgtgacttatgatggtcacccagtgccgggatccccttatacagtcgaggcaagcctgccaccagacccttctaaagtgaaggcacacggcccaggactggagggagggttagttggcaagcccgctgagtttactatcgacacgaagggggcagggacgggcggtctaggattgacggttgaggggccatgcgaagccaagatcgaatgttccgataatggagatggcacgtgtagtgtttcttacctcccaacgaagcccggagaatactttgtcaatatcctgttcgaggaggtgcatataccagggtccccctttaaagccgatatcgagatgccctttgatcccagcaaggtggttgcatcgggcccaggtctcgaacatggcaaggtcggggaggccggactgctgtcagtcgattgtagtgaagccggaccaggcgctctcggcttagaggctgtgtctgatagcggtacaaaggcagaggttagtattcagaacaacaaggatgggacctacgcagtcacctacgttcccctgactgctggcatgtacacactgacgatgaagtacggcggtgaactcgtcccacattttccggctcgcgttaaggtggaaccagccgtcgataccagtaggattaaagttttcggccctggcatcgagggaaaggacgtattccgggaagcaactaccgacttcaccgtggattccaggccactgacgcaggtcggtggggatcatatcaaggctcacatcgctaacccatctggtgctagtacagagtgcttcgtcacagacaacgccgacggaacatatcaggtcgaatataccccattcgaaaaaggccttcatgtggtggaggtcacttacgatgacgtgcccatccctaattccccctttaaagtggcagtcacagaagggtgtcagccatccagggtgcaggcccagggacctggtctcaaagaggcctttaccaataagcccaatgtgtttaccgtagttacccggggagccggaattgggggactgggtatcacagtggaaggcccaagcgaatcaaagattaattgccgcgacaacaaagacgggtcatgttccgccgagtacataccttttgccccaggggattatgatgttaatatcacctatggcggagcccatatccccggttccccttttcgggtacccgttaaggacgtggtggatccttctaaagtgaagatcgctggacccggattaggtagcggcgtccgggcaagagtactccagtcattcacagtcgacagtagcaaggccggactggcccctctggaagtccgcgtgctgggaccccgtggactggttgagcccgttaatgtggtggataatggcgacgggacacacaccgttacatatacgccatcacaggagggaccctatatggtttctgtgaaatacgccgacgaagaaataccaagatcccccttcaaggttaaggtcctccccacgtatgacgcatctaaggtcactgccagcggacctggcttgtcttcatatggagtcccagcctccctgccagtggacttcgcgattgacgcccgagacgctggggagggactcctggccgtgcagatcaccgatcaggagggcaagccaaaaagggcaatagttcatgataataaagatggaacgtacgctgttacatacatcccggataaaaccggcaggtatatgatcggagttacttacggcggagatgatataccactatccccctatagaattcgggctactcagactggcgacgcctctaaatgcctggctaccggaccagggattgcctcaacagtgaagacaggagaagaagtggggtttgtagtggacgctaaaactgccggaaaagggaaagtgacgtgcaccgtactaactcctgacggcacagaggccgaagccgatgtgattgaaaacgaagatggcacatatgatatcttttatacagccgctaaaccaggaacatacgtgatatatgtgcgatttgggggagtggacattccaaatagtcctttcactgtgatggcaacagatggggaggtgacggccgtcgaagaggcacccgtgactgaggaagcctacgtccccgtgagtgatatgaatggcttgggcttcaagccctttgaccttgtcatcccatttgccgtacggaagggggaaatcacgggcgaggtgcatatgccatctggtaagacagcaacacctgaaatcgtcgacaacaaagatggtacagtaacagttcgatacgcccctaccgaggttggtcttcacgaaatgcacataaagtatatgggctcacacatccccgagtctccactgcagttttacgttaattacccaaactctgggagcgtatccgcgtatggacccggactggtgtacggggtggccaataaaacagccacgtttactatagtcactgaggatgccggtgaagggggacttgacctggccatcgaaggacctagcaaagccgaaattagttgcatcgataacaaggatggtacttgcaccgtgacttacctccccacgttgcctggagactactctattttggtgaaatacaatgacaagcacatccccggatctccatttaccgccaagatcactgatgatagcagacgttgttctcaggttaagctgggaagcgccgcagattttctgttggacattagtgaaactgatctgtctagtctcacggcctcaattaaagcccctagtggcagggatgagccttgtctgttaaaaagactccccaacaatcacattggcatatcatttattcccagagaggtgggcgagcatctcgtttccatcaaaaaaaatggaaatcacgttgccaacagccccgtctccataatggtcgtccaaagcgaaataggagacgcacgcagggccaaggtatacgggcgtggattatctgaggggagaacctttgaaatgtcggacttcatcgtagatactcgcgatgccggttacggaggaattagcctggcggtcgaagggccatccaaggtggacatccagacagaagatctcgaagatggtacgtgtaaggtaagctattttcctacggtgccaggtgtttacattgtgagcactaagttcgccgacgagcacgttcctgggtcaccatttacagtcaaaattagcggagaaggcagagtgaaagaatccatcacgaggacaagccgagctccgtcggtggccactgtgggctctatttgtgacctcaatctcaagatccccgagattaactcaagtgacatgtcagctcacgtgacaagccccagtggtcgcgttacagaagcagagattgttcctatggggaaaaactcccattgcgtgcggtttgtgcctcaggaaatgggggtccatacagtgagtgtcaagtatcgaggacagcatgtcacgggcagcccctttcagttcacagtggggcctctgggggaaggcggtgcccacaaagtcagggccggaggaccgggtcttgagaggggagaggccggagtcccagctgagttttccatctggacgcgcgaggccggtgcaggaggattgagcatcgcagtagaaggtccaagcaaagcagagatcacgttcgacgaccacaaaaatggatcatgcggagtctcatacatcgcgcaggagcccggaaactacgaagtgtccataaaattcaacgacgaacacatccccgagtcaccttacctcgtccccgtgatcgctccctcagacgatgctaggcgactgaccgtgatgtccctgcaggaaagcggactgaaagtgaaccagccagcctcttttgcaattcgcctgaacggggcaaaaggtaaaatagacgcgaaggtccattcaccaagcggcgctgtggaggagtgtcacgtatcagaactcgagcctgacaaatatgctgtccgtttcatcccccatgagaacggagtgcacaccatcgatgtcaagttcaatggcagccacgtagtgggttcacccttcaaagtaagagtgggggagcccggtcaggccggaaaccctgcattggtgtctgcttacggaacgggcctagaagggggaacaactggaatacaaagcgaatttttcataaacaccaccagggctggacccggtacactaagtgtcacgatcgaaggaccatcgaaagtcaagatggattgccaggaaacacctgaaggctataaggtgatgtatacccccatggcccctgggaattacctcatctctgtcaaatacggcggacctaatcacatcgttggaagcccctttaaggcgaaggttacaggccagaggttggtctcgcccggtagcgccaatgagacatccagcattctcgtggagagtgttacacggtccagtaccgaaacttgctattctgccatacctaaagcctccagtgatgcaagcaaggtgacaagcaagggtgctggattgtccaaagcgtttgtaggacaaaagtcttcctttttagtggactgtagcaaggccggtagcaatatgttgttgataggcgtgcacggacctacgaccccttgcgaggaggtgagcatgaagcacgtcgggaaccagcagtacaatgttacatacgtcgtcaaagagcgaggggactacgttcttgccgtaaagtggggagaggagcatatccccggaagtccatttcatgtcaccgttcctta

SEQ ID NO: 62696 - DNA, 7775 bp, Artificial Sequence
  derived and/or modified sequence
atgcctgtaacagagaaagacttggcggaggacgccccttggaagaaaatccaacaaaatacattcaccagatggtgtaatgaacatttaaagtgcgtgaacaaaagaatcggaaacttgcagacggacctgtctgacggcttgcggctcatcgcactcctggaggtgctcagccagaagaggatgtacagaaagtaccatcagcgtcctacatttcggcagatgcagctcgaaaatgtgtctgtagcgctggagtttctcgacagggaatccataaaactggtgtccatcgatagcaaggcaatagtggatggcaacctgaagctgattctggggttagtttggacgttgatacttcactattccatcagcatgcctgtatgggaggatgaaggtgatgatgacgcaaagaagcagacgcctaagcagcggctgctcggatggatacagaataagattccctatctgcctataacaaacttcaaccaaaactggcaagatggcaaagcccttggtgcactggttgattcatgcgcacccggtctctgccctgattgggagtcttgggaccctcagaagcccgtggataacgccagagaggcaatgcagcaagcagacgattggctcggcgtgcctcaggttatcacacctgaagagatcatacacccagatgtggacgagcattctgtgatgacttatttaagccagtttccaaaagccaaactgaagcccggagcgccactgaagcccaaactgaatccgaaaaaagcaagagcctacggcagaggcatagagcccaccggcaatatggtgaagcaacccgcaaaatttactgtggatacaatcagcgcaggtcaaggcgacgtcatggttttcgtcgaagaccctgagggcaacaaggaagaagcgcaggtcacccctgactctgataagaacaagacttactcggtagagtatttgcctaaagtgacagggctgcacaaggtcaccgtgctctttgccggacagcacatttcaaaatcaccattcgaggtatcagtcgataaggctcagggtgacgcctccaaggtcaccgccaagggacccggtctggaggcagtggggaacattgccaacaaacctacgtatttcgacatatatacagcgggagccggtgtgggggatataggggtggaggtggaggacccacaggggaaaaataccgtcgaactgctggtggaagataaggggaatcaagtgtatcgctgcgtttacaagcctatgcagccagggccacacgtagttaagattttctttgcgggagatactataccaaagtctccattcgtggtccaggtcggtgaggcctgtaatccaaacgcatgccgtgcctctggccgtggactgcagcctaagggggtgcggatccgcgaaactactgatttcaaagtagacacaaaagcagctggatctggcgaattgggggtgaccatgaaggggccaaagggcctcgaagagttggtgaaacagaaggacttcctggatggagtgtatgcgtttgagtattacccaagcactccgggtagatactctattgccattacttggggcggacaccacatccccaagtctccctttgaggtccaagtcggccctgaggccggtatgcagaaagtgcgagcttggggcccaggtttgcacggtgggatagttggtcggtcagcggactttgttgtggaatcgattggctccgaggtgggtagcctgggattcgctatcgaaggtccatcccaggccaagatcgagtacaatgaccaaaatgacggatcctgcgatgtaaagtactggccaaaggaacccggtgagtatgctgtccacatcatgtgcgacgatgaggacattaaagattccccttacatggcttttatacatcctgctacaggcggatataaccccgacctggtccgcgcttacggaccaggcctggaaaaatctggatgtatcgtgaataacttggccgagttcactgtagacccgaaggatgcaggcaaagctccattgaagatcttcgcccaggacggcgaaggtcaacggatcgacattcagatgaagaatcggatggacggtacgtacgcttgtagttataccccggtgaaggccatcaaacacactattgctgtggtctggggaggtgtcaacatcccgcatagcccttatagagtaaacatcggccagggctctcatccacagaaagtgaaggtgtttggtccaggtgtagaaaggagtggactcaaggccaatgagcctacacacttcaccgttgattgcacagaggctggagagggagacgtcagcgttggaattaagtgcgacgcacgggtgttgagcgaggacgaggaagatgtggactttgacattatccataacgcaaatgacacctttaccgtcaagtacgtcccccctgcagccggaagatatactataaaggtgttatttgcatcccaggaaatcccagcctcacctttccgggtgaaggtcgacccatcccatgacgctagcaaggttaaggctgaaggccctggcttgagcaaagctggagtcgagaatgggaaacctacccactttacagtctataccaagggagccggtaaagccccactcaacgtgcagtttaacagcccgctgccaggcgatgcagtaaaggacttagacataatagacaattatgactactctcacaccgtgaaatatacacccacacagcagggcaacatgcaggttttagttacatacgggggagatcctatacctaagtcacccttcaccgtcggggtcgccgcaccgcttgatttgagcaaaatcaaactgaatggcctggaaaatagggtggaagtcgggaaggaccaggaatttactgtcgataccagaggggcaggcggtcaggggaaacttgatgtgaccattctgtcaccaagcagaaaagtcgtgccatgtttagtaacacctgtgactgggagagaaaatagcacagccaagttcattcccagggaggagggcctctacgccgtggacgtgacatatgacggccacccggtgccgggtagcccttatacagttgaggcctcgctgcccccagacccaagtaaggttaaggcccacggtcccggactggaaggaggcctcgtcggtaagcccgcagagttcactattgataccaagggcgcaggtacaggcggtcttgggctcacggtagaaggcccttgcgaagccaagatcgaatgttctgataatggtgacggcacatgttccgtgagctatctgcccaccaaacccggtgagtattttgtgaacatcctatttgaggaagtgcacatacccggaagcccgttcaaggccgatattgagatgccctttgatccttcaaaggtagtggcctctggacccggtctggagcacggaaaagtgggagaagcgggattgctgagtgtagattgtagtgaggccggacccggtgctctcgggctcgaggctgtgtctgattcaggaacaaaagcggaggtgtcgatacagaataataaggatggaacatacgccgttacctacgtaccccttacggcaggcatgtacactttgacgatgaaatatgggggtgaacttgtgcctcacttcccggcacgagttaaggtggagccagccgttgacacatcacggatcaaggtctttggtcctggaatcgagggaaaagacgtgtttagagaagccacaacagactttacagtggacagccggcctctgactcaggtcgggggtgaccatatcaaggcccacattgccaacccttccggggcttcaacagaatgctttgtaacggacaatgccgacggaacttatcaagtagagtataccccgttcgagaaggggttgcacgtggttgaagtcacttatgatgacgtaccaatacccaattcgccctttaaggtcgccgtgaccgaagggtgtcaaccctccagagtacaagcacagggtcctgggctgaaggaggcattcactaacaagcctaacgtgttcactgtcgtgacaagaggcgcaggaataggaggcttagggatcacagtggagggaccttccgagagcaaaataaattgtcgggataataaggatggcagttgctcagcagagtacatcccgtttgcccctggcgattacgatgttaacataacttacggtggcgctcacataccgggaagtccatttcgggtgcctgtgaaggacgtagtggatccgtccaaagttaagatagcgggacctggcctcggttccggggttcgggctcgggtccttcagtcttttaccgtggatagcagcaaggcaggactagcccctcttgaggtgcgcgtgctagggcctcgaggtttagtcgagccagtgaatgtcgtggataatggggatggcacacatacggtgacttatacaccaagccaggaaggaccctatatggtttcagtaaagtacgccgatgaagagataccacgatcccccttcaaagttaaagtgttgccaacatatgacgccagcaaagtcacagcctcaggaccaggactgagttcctacggcgtgcccgcatcactcccagtggactttgctatagacgccagagatgcaggcgaggggctgctggccgttcagattactgatcaagagggcaaacccaaacgcgcaatcgtacacgacaacaaggacggaacctatgccgtgacctacatccctgacaaaaccggacgttacatgattggcgtaacatacggcggagatgacattcccctgtctccctacagaatccgtgctactcagaccggggacgcctccaagtgtcttgcaacaggacctggaattgccagtaccgtcaaaaccggtgaggaagtgggcttcgtggtagacgccaagactgcaggcaagggtaaggtcacctgtactgtccttacacccgacggaaccgaggcagaggccgacgtcattgagaatgaggatggtacctatgacattttctacactgccgctaagcccggtacttatgtgatttacgtgcggttcggtggagtggacatccctaatagcccttttaccgtgatggcgacagatggggaagtcacagctgtagaagaggcccctgtgaccgaagaagcatacgtgcccgtgagcgatatgaatgggctagggtttaaacctttcgacctggttattccttttgcagtgaggaagggtgaaatcaccggggaagttcatatgccgtcaggcaagacagcaacccctgaaatcgtcgacaacaaggacgggaccgtcactgtccgctatgcacctacagaagtaggcctccacgagatgcacattaagtatatgggcagccatattcccgagtcacccctgcagttctatgtcaactatcccaactcaggctccgtgagcgcctacggtcctggactggtctacggcgttgctaacaagactgcaacattcacaatcgtgactgaggacgcaggtgagggcggtttggatctcgccatcgaagggccttcaaaggccgagatctcttgtattgataataaggacggaacgtgtacagtaacctatctacccacactgcctggtgactatagcatcttagtgaagtacaatgacaagcatatcccaggatccccctttactgcgaagatcacagatgatagccgtcgctgctcccaggtgaagttgggtagtgccgctgattttcttttggatatatcagaaactgacctgtcttcgctgacagcctctattaaagctccatccggacgcgatgaaccatgtttactaaaacgtctcccaaacaaccatattggaatctcatttatacccagagaggtaggtgagcacctggtgtctatcaaaaagaatggaaaccatgtggccaactccccagtgagtatcatggtcgtgcaatcggagatcggcgacgccagaagggctaaagtctacggtaggggcctatctgagggtcggacatttgaaatgagtgatttcattgtggacacgcgagatgcgggatacggaggaatttcactagcggtagaggggccttctaaagtggatatacagactgaggacctggaggatggtacatgtaaggtgtcctattttcccacggtccccggtgtgtatatagtgagtaccaagttcgcagacgagcatgttccgggatccccgtttacagtcaaaatctctggggaaggacgtgttaaggaaagcataactcgcaccagtcgtgcccctagtgtggcgaccgtcggctccatttgtgatctgaacttgaagataccagaaataaattcaagtgacatgagtgctcacgtcactagcccatccgggagagtgacagaggctgagattgtgccaatggggaagaactcccactgcgtccggtttgtcccccaagaaatgggcgtgcacacggtgagcgtcaaataccggggtcagcatgtgaccgggagtccattccagttcactgttggaccactgggtgaaggtggcgcacacaaagtcagggccggtggtcctggtcttgaacgcggagaagccggagtgccagccgagttctccatctggaccagagaggccggagcagggggactgtccatcgctgttgaaggcccatccaaagccgagataactttcgacgatcacaaaaacggaagctgcggggtgagctacattgctcaggaacctggcaattatgaagtttctataaagtttaacgatgagcacattccagagtcaccctacctggtgcccgtaatagccccatccgacgacgcacgaaggctcactgtgatgagcctccaggagagcgggctcaaagttaaccagccggcttcattcgctattcgcctaaacggcgcaaaaggtaaaatagacgccaaagtacattcacccagcggagccgtcgaggagtgccatgtcagtgaactggagcccgacaaatacgccgtgagatttataccccatgagaatggagttcataccatagacgtcaagtttaacggctcacatgttgtggggtcaccgttcaaagttagggtgggggagcccggacaggctgggaatcccgctttagttagtgcctacggaacaggtttagaggggggtactacaggtattcagagtgagttttttattaatacaacacgcgctggaccgggaaccctgagcgttactattgagggtccttcaaaagtgaaaatggattgccaagagaccccagaagggtacaaggtgatgtacactcccatggccccaggaaactatctcatatctgttaaatacggcggtcccaatcatattgtggggtcgcctttcaaggcgaaggttacagggcagcgtttggtgtcaccagggtcggctaatgaaacgtctagcatcttagtggagtccgtgactagatcaagcaccgagacatgctatagcgctataccaaaagcttcatccgacgcttcaaaggtgacaagtaaaggagccggactaagcaaggccttcgtgggccagaaatccagcttcctggtggattgctccaaggcgggatcaaatatgctgttaattggcgtacacggtccaacaaccccctgcgaagaggtgtccatgaaacatgtaggcaaccaacagtacaatgtgacatacgtggtcaaagagcgtggagactacgttctcgcagtgaagtggggggaagaacatattcccggtagtccgtttcacgtgacagtacccta

SEQ ID NO: 62697 - DNA, 7269 bp, Artificial Sequence
  derived and/or modified sequence
atgcaggagcacagcaccagaagaagaagcctgagcctgtgccccgactgggagagctgggacccccagaagcccgtggacaacgccagagaggccatgcagcaggccgacgactggctgggcgtgccccaggtgatcacccccgaggagatcatccaccccgacgtggacgagcacagcgtgatgacctacctgagccagttccccaaggccaagctgaagcccggcgcccccctgaagcccaagctgaaccccaagaaggccagagcctacggcagaggcatcgagcccaccggcaacatggtgaagcagcccgccaagttcaccgtggacaccatcagcgccggccagggcgacgtgatggtgttcgtggaggaccccgagggcaacaaggaggaggcccaggtgacccccgacagcgacaagaacaagacctacagcgtggagtacctgcccaaggtgaccggcctgcacaaggtgaccgtgctgttcgccggccagcacatcagcaagagccccttcgaggtgagcgtggacaaggcccagggcgacgccagcaaggtgaccgccaagggccccggcctggaggccgtgggcaacatcgccaacaagcccacctacttcgacatctacaccgccggcgccggcgtgggcgacatcggcgtggaggtggaggacccccagggcaagaacaccgtggagctgctggtggaggacaagggcaaccaggtgtacagatgcgtgtacaagcccatgcagcccggcccccacgtggtgaagatcttcttcgccggcgacaccatccccaagagccccttcgtggtgcaggtgggcgaggcctgcaaccccaacgcctgcagagccagcggcagaggcctgcagcccaagggcgtgagaatcagagagaccaccgacttcaaggtggacaccaaggccgccggcagcggcgagctgggcgtgaccatgaagggccccaagggcctggaggagctggtgaagcagaaggacttcctggacggcgtgtacgccttcgagtactaccccagcacccccggcagatacagcatcgccatcacctggggcggccaccacatccccaagagccccttcgaggtgcaggtgggccccgaggccggcatgcagaaggtgagagcctggggccccggcctgcacggcggcatcgtgggcagaagcgccgacttcgtggtggagagcatcggcagcgaggtgggcagcctgggcttcgccatcgagggccccagccaggccaagatcgagtacaacgaccagaacgacggcagctgcgacgtgaagtactggcccaaggagcccggcgagtacgccgtgcacatcatgtgcgacgacgaggacatcaaggacagcccctacatggccttcatccaccccgccaccggcggctacaaccccgacctggtgagagcctacggccccggcctggagaagagcggctgcatcgtgaacaacctggccgagttcaccgtggaccccaaggacgccggcaaggcccccctgaagatcttcgcccaggacggcgagggccagagaatcgacatccagatgaagaacagaatggacggcacctacgcctgcagctacacccccgtgaaggccatcaagcacaccatcgccgtggtgtggggcggcgtgaacatcccccacagcccctacagagtgaacatcggccagggcagccacccccagaaggtgaaggtgttcggccccggcgtggagagaagcggcctgaaggccaacgagcccacccacttcaccgtggactgcaccgaggccggcgagggcgacgtgagcgtgggcatcaagtgcgacgccagagtgctgagcgaggacgaggaggacgtggacttcgacatcatccacaacgccaacgacaccttcaccgtgaagtacgtgccccccgccgccggcagatacaccatcaaggtgctgttcgccagccaggagatccccgccagccccttcagagtgaaggtggaccccagccacgacgccagcaaggtgaaggccgagggccccggcctgagcaaggccggcgtggagaacggcaagcccacccacttcaccgtgtacaccaagggcgccggcaaggcccccctgaacgtgcagttcaacagccccctgcccggcgacgccgtgaaggacctggacatcatcgacaactacgactacagccacaccgtgaagtacacccccacccagcagggcaacatgcaggtgctggtgacctacggcggcgaccccatccccaagagccccttcaccgtgggcgtggccgcccccctggacctgagcaagatcaagctgaacggcctggagaacagagtggaggtgggcaaggaccaggagttcaccgtggacaccagaggcgccggcggccagggcaagctggacgtgaccatcctgagccccagcagaaaggtggtgccctgcctggtgacccccgtgaccggcagagagaacagcaccgccaagttcatccccagagaggagggcctgtacgccgtggacgtgacctacgacggccaccccgtgcccggcagcccctacaccgtggaggccagcctgccccccgaccccagcaaggtgaaggcccacggccccggcctggagggcggcctggtgggcaagcccgccgagttcaccatcgacaccaagggcgccggcaccggcggcctgggcctgaccgtggagggcccctgcgaggccaagatcgagtgcagcgacaacggcgacggcacctgcagcgtgagctacctgcccaccaagcccggcgagtacttcgtgaacatcctgttcgaggaggtgcacatccccggcagccccttcaaggccgacatcgagatgcccttcgaccccagcaaggtggtggccagcggccccggcctggagcacggcaaggtgggcgaggccggcctgctgagcgtggactgcagcgaggccggccccggcgccctgggcctggaggccgtgagcgacagcggcaccaaggccgaggtgagcatccagaacaacaaggacggcacctacgccgtgacctacgtgcccctgaccgccggcatgtacaccctgaccatgaagtacggcggcgagctggtgccccacttccccgccagagtgaaggtggagcccgccgtggacaccagcagaatcaaggtgttcggccccggcatcgagggcaaggacgtgttcagagaggccaccaccgacttcaccgtggacagcagacccctgacccaggtgggcggcgaccacatcaaggcccacatcgccaaccccagcggcgccagcaccgagtgcttcgtgaccgacaacgccgacggcacctaccaggtggagtacacccccttcgagaagggcctgcacgtggtggaggtgacctacgacgacgtgcccatccccaacagccccttcaaggtggccgtgaccgagggctgccagcccagcagagtgcaggcccagggccccggcctgaaggaggccttcaccaacaagcccaacgtgttcaccgtggtgaccagaggcgccggcatcggcggcctgggcatcaccgtggagggccccagcgagagcaagatcaactgcagagacaacaaggacggcagctgcagcgccgagtacatccccttcgcccccggcgactacgacgtgaacatcacctacggcggcgcccacatccccggcagccccttcagagtgcccgtgaaggacgtggtggaccccagcaaggtgaagatcgccggccccggcctgggcagcggcgtgagagccagagtgctgcagagcttcaccgtggacagcagcaaggccggcctggcccccctggaggtgagagtgctgggccccagaggcctggtggagcccgtgaacgtggtggacaacggcgacggcacccacaccgtgacctacacccccagccaggagggcccctacatggtgagcgtgaagtacgccgacgaggagatccccagaagccccttcaaggtgaaggtgctgcccacctacgacgccagcaaggtgaccgccagcggccccggcctgagcagctacggcgtgcccgccagcctgcccgtggacttcgccatcgacgccagagacgccggcgagggcctgctggccgtgcagatcaccgaccaggagggcaagcccaagagagccatcgtgcacgacaacaaggacggcacctacgccgtgacctacatccccgacaagaccggcagatacatgatcggcgtgacctacggcggcgacgacatccccctgagcccctacagaatcagagccacccagaccggcgacgccagcaagtgcctggccaccggccccggcatcgccagcaccgtgaagaccggcgaggaggtgggcttcgtggtggacgccaagaccgccggcaagggcaaggtgacctgcaccgtgctgacccccgacggcaccgaggccgaggccgacgtgatcgagaacgaggacggcacctacgacatcttctacaccgccgccaagcccggcacctacgtgatctacgtgagattcggcggcgtggacatccccaacagccccttcaccgtgatggccaccgacggcgaggtgaccgccgtggaggaggcccccgtgaccgaggaggcctacgtgcccgtgagcgacatgaacggcctgggcttcaagcccttcgacctggtgatccccttcgccgtgagaaagggcgagatcaccggcgaggtgcacatgcccagcggcaagaccgccacccccgagatcgtggacaacaaggacggcaccgtgaccgtgagatacgcccccaccgaggtgggcctgcacgagatgcacatcaagtacatgggcagccacatccccgagagccccctgcagttctacgtgaactaccccaacagcggcagcgtgagcgcctacggccccggcctggtgtacggcgtggccaacaagaccgccaccttcaccatcgtgaccgaggacgccggcgagggcggcctggacctggccatcgagggccccagcaaggccgagatcagctgcatcgacaacaaggacggcacctgcaccgtgacctacctgcccaccctgcccggcgactacagcatcctggtgaagtacaacgacaagcacatccccggcagccccttcaccgccaagatcaccgacgacagcagaagatgcagccaggtgaagctgggcagcgccgccgacttcctgctggacatcagcgagaccgacctgagcagcctgaccgccagcatcaaggcccccagcggcagagacgagccctgcctgctgaagagactgcccaacaaccacatcggcatcagcttcatccccagagaggtgggcgagcacctggtgagcatcaagaagaacggcaaccacgtggccaacagccccgtgagcatcatggtggtgcagagcgagatcggcgacgccagaagagccaaggtgtacggcagaggcctgagcgagggcagaaccttcgagatgagcgacttcatcgtggacaccagagacgccggctacggcggcatcagcctggccgtggagggccccagcaaggtggacatccagaccgaggacctggaggacggcacctgcaaggtgagctacttccccaccgtgcccggcgtgtacatcgtgagcaccaagttcgccgacgagcacgtgcccggcagccccttcaccgtgaagatcagcggcgagggcagagtgaaggagagcatcaccagaaccagcagagcccccagcgtggccaccgtgggcagcatctgcgacctgaacctgaagatccccgagatcaacagcagcgacatgagcgcccacgtgaccagccccagcggcagagtgaccgaggccgagatcgtgcccatgggcaagaacagccactgcgtgagattcgtgccccaggagatgggcgtgcacaccgtgagcgtgaagtacagaggccagcacgtgaccggcagccccttccagttcaccgtgggccccctgggcgagggcggcgcccacaaggtgagagccggcggccccggcctggagagaggcgaggccggcgtgcccgccgagttcagcatctggaccagagaggccggcgccggcggcctgagcatcgccgtggagggccccagcaaggccgagatcaccttcgacgaccacaagaacggcagctgcggcgtgagctacatcgcccaggagcccggcaactacgaggtgagcatcaagttcaacgacgagcacatccccgagagcccctacctggtgcccgtgatcgcccccagcgacgacgccagaagactgaccgtgatgagcctgcaggagagcggcctgaaggtgaaccagcccgccagcttcgccatcagactgaacggcgccaagggcaagatcgacgccaaggtgcacagccccagcggcgccgtggaggagtgccacgtgagcgagctggagcccgacaagtacgccgtgagattcatcccccacgagaacggcgtgcacaccatcgacgtgaagttcaacggcagccacgtggtgggcagccccttcaaggtgagagtgggcgagcccggccaggccggcaaccccgccctggtgagcgcctacggcaccggcctggagggcggcaccaccggcatccagagcgagttcttcatcaacaccaccagagccggccccggcaccctgagcgtgaccatcgagggccccagcaaggtgaagatggactgccaggagacccccgagggctacaaggtgatgtacacccccatggcccccggcaactacctgatcagcgtgaagtacggcggccccaaccacatcgtgggcagccccttcaaggccaaggtgaccggccagagactggtgagccccggcagcgccaacgagaccagcagcatcctggtggagagcgtgaccagaagcagcaccgagacctgctacagcgccatccccaaggccagcagcgacgccagcaaggtgaccagcaagggcgccggcctgagcaaggccttcgtgggccagaagagcagcttcctggtggactgcagcaaggccggcagcaacatgctgctgatcggcgtgcacggccccaccaccccctgcgaggaggtgagcatgaagcacgtgggcaaccagcagtacaacgtgacctacgtggtgaaggagagaggcgactacgtgctggccgtgaagtggggcgaggagcacatccccggcagccccttccacgtgaccgtgccctag

SEQ ID NO: 62698 - DNA, 7776 bp, Artificial Sequence
  derived and/or modified sequence
atgcccgtgaccgagaaggacctggccgaggacgccccctggaagaagatccagcagaacaccttcaccagatggtgcaacgagcacctgaagtgcgtgaacaagagaatcggcaacctgcagaccgacctgagcgacggcctgagactgatcgccctgctggaggtgctgagccagaagagaatgtacagaaagtaccaccagagacccaccttcagacagatgcagctggagaacgtgagcgtggccctggagttcctggacagagagagcatcaagctggtgagcatcgacagcaaggccatcgtggacggcaacctgaagctgatcctgggcctggtgtggaccctgatcctgcactacagcatcagcatgcccgtgtgggaggacgagggcgacgacgacgccaagaagcagacccccaagcagagactgctgggctggatccagaacaagatcccctacctgcccatcaccaacttcaaccagaactggcaggacggcaaggccctgggcgccctggtggacagctgcgcccccggcctgtgccccgactgggagagctgggacccccagaagcccgtggacaacgccagagaggccatgcagcaggccgacgactggctgggcgtgccccaggtgatcacccccgaggagatcatccaccccgacgtggacgagcacagcgtgatgacctacctgagccagttccccaaggccaagctgaagcccggcgcccccctgaagcccaagctgaaccccaagaaggccagagcctacggcagaggcatcgagcccaccggcaacatggtgaagcagcccgccaagttcaccgtggacaccatcagcgccggccagggcgacgtgatggtgttcgtggaggaccccgagggcaacaaggaggaggcccaggtgacccccgacagcgacaagaacaagacctacagcgtggagtacctgcccaaggtgaccggcctgcacaaggtgaccgtgctgttcgccggccagcacatcagcaagagccccttcgaggtgagcgtggacaaggcccagggcgacgccagcaaggtgaccgccaagggccccggcctggaggccgtgggcaacatcgccaacaagcccacctacttcgacatctacaccgccggcgccggcgtgggcgacatcggcgtggaggtggaggacccccagggcaagaacaccgtggagctgctggtggaggacaagggcaaccaggtgtacagatgcgtgtacaagcccatgcagcccggcccccacgtggtgaagatcttcttcgccggcgacaccatccccaagagccccttcgtggtgcaggtgggcgaggcctgcaaccccaacgcctgcagagccagcggcagaggcctgcagcccaagggcgtgagaatcagagagaccaccgacttcaaggtggacaccaaggccgccggcagcggcgagctgggcgtgaccatgaagggccccaagggcctggaggagctggtgaagcagaaggacttcctggacggcgtgtacgccttcgagtactaccccagcacccccggcagatacagcatcgccatcacctggggcggccaccacatccccaagagccccttcgaggtgcaggtgggccccgaggccggcatgcagaaggtgagagcctggggccccggcctgcacggcggcatcgtgggcagaagcgccgacttcgtggtggagagcatcggcagcgaggtgggcagcctgggcttcgccatcgagggccccagccaggccaagatcgagtacaacgaccagaacgacggcagctgcgacgtgaagtactggcccaaggagcccggcgagtacgccgtgcacatcatgtgcgacgacgaggacatcaaggacagcccctacatggccttcatccaccccgccaccggcggctacaaccccgacctggtgagagcctacggccccggcctggagaagagcggctgcatcgtgaacaacctggccgagttcaccgtggaccccaaggacgccggcaaggcccccctgaagatcttcgcccaggacggcgagggccagagaatcgacatccagatgaagaacagaatggacggcacctacgcctgcagctacacccccgtgaaggccatcaagcacaccatcgccgtggtgtggggcggcgtgaacatcccccacagcccctacagagtgaacatcggccagggcagccacccccagaaggtgaaggtgttcggccccggcgtggagagaagcggcctgaaggccaacgagcccacccacttcaccgtggactgcaccgaggccggcgagggcgacgtgagcgtgggcatcaagtgcgacgccagagtgctgagcgaggacgaggaggacgtggacttcgacatcatccacaacgccaacgacaccttcaccgtgaagtacgtgccccccgccgccggcagatacaccatcaaggtgctgttcgccagccaggagatccccgccagccccttcagagtgaaggtggaccccagccacgacgccagcaaggtgaaggccgagggccccggcctgagcaaggccggcgtggagaacggcaagcccacccacttcaccgtgtacaccaagggcgccggcaaggcccccctgaacgtgcagttcaacagccccctgcccggcgacgccgtgaaggacctggacatcatcgacaactacgactacagccacaccgtgaagtacacccccacccagcagggcaacatgcaggtgctggtgacctacggcggcgaccccatccccaagagccccttcaccgtgggcgtggccgcccccctggacctgagcaagatcaagctgaacggcctggagaacagagtggaggtgggcaaggaccaggagttcaccgtggacaccagaggcgccggcggccagggcaagctggacgtgaccatcctgagccccagcagaaaggtggtgccctgcctggtgacccccgtgaccggcagagagaacagcaccgccaagttcatccccagagaggagggcctgtacgccgtggacgtgacctacgacggccaccccgtgcccggcagcccctacaccgtggaggccagcctgccccccgaccccagcaaggtgaaggcccacggccccggcctggagggcggcctggtgggcaagcccgccgagttcaccatcgacaccaagggcgccggcaccggcggcctgggcctgaccgtggagggcccctgcgaggccaagatcgagtgcagcgacaacggcgacggcacctgcagcgtgagctacctgcccaccaagcccggcgagtacttcgtgaacatcctgttcgaggaggtgcacatccccggcagccccttcaaggccgacatcgagatgcccttcgaccccagcaaggtggtggccagcggccccggcctggagcacggcaaggtgggcgaggccggcctgctgagcgtggactgcagcgaggccggccccggcgccctgggcctggaggccgtgagcgacagcggcaccaaggccgaggtgagcatccagaacaacaaggacggcacctacgccgtgacctacgtgcccctgaccgccggcatgtacaccctgaccatgaagtacggcggcgagctggtgccccacttccccgccagagtgaaggtggagcccgccgtggacaccagcagaatcaaggtgttcggccccggcatcgagggcaaggacgtgttcagagaggccaccaccgacttcaccgtggacagcagacccctgacccaggtgggcggcgaccacatcaaggcccacatcgccaaccccagcggcgccagcaccgagtgcttcgtgaccgacaacgccgacggcacctaccaggtggagtacacccccttcgagaagggcctgcacgtggtggaggtgacctacgacgacgtgcccatccccaacagccccttcaaggtggccgtgaccgagggctgccagcccagcagagtgcaggcccagggccccggcctgaaggaggccttcaccaacaagcccaacgtgttcaccgtggtgaccagaggcgccggcatcggcggcctgggcatcaccgtggagggccccagcgagagcaagatcaactgcagagacaacaaggacggcagctgcagcgccgagtacatccccttcgcccccggcgactacgacgtgaacatcacctacggcggcgcccacatccccggcagccccttcagagtgcccgtgaaggacgtggtggaccccagcaaggtgaagatcgccggccccggcctgggcagcggcgtgagagccagagtgctgcagagcttcaccgtggacagcagcaaggccggcctggcccccctggaggtgagagtgctgggccccagaggcctggtggagcccgtgaacgtggtggacaacggcgacggcacccacaccgtgacctacacccccagccaggagggcccctacatggtgagcgtgaagtacgccgacgaggagatccccagaagccccttcaaggtgaaggtgctgcccacctacgacgccagcaaggtgaccgccagcggccccggcctgagcagctacggcgtgcccgccagcctgcccgtggacttcgccatcgacgccagagacgccggcgagggcctgctggccgtgcagatcaccgaccaggagggcaagcccaagagagccatcgtgcacgacaacaaggacggcacctacgccgtgacctacatccccgacaagaccggcagatacatgatcggcgtgacctacggcggcgacgacatccccctgagcccctacagaatcagagccacccagaccggcgacgccagcaagtgcctggccaccggccccggcatcgccagcaccgtgaagaccggcgaggaggtgggcttcgtggtggacgccaagaccgccggcaagggcaaggtgacctgcaccgtgctgacccccgacggcaccgaggccgaggccgacgtgatcgagaacgaggacggcacctacgacatcttctacaccgccgccaagcccggcacctacgtgatctacgtgagattcggcggcgtggacatccccaacagccccttcaccgtgatggccaccgacggcgaggtgaccgccgtggaggaggcccccgtgaccgaggaggcctacgtgcccgtgagcgacatgaacggcctgggcttcaagcccttcgacctggtgatccccttcgccgtgagaaagggcgagatcaccggcgaggtgcacatgcccagcggcaagaccgccacccccgagatcgtggacaacaaggacggcaccgtgaccgtgagatacgcccccaccgaggtgggcctgcacgagatgcacatcaagtacatgggcagccacatccccgagagccccctgcagttctacgtgaactaccccaacagcggcagcgtgagcgcctacggccccggcctggtgtacggcgtggccaacaagaccgccaccttcaccatcgtgaccgaggacgccggcgagggcggcctggacctggccatcgagggccccagcaaggccgagatcagctgcatcgacaacaaggacggcacctgcaccgtgacctacctgcccaccctgcccggcgactacagcatcctggtgaagtacaacgacaagcacatccccggcagccccttcaccgccaagatcaccgacgacagcagaagatgcagccaggtgaagctgggcagcgccgccgacttcctgctggacatcagcgagaccgacctgagcagcctgaccgccagcatcaaggcccccagcggcagagacgagccctgcctgctgaagagactgcccaacaaccacatcggcatcagcttcatccccagagaggtgggcgagcacctggtgagcatcaagaagaacggcaaccacgtggccaacagccccgtgagcatcatggtggtgcagagcgagatcggcgacgccagaagagccaaggtgtacggcagaggcctgagcgagggcagaaccttcgagatgagcgacttcatcgtggacaccagagacgccggctacggcggcatcagcctggccgtggagggccccagcaaggtggacatccagaccgaggacctggaggacggcacctgcaaggtgagctacttccccaccgtgcccggcgtgtacatcgtgagcaccaagttcgccgacgagcacgtgcccggcagccccttcaccgtgaagatcagcggcgagggcagagtgaaggagagcatcaccagaaccagcagagcccccagcgtggccaccgtgggcagcatctgcgacctgaacctgaagatccccgagatcaacagcagcgacatgagcgcccacgtgaccagccccagcggcagagtgaccgaggccgagatcgtgcccatgggcaagaacagccactgcgtgagattcgtgccccaggagatgggcgtgcacaccgtgagcgtgaagtacagaggccagcacgtgaccggcagccccttccagttcaccgtgggccccctgggcgagggcggcgcccacaaggtgagagccggcggccccggcctggagagaggcgaggccggcgtgcccgccgagttcagcatctggaccagagaggccggcgccggcggcctgagcatcgccgtggagggccccagcaaggccgagatcaccttcgacgaccacaagaacggcagctgcggcgtgagctacatcgcccaggagcccggcaactacgaggtgagcatcaagttcaacgacgagcacatccccgagagcccctacctggtgcccgtgatcgcccccagcgacgacgccagaagactgaccgtgatgagcctgcaggagagcggcctgaaggtgaaccagcccgccagcttcgccatcagactgaacggcgccaagggcaagatcgacgccaaggtgcacagccccagcggcgccgtggaggagtgccacgtgagcgagctggagcccgacaagtacgccgtgagattcatcccccacgagaacggcgtgcacaccatcgacgtgaagttcaacggcagccacgtggtgggcagccccttcaaggtgagagtgggcgagcccggccaggccggcaaccccgccctggtgagcgcctacggcaccggcctggagggcggcaccaccggcatccagagcgagttcttcatcaacaccaccagagccggccccggcaccctgagcgtgaccatcgagggccccagcaaggtgaagatggactgccaggagacccccgagggctacaaggtgatgtacacccccatggcccccggcaactacctgatcagcgtgaagtacggcggccccaaccacatcgtgggcagccccttcaaggccaaggtgaccggccagagactggtgagccccggcagcgccaacgagaccagcagcatcctggtggagagcgtgaccagaagcagcaccgagacctgctacagcgccatccccaaggccagcagcgacgccagcaaggtgaccagcaagggcgccggcctgagcaaggccttcgtgggccagaagagcagcttcctggtggactgcagcaaggccggcagcaacatgctgctgatcggcgtgcacggccccaccaccccctgcgaggaggtgagcatgaagcacgtgggcaaccagcagtacaacgtgacctacgtggtgaaggagagaggcgactacgtgctggccgtgaagtggggcgaggagcacatccccggcagccccttccacgtgaccgtgccctag

SEQ ID NO: 62699 - protein, 2578 aa, Artificial Sequence
  derived and/or modified sequence
MPVTEKDLAEDAPWKKIQQNTFTRWCNEHLKCVNKRIGNLQTDLSDGLRLIALLEVLSQKRMYRKYHQRPTFRQMQLENVSVALEFLDRESIKLVSIDSKAIVDGNLKLILGLVWTLILHYSISMPVWEDEGDDDAKKQTPKQRLLGWIQNKIPYLPITNFNQNWQDGKALGALVDSCAPGLCPDWESWDPQKPVDNAREAMQQADDWLGVPQVITPEEIIHPDVDEHSVMTYLSQFPKAKLKPGAPLKPKLNPKKARAYGRGIEPTGNMVKQPAKFTVDTISAGQGDVMVFVEDPEGNKEEAQVTPDSDKNKTYSVEYLPKVTGLHKVTVLFAGQHISKSPFEVSVDKAQGDASKVTAKGPGLEAVGNIANKPTYFDIYTAGAGVGDIGVEVEDPQGKNTVELLVEDKGNQVYRCVYKPMQPGPHVVKIFFAGDTIPKSPFVVQVGEACNPNACRASGRGLQPKGVRIRETTDFKVDTKAAGSGELGVTMKGPKGLEELVKQKDFLDGVYAFEYYPSTPGRYSIAITWGGHHIPKSPFEVQVGPEAGMQKVRAWGPGLHGGIVGRSADFVVESIGSEVGSLGFAIEGPSQAKIEYNDQNDGSCDVKYWPKEPGEYAVHIMCDDEDIKDSPYMAFIHPATGGYNPDLVRAYGPGLEKSGCIVNNLAEFTVDPKDAGKAPLKIFAQDGEGQRIDIQMKNRMDGTYACSYTPVKAIKHTIAVVWGGVNIPHSPYRVNIGQGSHPQKVKVFGPGVERSGLKANEPTHFTVDCTEAGEGDVSVGIKCDARVLSEDEEDVDFDIIHNANDTFTVKYVPPAAGRYTIKVLFASQEIPASPFRVKVDPSHDASKVKAEGPGLSKAGVENGKPTHFTVYTKGAGKAPLNVQFNSPLPGDAVKDLDIIDNYDYSHTVKYTPTQQGNMQVLVTYGGDPIPKSPFTVGVAAPLDLSKIKLNGLENRVEVGKDQEFTVDTRGAGGQGKLDVTILSPSRKVVPCLVTPVTGRENSTAKFIPREEGLYAVDVTYDGHPVPGSPYTVEASLPPDPSKVKAHGPGLEGGLVGKPAEFTIDTKGAGTGGLGLTVEGPCEAKIECSDNGDGTCSVSYLPTKPGEYFVNILFEEVHIPGSPFKADIEMPFDPSKVVASGPGLEHGKVGEAGLLSVDCSEAGPGALGLEAVSDSGTKAEVSIQNNKDGTYAVTYVPLTAGMYTLTMKYGGELVPHFPARVKVEPAVDTSRIKVFGPGIEGKDVFREATTDFTVDSRPLTQVGGDHIKAHIANPSGASTECFVTDNADGTYQVEYTPFEKGLHVVEVTYDDVPIPNSPFKVAVTEGCQPSRVQAQGPGLKEAFTNKPNVFTVVTRGAGIGGLGITVEGPSESKINCRDNKDGSCSAEYIPFAPGDYDVNITYGGAHIPGSPFRVPVKDVVDPSKVKIAGPGLGSGVRARVLQSFTVDSSKAGLAPLEVRVLGPRGLVEPVNVVDNGDGTHTVTYTPSQEGPYMVSVKYADEEIPRSPFKVKVLPTYDASKVTASGPGLSSYGVPASLPVDFAIDARDAGEGLLAVQITDQEGKPKRAIVHDNKDGTYAVTYIPDKTGRYMIGVTYGGDDIPLSPYRIRATQTGDASKCLATGPGIASTVKTGEEVGFVVDAKTAGKGKVTCTVLTPDGTEAEADVIENEDGTYDIFYTAAKPGTYVIYVRFGGVDIPNSPFTVMVTEEAYVPVSDMNGLGFKPFDLVIPFAVRKGEITGEVHMPSGKTATPEIVDNKDGTVTVRYAPTEVGLHEMHIKYMGSHIPESPLQFYVNYPNSGSVSAYGPGLVYGVANKTATFTIVTEDAGEGGLDLAIEGPSKAEISCIDNKDGTCTVTYLPTLPGDYSILVKYNDKHIPGSPFTAKITDDSRRCSQVKLGSAADFLLDISETDLSSLTASIKAPSGRDEPCLLKRLPNNHIGISFIPREVGEHLVSIKKNGNHVANSPVSIMVVQSEIGDARRAKVYGRGLSEGRTFEMSDFIVDTRDAGYGGISLAVEGPSKVDIQTEDLEDGTCKVSYFPTVPGVYIVSTKFADEHVPGSPFTVKISGEGRVKESITRTSRAPSVATVGSICDLNLKIPEINSSDMSAHVTSPSGRVTEAEIVPMGKNSHCVRFVPQEMGVHTVSVKYRGQHVTGSPFQFTVGPLGEGGAHKVRAGGPGLERGEAGVPAEFSIWTREAGAGGLSIAVEGPSKAEITFDDHKNGSCGVSYIAQEPGNYEVSIKFNDEHIPESPYLVPVIAPSDDARRLTVMSLQESGLKVNQPASFAIRLNGAKGKIDAKVHSPSGAVEECHVSELEPDKYAVRFIPHENGVHTIDVKFNGSHVVGSPFKVRVGEPGQAGNPALVSAYGTGLEGGTTGIQSEFFINTTRAGPGTLSVTIEGPSKVKMDCQETPEGYKVMYTPMAPGNYLISVKYGGPNHIVGSPFKAKVTGQRLVSPGSANETSSILVESVTRSSTETCYSAIPKASSDASKVTSKGAGLSKAFVGQKSSFLVDCSKAGSNMLLIGVHGPTTPCEEVSMKHVGNQQYNVTYVVKERGDYVLAVKWGEEHIPGSPFHVTVP

SEQ ID NO: 62700 - DNA, 9391 bp, Artificial Sequence
  derived and/or modified sequence
gcggccaggggcgggcggccgcagagcagcaccggccgtggctccggtagcagcaagttcgaaccccgctcccgctccgcttcggttctcgctccttcggcccttgggcctccaaacaccagtccccggcagctcgttgcgcattgcgctctccccgccaccaggatgccggtaaccgagaaggatctagctgaggacgcgccttggaagaagatccagcagaacacgttcacacgctggtgcaacgagcacctcaagtgcgtgaacaaacgcatcggcaacctgcagaccgacctgagcgacgggctgcggctcatcgcgctgctcgaggtgctcagccagaagcgcatgtaccgcaagtaccatcagcggcccacctttcgccagatgcagctcgagaatgtgtccgtggcgctcgagttcctggaccgtgagagcatcaagctcgtgtccatcgatagcaaagccattgtggatgggaacctgaagctcatcttgggtctggtgtggacgctgatcctccactactccatctccatgcccgtgtgggaggatgaaggggatgatgatgccaagaagcagacgccaaagcagaggctgctggggtggattcagaacaagatcccctacttgcccatcaccaactttaaccagaactggcaagacggcaaagccctgggagccctggtagacagctgtgctccaggtctgtgcccagactgggaatcctgggacccgcagaagcctgtggataatgcacgagaagccatgcagcaggcagatgactggctgggtgtcccacaggtcatcactcctgaagaaatcattcacccggatgtggacgagcactcagttatgacttacctgtcccagttccccaaagccaagctcaagccgggggctcctctcaaacccaaactcaacccgaagaaagccagggcctatggcagaggaatcgagcccactggaaacatggtgaagcagccagccaagttcactgtggacaccatcagcgccgggcaaggagacgtgatggtgtttgttgaggacccagaagggaacaaagaggaggcacaagtgacccctgacagtgacaagaacaagacatactctgtggagtatctgcccaaggtcaccgggctacacaaagtcacagtcctctttgcaggacagcacatctccaagagcccatttgaagtgagtgttgacaaggcccagggagatgccagtaaagtcactgcaaaaggtccagggttggaagctgtagggaacatcgccaataagcccacctactttgacatctatacggcaggagctggtgtgggtgacattggtgtggaggtggaagatccccaggggaagaacaccgtggagttgctcgtggaagacaaaggaaaccaggtgtatcgatgtgtgtacaaacccatgcagcctggccctcacgtggtcaagatcttctttgctggggacactattcctaagagtcccttcgttgtgcaggttggggaagcctgcaatccaaatgcctgccgggccagtggccgaggcctacaacccaaaggcgtccgtatccgggagaccacagatttcaaggttgacaccaaagctgcaggaagtggggagctcggtgtaaccatgaagggtcctaagggtctggaggagctggtgaagcagaaagactttctggatggggtctacgcattcgagtattaccccagcaccccggggagatacagcattgccatcacatgggggggacaccacattccaaagagcccctttgaagttcaagttggccctgaagcgggtatgcagaaagtccgtgcttggggccctgggctccatggtgggattgtcgggcggtcagcggacttcgtggtagaatccattggctctgaagtggggtctctggggtttgccattgaaggcccctctcaggcaaagattgagtacaacgaccagaatgatggatcgtgtgatgtcaaatactggcccaaggagcctggcgaatatgctgttcacatcatgtgtgacgacgaagacatcaaggacagcccgtacatggccttcatccacccagccacgggaggctacaaccctgatctggttcgagcatacgggccaggtttggagaaatctggatgcattgtcaacaacctggccgagttcactgtggatcctaaggatgctggaaaagctcccttaaagatatttgctcaggatggggaaggccaacgcattgacatccagatgaagaaccggatggacggcacatatgcatgctcatacaccccggtgaaggccatcaagcacaccattgctgtggtctggggaggcgtgaacatcccgcacagcccctacagggtcaacatcgggcaaggtagccatcctcagaaggtcaaagtgtttgggccaggtgtggagagaagtggtctgaaggcaaatgaacctacacacttcacggtggactgtactgaggctggggaaggtgatgtcagtgttggcattaagtgtgatgcccgggtgttaagtgaagatgaggaagacgtggattttgacattattcacaatgccaatgatacgttcacagtcaaatatgtgcctcctgctgctgggcgatacactatcaaagttctctttgcatctcaggaaatccccgccagccctttcagagtcaaagttgacccttcccacgatgccagcaaagtgaaggcagaaggcccagggctcagcaaagcaggtgtggaaaatgggaaaccgacccacttcactgtctacaccaagggggctgggaaagccccgctcaacgtgcagttcaacagccctcttcctggcgatgcagtgaaggatttggatatcatcgataattatgactactctcacacggttaaatatacacccacccaacagggcaacatgcaggttctggtgacttacggtggcgatcccatccctaaaagccctttcactgtgggtgttgctgcaccgctggatctgagcaagataaaactcaatgggctggaaaacagggtggaagttgggaaggatcaggagttcaccgttgataccaggggggcaggaggccaggggaagctggacgtgacaatcctcagcccctctcggaaggtcgtgccatgcctagtgacacctgtgacaggccgggagaacagcacggccaagttcatccctcgggaggaggggctgtatgctgtagacgtgacctacgatggacaccctgtgcccgggagcccctacacagtggaggcctcgctgccaccagatcccagcaaggtgaaggcccacggtcccggcctcgaaggtggtctcgtgggcaagcctgccgagttcaccatcgataccaaaggagctggtactggaggtctgggcttaacggtggaaggtccgtgcgaggccaaaatcgagtgctccgacaatggtgatgggacctgctccgtctcttaccttcccacaaaacccggggagtacttcgtcaacatcctctttgaagaagtccacatacctgggtctcccttcaaagctgacattgaaatgccctttgacccctctaaagtcgtggcatcggggccaggtctcgagcacgggaaggtgggtgaagctggcctccttagcgtcgactgctcggaagcgggaccgggggccctgggcctggaagctgtctcggactcgggaacaaaagccgaagtcagtattcagaacaacaaagatggcacctacgcggtgacctacgtgcccctgacggccggcatgtacacgttgaccatgaagtatggtggcgaactcgtgccacacttccccgcccgggtcaaggtggagcccgccgtggacaccagcaggatcaaagtctttggaccaggaatagaagggaaagatgtgttccgggaagctaccaccgactttacagttgactctcggccgctgacccaggttgggggtgaccacatcaaggcccacattgccaacccctcaggggcctccaccgagtgctttgtcacagacaatgcggatgggacctaccaggtggaatacacaccctttgagaaaggtctccatgtagtggaggtgacatatgatgacgtgcctatcccaaacagtcccttcaaggtggctgtcactgaaggctgccagccatctagggtgcaagcccaaggacctggattgaaagaggcctttaccaacaagcccaatgtcttcaccgtggttaccagaggcgcaggaattggtgggcttggcataactgttgagggaccatcagagtcgaagataaattgcagagacaacaaggatggcagctgcagtgctgagtacattcctttcgcaccgggggattacgatgttaatatcacatatggaggagcccacatccccggcagccccttcagggttcctgtgaaggatgttgtggaccccagcaaggtcaagattgccggccccgggctgggctcaggcgtccgagcccgtgtcctgcagtccttcacggtggacagcagcaaggctggcctggctccgctggaagtgagggttctgggcccacgaggcttggtggagccagtgaacgtggtggacaatggagatggcacacacacagtaacctacaccccatctcaggagggaccttacatggtctcagttaaatatgctgatgaagagattcctcgcagtcccttcaaggtcaaggtccttcccacatatgatgccagcaaagtgactgccagtggccccggccttagttcctatggtgtgcctgccagtctacctgtggactttgcaattgatgcccgagatgccggggaaggcctgcttgctgttcaaataacggaccaagaaggaaaacccaaaagagccattgtccatgacaataaagatggcacgtatgctgtcacctacatccccgacaagactgggcgctatatgattggagtcacctacgggggtgacgacatcccactttctccttatcgcatccgagccacacagacgggtgatgccagcaagtgcctggccacgggtcctggaatcgcctccactgtgaaaactggcgaagaagtaggctttgtggttgatgccaagactgccgggaagggtaaagtgacctgcacggttctgaccccagatggcactgaggccgaggccgatgtcattgagaatgaagatggaacctatgacatcttctacacagctgccaagccgggcacatatgtgatctatgtgcgcttcggtggtgttgatattcctaacagccccttcactgtcatggtgaccgaagaggcctatgtcccagtgagtgacatgaacggcctgggatttaagccttttgacctggtcattccgtttgctgtcaggaaaggagaaatcactggagaggtccacatgccttctgggaagacagccacacctgagattgtggacaacaaggacggcacggtcactgttagatatgcccccactgaggtcgggctccatgagatgcacatcaaatacatgggcagccacatccctgagagcccactccagttctacgtgaactaccccaacagtggaagtgtttctgcatacggtccaggcctcgtgtatggagtggccaacaaaactgccaccttcaccatcgtcacagaggatgcaggagaaggtggtctggacttggctattgagggcccctcaaaagcagaaatcagctgcattgacaataaagatgggacatgcacagtgacctacctgccgactctgccaggcgactacagcattctggtcaagtacaatgacaagcacatccctggcagccccttcacagccaagatcacagatgacagcaggcggtgctcccaggtgaagttgggctcagccgctgacttcctgctcgacatcagtgagactgacctcagcagcctgacggccagcattaaggccccatctggccgagacgagccctgtctcctgaagaggctgcccaacaaccacattggcatctccttcatcccccgggaagtgggcgaacatctggtcagcatcaagaaaaatggcaaccatgtggccaacagccccgtgtctatcatggtggtccagtcggagattggtgacgcccgccgagccaaagtctatggccgcggcctgtcagaaggccggactttcgagatgtctgacttcatcgtggacacaagggatgcaggttatggtggcatatccttggcggtggaaggccccagcaaagtggacatccagacggaggacctggaagatggcacctgcaaagtctcctacttccctaccgtgcctggggtttatatcgtctccaccaaattcgctgacgagcacgtgcctgggagcccatttaccgtgaagatcagtggggagggaagagtcaaagagagcatcacccgcaccagtcgggccccgtccgtggccactgtcgggagcatttgtgacctgaacctgaaaatcccagaaatcaacagcagtgatatgtcggcccacgtcaccagcccctctggccgtgtgactgaggcagagattgtgcccatggggaagaactcacactgcgtccggtttgtgccccaggagatgggcgtgcacacggtcagcgtcaagtaccgtgggcagcacgtcaccggcagccccttccagttcaccgtggggccacttggtgaaggaggcgcccacaaggtgcgggcaggaggccctggcctggagagaggagaagcgggagtcccagctgagttcagcatttggacccgggaagcaggcgctggaggcctctccatcgctgttgagggccccagtaaggccgagattacattcgatgaccataaaaatgggtcgtgcggtgtatcttatattgcccaagagcctggtaactacgaggtgtccatcaagttcaatgatgagcacatcccggaaagcccctacctggtgccggtcatcgcaccctccgacgacgcccgccgcctcactgttatgagccttcaggaatcgggattaaaagttaaccagccagcatcctttgctataaggttgaatggcgcaaaaggcaagattgatgcaaaggtgcacagcccctctggagccgtggaggagtgccacgtgtctgagctggagccagataagtatgctgttcgcttcatccctcatgagaatggtgtccacaccatcgatgtcaagttcaatgggagccacgtggttggaagccccttcaaagtgcgcgttggggagcctggacaagcggggaaccctgccctggtgtccgcctatggcacgggactcgaagggggcaccacaggtatccagtcggaattctttattaacaccacccgagcaggtccagggacattatccgtcaccatcgaaggcccatccaaggttaaaatggattgccaggaaacacctgaagggtacaaagtcatgtacacccccatggctcctggtaactacctgatcagcgtcaaatacggtgggcccaaccacatcgtgggcagtcccttcaaggccaaggtgacaggccagcgtctagttagccctggctcagccaacgagacctcatccatcctggtggagtcagtgaccaggtcgtctacagagacctgctatagcgccattcccaaggcatcctcggacgccagcaaggtgacctctaagggggcagggctctcaaaggcctttgtgggccagaagagttccttcctggtggactgcagcaaagctggctccaacatgctgctgatcggggtccatgggcccaccaccccctgcgaggaggtctccatgaagcatgtaggcaaccagcaatacaacgtcacatacgtcgtcaaggagaggggcgattatgtgctggctgtgaagtggggggaggaacacatccctggcagcccttttcatgtcacagtgccttaaaacagttttctcaaatcctggagagagttcttgtggttgcttttgttgcttgtttgtaattcattttatacaaagccctccagcctgtttgtggggctgaaaccccatccctaaaatattgctgttgtaaaatgccttcagaaataagtcctagactggactcttgagggacatattggagaatcttaagaaatgcaagcttgttcagggggctgagaagatcctgagtacactaggtgcaaaccagaactcttggtggaacagaccagccactgcagcagacagaccaggaacacaatgagactgacatttcaaaaaaacaaaactggctagcctgagctgctggttcactcttcagcatttatgaaacaaggctaggggaagatgggcagagaaaaaggggacacctagtttggttgtcatttggcaaaggagatgacttaaaatccgcttaatctcttccagtgtccgtgttaatgtatttggctattagatcactagcactgctttaccgctcctcatcgccaacacccccatgctctgtggccttcttacacttctcagagggcagagtggcagccgggcaccctacagaaactcagagggcagagtggcagccaggcccacatgtctctcaagtacctgtcccctcgctctggtgattatttcttgcagaatcaccacacgagaccatcccggcagtcatggttttgctttagttttccaagtccgtttcagtcccttccttggtctgaagaaattctgcagtggcgagcagtttcccacttgccaaagatcccttttaaccaacactagcccttgtttttaacacacgctccagcccttcatcagcctgggcagtcttaccaaaatgtttaaagtgatctcagaggggcccatggattaacgccctcatcccaaggtccgtcccatgacataacactccacacccgccccagccaacttcatgggtcactttttctggaaaataatgatctgtacagacaggacagaatgaaactcctgcgggtctttggcctgaaagttgggaatggttgggggagagaagggcagcagcttattggtggtcttttcaccattggcagaaacagtgagagctgtgtggtgcagaaatccagaaatgaggtgtagggaattttgcctgccttcctgcagacctgagctggctttggaatgaggttaaagtgtcagggacgttgcctgagcccaaatgtgtagtgtggtctgggcaggcagacctttaggttttgctgcttagtcctgaggaagtggccactcttgtggcaggtgtagtatctggggcgagtgttgggggtaaaagcccaccctacagaaagtggaacagcccggagcctgatgtgaaaggaccacgggtgttgtaagctgggacacggaagccaaactggaatcaaacgccgactgtaaattgtatcttataacttattaaataaaacatttgctccgtaaa

SEQ ID NO: 62701 - DNA, 7737 bp, Artificial Sequence
  derived and/or modified sequence
atgcccgtcactgaaaaagacctggctgaggatgctccgtggaaaaaaattcagcagaatacgttcaccaggtggtgcaacgaacacctgaagtgcgtgaacaagcgcatcggcaacctgcagacagatctcagcgacgggcttcgcctcatagccctcttagaggtgctcagccagaagagaatgtatcgcaaataccaccaaagacctaccttcagacaaatgcagctcgaaaacgtgtcagtcgccttggaatttttggaccgtgagagcatcaagctagtcagtatcgacagcaaggccattgtagacggtaatcttaagctgatcctgggcctggtctggaccttaatcctgcactactccatcagcatgcccgtgtgggaggacgagggcgatgacgacgctaagaaacagacccctaaacagaggctactgggatggattcagaataagatcccctatctgccaataactaattttaatcagaactggcaagacggcaaagctctgggagcgttggtggactcttgtgcccctgggctgtgcccagactgggaaagctgggacccccaaaagccggtagacaatgcccgcgaagctatgcagcaggccgatgattggcttggcgtacctcaagtaatcactcctgaggagattattcatccagacgtggatgaacactcagtgatgacttatctgtcacagtttccaaaggcaaagttgaaacctggggcccctctaaagccaaaactgaatccaaaaaaggcgagagcatacgggcgtggtattgaacccactggcaacatggtcaagcagccagcaaaatttacagtggacaccatatctgccgggcagggtgacgtgatggtcttcgtcgaggaccccgagggaaataaggaggaggctcaggtcacacccgattccgacaagaacaaaacctattctgtcgagtatcttcccaaagtgaccgggctgcacaaggtgacagtcctctttgctgggcagcacatctcaaagagcccttttgaagtgtcagtcgataaagcacagggggatgctagcaaggtgacagcaaaagggcctggactggaggctgtgggaaacatcgcgaataagccaacatattttgacatttatacagcaggggcaggcgtgggggacattggcgtcgaagtggaggatccacagggcaagaacaccgtggaactattggtagaggataaaggaaaccaggtctaccgatgtgtgtataagcctatgcaaccagggccccacgttgtgaaaatcttttttgcaggggatacaattccgaagagtcccttcgtggtgcaggtgggcgaggcctgtaacccgaacgcgtgtagagcgtcggggaggggtctgcagccgaaaggggttaggatccgggagacaactgattttaaggttgataccaaggcagcaggctctggggaactgggtgtgaccatgaaagggccgaaagggctggaagaactggtcaagcagaaggatttcctggatggcgtgtatgcttttgagtattacccgagtactcccggaaggtacagcattgctattacctggggtggtcaccacatccccaaaagcccctttgaggtgcaggtaggtcctgaggctggaatgcagaaggtgcgagcatggggtccgggcctgcacggcggcatcgtgggtcggtcagcagatttcgtggtcgaatccataggatctgaagttggttccctcgggttcgccattgagggcccatcccaggctaagattgagtataatgaccagaacgatggtagttgcgatgtgaagtattggcccaaggagccaggtgagtacgcagtgcatataatgtgtgacgatgaggatatcaaagattccccatacatggcctttatccaccctgccaccggtggctacaaccccgatctcgtgcgcgcctatgggcccggattagagaaatctggctgcattgtgaataacctggcggaattcacagtcgacccaaaggatgcaggtaaagcaccattgaagatctttgcccaggatggggagggacagcgaatcgacatccaaatgaaaaatcggatggatggcacctatgcttgctcatacacacccgtcaaggcaataaaacacaccatcgccgtcgtatggggaggagtgaacatacctcattctccgtatagggtaaatatcggacagggatcgcaccctcaaaaggtcaaagttttcggcccaggagtggagagatcaggtctcaaggctaatgaaccaacccacttcaccgtcgactgtacggaagccggcgagggagacgtgtccgtaggcataaaatgtgatgcaagagtcctgagcgaagacgaagaggacgtggatttcgacattattcataatgctaacgacacgtttactgttaaatacgtcccgccggccgctggcaggtatacaattaaggtgttgtttgcctcccaggagattccagcaagtccattcagggtgaaagtggatccatctcacgatgcatcgaaggtcaaagccgaggggccagggctaagtaaagccggtgtggaaaacggcaaaccaacccattttaccgtgtatactaagggcgcaggcaaagccccgttaaatgttcaattcaactctcctctgcccggtgatgctgtcaaagacctggatattattgacaactatgactactcacataccgttaagtatactccaacccagcagggcaacatgcaggttttagtgacctacgggggtgatccaatcccaaagtcacctttcacggtgggcgtggccgcccctctggacctctctaagattaaacttaatggactggagaaccgtgtggaggtgggcaaggatcaggagtttacggtggacacgcgcggagcagggggccagggtaaacttgatgtgaccattttgtcccctagccgtaaagtagtcccatgcttagtgacccccgtgactggtcgagagaattcgactgccaagttcatccccagagaagaggggctctacgccgtggacgtgacctatgatgggcatcctgtacccggatctccatacacagttgaggccagcctgcctccagaccccagtaaggtcaaagcccacggaccaggcctcgaaggagggctggtaggcaagcccgccgaattcaccatcgacaccaaaggggccgggaccgggggcctgggccttacagttgagggtccttgcgaagctaaaattgaatgttccgacaacggcgacggaacctgcagcgtgagttacttacccacgaagccaggtgaatatttcgttaatatactgttcgaggaagtgcacatccccggaagcccctttaaggccgatatcgaaatgccctttgatcccagcaaagtggtggcttctggccccgggctggaacatggaaaggttggggaagccgggctgctgagcgtggactgtagcgaggctggccccggggcgctgggcttagaggccgtctcagactctggaaccaaagcagaggtctcaatccaaaataataaagacgggacttacgcagtgacctacgtacctctgacagccggaatgtatacattgactatgaaatacggcggggaacttgtaccccacttccccgctcgcgttaaggtcgagccagcggtcgacacctccagaatcaaagtatttggccccggcattgagggaaaagatgttttccgagaagcaacaacagatttcaccgtcgactcgcggcctctaacccaggtgggtggagaccacataaaagcccatattgccaatccctccggcgcttccaccgagtgctttgtcacggacaatgcagatgggacgtatcaggttgaatacaccccttttgagaagggtcttcatgtggttgaggtgacctatgacgatgtgcccatcccaaacagtccatttaaagtggcagtcactgagggatgtcagccatcacgtgtgcaggcccagggccctggcctgaaagaggcctttaccaacaagcctaacgtgttcaccgtggttacgaggggagccgggattggtggcctgggcattaccgtagaaggcccatctgagagcaagattaactgccgggataataaagatgggtcctgttcagcagagtatatcccctttgctccaggcgactacgacgtgaatattacttacggaggcgcccatatcccaggaagccccttcagagttcctgtgaaggatgtcgtagaccccagcaaggtcaagattgcgggccccggcttagggtcaggcgtgagagctagagtgctgcagtctttcaccgttgattcttctaaggcgggtttggcccccctcgaagtcagggtgttggggcccagaggtcttgtggaaccagtcaacgtggtggataacggcgacgggacacataccgttacttatactccatctcaggaagggccatatatggtgtcagtcaagtatgccgatgaggaaatacctcgaagtccattcaaggtgaaggtgctcccaacatacgacgctagcaaagtgacggcatccggacctggtctgtcctcttatggtgtgcccgccagcctgcccgtggatttcgcaattgacgcccgggacgctggggaaggactgttggccgtccagatcacggatcaggagggtaaacctaaaagggccatagtgcacgataataaagatggcacatatgctgtcacgtacattcctgacaaaacaggcaggtatatgataggcgtgacatatggcggagacgatatcccactttccccataccgcatccgggcaacacaaaccggggatgcatcaaagtgcctcgctaccgggcctggaattgcatctacggtcaagaccggggaggaggtgggtttcgtggtggacgccaagactgcgggcaagggtaaggtgacctgcactgttctcacacctgatggcaccgaggcagaagctgacgtgattgagaatgaagacggcacttacgatattttctatactgccgcaaagcccggcacctatgtgatttacgttagattcggcggagtggacatcccaaattctccattcacggtaatggtcactgaggaagcctacgtccctgtttcagatatgaacggcttgggattcaaacccttcgatctcgttattcccttcgccgtgagaaaaggtgaaattacaggggaggtacatatgccctcaggcaagacagccacgccagaaattgtggacaacaaagatgggaccgtcactgttcggtatgcacctaccgaggttgggctccatgaaatgcatatcaagtacatgggatcacacatccctgagtccccgctgcagttctacgtgaactatccgaactccgggtccgtcagtgcttatggtcccggccttgtgtatggggtggctaataagaccgcgacctttactatcgtgactgaagacgccggtgaaggtggcttggatctggccatcgagggcccttcaaaagccgagatctcatgtattgacaataaggacggcacctgtaccgtcacgtatctccccaccttgccaggggactactctattctggtaaaatacaacgacaaacacattcccggcagcccctttactgcgaagataacagatgacagcaggcgttgctcacaggtgaagctggggagtgccgctgatttcttgttggacatctccgagacagatctgtcttcactgaccgcaagtattaaagcaccgtctggtcgggatgagccctgccttctcaagcgcctgccgaacaaccatatcggtatctccttcattccacgggaagtcggggagcatctcgtttctataaaaaaaaacggaaaccacgtcgccaattctccagtgagcattatggttgttcagtctgaaataggcgatgcccggcgggccaaagtgtacgggcggggcctgagtgaaggcagaaccttcgagatgtccgacttcatagtggatactagggacgctggatacgggggcatttctctcgctgttgaaggtcctagtaaagtggacatccagactgaggatcttgaagatggcacctgcaaggtgtcttacttccctacggtccctggagtttacattgtgtctaccaagttcgccgacgaacacgtaccaggcagcccattcaccgtgaagatttcaggagagggtcgggttaaggaaagcataacccgcacatcacgtgctcccagcgtggcgactgtggggagcatctgtgacctgaacttgaaaataccagagataaattccagcgacatgagcgctcatgttacaagcccctcaggccgggtaactgaagccgagatcgtgcccatgggtaagaacagtcactgtgtgcggttcgtgccccaggaaatgggggtacacacggtaagcgtaaagtatcggggacagcacgtgactgggtctcccttccagttcaccgtcgggcctcttggcgaagggggcgcccataaagtgcgggctggagggccagggcttgagcgcggagaggccggggtacctgctgagttcagcatctggacgcgggaggccggcgccggcggacttagcatcgccgtggaaggtccttccaaggccgagattaccttcgatgaccataaaaatgggagttgcggagttagctatatcgcccaggagccgggaaattatgaggtcagcatcaagtttaatgatgaacatattcccgaatccccatacttggtccctgttatcgccccctctgacgatgcccgacgattgacagtaatgagcctgcaggaatccggactgaaggtaaaccagccggccagcttcgccatccggctgaatggcgccaaaggaaaaatcgatgcgaaggtgcactcaccctccggcgctgtggaagaatgtcacgtctctgagctggaaccagacaaatacgcagtgagattcatcccacatgagaacggcgtgcatacaatcgatgtaaaattcaatggatcccatgtcgtgggctcccctttcaaggtgagggtgggagagccaggccaggccggaaatcctgctttagtgtctgcttacggcacggggctggaaggtggcaccaccggaatccaatccgaattttttatcaacacaacccgcgcaggccctggcaccctcagcgtgaccattgagggcccaagcaaggtcaaaatggattgccaagaaactccggagggctataaagttatgtatactcccatggctcccggaaactacctcatatcggtcaagtacgggggccccaaccatatcgtggggtcaccattcaaggctaaagtaacgggccagcggctcgttagcccaggtagtgctaacgagaccagtagcattctggtggagagcgtcacaaggagttccaccgagacttgctatagcgcaatccccaaggcctccagcgacgcctcaaaggttactagcaaaggcgcagggttgtctaaggctttcgtcggacaaaagtccagctttctggtcgattgttctaaagccggcagtaatatgttgctcattggtgttcatggccccacaactccttgcgaagaagtctccatgaagcacgtcggtaaccaacaatataatgtgacctacgtagtcaaagaacggggagattatgtgctcgcagtgaaatggggtgaggaacacatcccaggcagccctttccacgttacagtgccctag

SEQ ID NO: 62702 - DNA, 7737 bp, Artificial Sequence
  derived and/or modified sequence
atgcctgtgacagagaaggacctggccgaggatgccccctggaagaagatccagcagaacaccttcacccgctggtgcaatgagcacctgaagtgtgtgaacaagagaattggcaacctgcagacagacctgagtgatggcctgcggctgattgccctgctggaggtgctgagccagaagaggatgtacaggaagtaccaccagaggcccaccttccggcagatgcagctggagaatgtgtctgtggccctggagttcctggaccgggagagcatcaagctggtgtccattgacagcaaggccatcgtggatggcaacctgaagctgatcctgggcctggtgtggaccctcatcctgcactacagcatctccatgcctgtgtgggaggatgaaggagatgatgatgccaagaagcagacccccaagcagaggctgctgggctggatccagaacaagatcccctacctgcccatcaccaacttcaaccagaactggcaggacggcaaggccctgggcgccctggtggacagctgtgcccctggcctgtgcccagactgggagagctgggacccccagaagcctgtggacaatgcccgggaggccatgcagcaggctgatgactggctgggcgtgccccaggtgatcaccccagaggagatcatccacccagatgtggatgagcacagcgtgatgacctacctgagccagttccccaaggccaagctgaagccaggggcccccctgaagcccaagctgaaccccaagaaggcccgggcctacggccggggcatcgagcccactggaaacatggtgaagcagcctgccaagttcaccgtggacaccatctctgctggccagggagatgtgatggtgtttgtggaggaccctgagggcaacaaggaggaggcccaggtgaccccagacagcgacaagaacaagacctacagcgtggagtacctgcccaaggtgacaggcctgcacaaggtgacagtgctgtttgctggccagcacatcagcaagagcccctttgaggtgtctgtggacaaggcccagggagatgccagcaaggtgacagccaagggccctggcctggaggccgtgggcaacatcgccaacaagcccacctactttgacatctacacagctggggccggcgtgggggacattggagtggaggtggaggacccccagggcaagaacacagtggagctgctggtggaggacaagggcaaccaggtgtaccgctgtgtgtacaagcccatgcagcccggcccccacgtggtgaagatcttctttgctggggacaccatccccaagagcccctttgtggtgcaggtgggggaggcctgcaaccccaatgcctgccgggccagcggccggggcctgcagcccaagggcgtgcgcatccgggagaccacagacttcaaggtggacaccaaggccgccggcagcggggagctgggcgtgaccatgaagggccccaagggcctggaggagctggtgaagcagaaggacttcctggatggagtgtatgcctttgagtactaccccagcaccccaggccgctacagcatcgccatcacctggggcggccaccacatccccaagagcccctttgaggtgcaggtgggccctgaggccggcatgcagaaggtgcgggcctggggccctggcctgcacggcggcatcgtgggccgctctgctgactttgtggtggagagcatcggcagcgaggtgggcagcctgggctttgccatcgagggccccagccaggccaagattgagtacaatgaccagaatgatggcagctgtgatgtgaagtactggcccaaggagcctggagaatatgctgtgcacatcatgtgtgatgatgaggacatcaaggacagcccctacatggccttcatccacccagccaccggcggctacaacccagacctggtgcgggcctacggccctggcctggagaagagcggctgcatcgtgaacaacctggccgagttcaccgtggaccccaaggatgctgggaaggcccccctgaagatctttgcccaggatggagagggccagagaattgacatccagatgaagaacaggatggatggcacctacgcctgcagctacacccctgtgaaggccatcaagcacaccatcgctgtggtgtggggcggcgtgaacatcccccacagcccctacagagtgaacatcggccagggcagccacccccagaaggtgaaggtgtttggacctggggtggagaggagcggcctgaaggccaatgagcccacccacttcaccgtggactgcacagaggccggggagggagatgtgtctgtgggcatcaagtgtgatgcccgggtgctgtctgaagatgaagaagatgtggactttgacatcatccacaatgccaatgacaccttcaccgtgaagtatgtgcccccagctgctggccgctacaccatcaaggtgctgtttgccagccaggagatcccagccagccccttccgggtgaaggtggaccccagccatgatgccagcaaggtgaaggccgagggccctggcctgagcaaggccggcgtggagaatggcaagcccacccacttcaccgtgtacaccaagggagctgggaaggcccccctgaatgtgcagttcaacagccccctgcctggagatgctgtgaaggacctggacatcatcgacaactatgactacagccacacagtgaagtacacccccacccagcagggcaacatgcaggtgctggtgacctacggcggggaccccatccccaagagccccttcaccgtgggcgtggccgcccccctggacctgagcaagatcaagctgaatggcctggagaacagagtggaggtgggcaaggaccaggagttcaccgtggacaccagaggagctgggggccagggcaagctggatgtgaccatcctgagccccagcaggaaggtggtgccctgcctggtgacccctgtgacaggccgggagaacagcacagccaagttcatcccccgggaggagggcctgtatgctgtggatgtgacctatgatggccaccctgtgcccggcagcccctacacagtggaggccagcctgcccccagaccccagcaaggtgaaggcccacggccctggcctggagggcggcctggtgggcaagccagctgagttcaccatcgacaccaagggggccggcaccggcggcctgggcctgactgtggagggcccctgtgaggccaagattgagtgcagcgacaatggagatggcacctgcagcgtgtcctacctgcccaccaagccaggagagtactttgtgaacatcctgtttgaggaggtgcacatccctggcagccccttcaaggctgacatcgagatgccctttgaccccagcaaggtggtggccagcggccctggcctggagcacggcaaggtgggggaggccggcctgctgtctgtggactgcagcgaggccggccctggggccctgggcctggaggccgtgtctgacagcggcaccaaggccgaggtgtccatccagaacaacaaggatggcacctatgctgtgacctacgtgcccctgacagctggcatgtacaccctgaccatgaagtatggaggagagctggtgccccacttccctgcccgggtgaaggtggagcctgctgtggacaccagccgcatcaaggtgtttggacctggcatcgagggcaaggatgtgttccgggaggccaccacagacttcaccgtggacagccggcccctgacccaggtgggcggggaccacatcaaggcccacatcgccaaccccagcggggccagcacagaatgttttgtgacagacaatgctgatggcacctaccaggtggagtacaccccatttgagaagggcctgcacgtggtggaggtgacctatgatgatgtgcccatccccaacagccccttcaaggtggccgtgacagagggctgccagcccagccgggtgcaggcccagggccctggcctgaaggaggccttcaccaacaagcccaacgtgttcaccgtggtgaccaggggggccggcatcggcggcctgggcatcaccgtggagggccccagcgagagcaagatcaactgccgggacaacaaggatggcagctgcagcgctgagtacatcccctttgcccctggggactatgatgtgaacatcacctatggaggagcccacatccctggcagccccttccgggtgcctgtgaaggatgtggtggaccccagcaaggtgaagattgctggccctggcctgggcagcggcgtgcgggcccgggtgctgcagagcttcaccgtggacagcagcaaggccggcctggcccccctggaggtgcgggtgctgggcccccggggcctggtggagcctgtgaatgtggtggacaatggagatggcacccacacagtgacctacacccccagccaggagggcccctacatggtgtctgtgaagtatgcagatgaggagatccccaggagccccttcaaggtgaaggtgctgcccacctatgatgccagcaaggtgacagccagcggccctggcctgagcagctatggagtgcctgccagcctgcctgtggactttgccattgatgccagagatgctggggagggcctgctggccgtgcagatcacagaccaggagggcaagcccaagagggccatcgtgcatgacaacaaggatggcacctatgctgtgacctacatcccagacaagacaggccgctacatgattggagtgacctatggaggagatgacatccccctgagcccctaccgcatccgggccacccagacaggagatgccagcaagtgcctggccaccggccctggcatcgccagcacagtgaagacaggagaggaggtgggctttgtggtggatgccaagacagctgggaagggcaaggtgacctgcaccgtgctgaccccagatggaacagaggccgaggctgatgtgattgaaaatgaagatggcacctatgacatcttctacacagctgccaagccaggcacctacgtgatctacgtgcgctttggaggagtggacatccccaacagccccttcaccgtgatggtgacagaggaggcctacgtgcctgtgtctgacatgaatggcctgggcttcaagccctttgacctggtgatcccctttgctgtgaggaaaggagagatcactggagaggtgcacatgcccagcggcaagacagccaccccagagatcgtggacaacaaggatggcaccgtgacagtgcgctatgcccccacagaggtgggcctgcacgagatgcacatcaagtacatgggcagccacatccctgagagccccctgcagttctacgtgaactaccccaacagcggctctgtgtctgcctacggccctggcctggtgtatggagtggccaacaagacagccaccttcaccatcgtgacagaagatgctggggagggcggcctggacctggccatcgagggccccagcaaggccgagatcagctgcatcgacaacaaggatggcacctgcaccgtgacctacctgcccaccctgcccggggactacagcatcctggtgaagtacaatgacaagcacatccctggcagccccttcaccgccaagatcacagatgacagccgccgctgcagccaggtgaagctgggcagcgctgctgacttcctgctggacatcagcgagacagacctgagcagcctgacagccagcatcaaggcccccagcggcagagatgagccctgcctgctgaagaggctgcccaacaaccacatcggcatctccttcatcccccgggaggtgggggagcacctggtgtccatcaagaagaatggaaaccacgtggccaacagccctgtgtccatcatggtggtgcagagcgagattggagatgcccggcgggccaaggtgtatggccggggcctgtctgagggccgcacctttgagatgtctgacttcatcgtggacaccagagatgctggctacggcggcatcagcctggccgtggagggccccagcaaggtggacatccagacagaggacctggaggatggcacctgcaaggtgtcctacttccccaccgtgcctggggtgtacatcgtgtccaccaagtttgctgatgaacatgtgcccggcagccccttcaccgtgaagatcagcggggagggccgggtgaaggagagcatcaccaggaccagccgggcccccagcgtggccaccgtgggcagcatctgtgacctgaacctgaagatccctgagatcaacagcagtgacatgtctgcccacgtgaccagccccagcggccgggtgacagaagctgagatcgtgcccatgggcaagaacagccactgtgtgcgctttgtgccccaggagatgggcgtgcacacagtgtctgtgaagtaccggggccagcacgtgacaggcagccccttccagttcaccgtgggccccctgggggagggcggggcccacaaggtgcgggccggcggccctggcctggagcggggggaggccggcgtgcctgctgagttcagcatctggacccgggaggccggggccggcggcctgagcattgctgtggagggccccagcaaggccgagatcacctttgatgaccacaagaatggcagctgtggggtgtcctacatcgcccaggagcccggcaactatgaggtgtccatcaagttcaatgatgagcacatccctgagagcccctacctggtgcctgtgattgcccccagtgatgatgcccggcggctgactgtgatgagcctgcaggagagcggcctgaaggtgaaccagcctgccagctttgccatccggctgaatggagccaagggcaagattgatgccaaggtgcacagccccagcggggctgtggaggagtgccacgtgtctgagctggagccagacaagtatgctgtgcgcttcatcccccatgaaaatggagtgcacaccattgatgtgaagttcaacggcagccacgtggtgggcagccccttcaaggtgcgggtgggggagcccggccaggccggcaacccagccctggtgtctgcctacggcaccggcctggagggcggcaccaccggcatccagagcgagttcttcatcaacaccacccgggccggccctggcaccctgtctgtgaccatcgagggccccagcaaggtgaagatggactgccaggagaccccagagggctacaaggtgatgtacacccccatggcccctggcaactacctgatctctgtgaagtatggaggccccaaccacatcgtgggcagccccttcaaggccaaggtgacaggccagaggctggtgtccccaggcagcgccaatgagaccagcagcatcctggtggagagcgtgaccaggagcagcacagagacctgctacagcgccatccccaaggccagcagtgatgccagcaaggtgaccagcaagggggccggcctgagcaaggcctttgtgggccagaagagcagcttcctggtggactgcagcaaggccggcagcaacatgctgctgattggagtgcacggccccaccaccccctgtgaggaggtgtccatgaagcacgtgggcaaccagcagtacaacgtgacctacgtggtgaaggagcggggggactatgtgctggccgtgaagtggggcgaggagcacatccctggcagccccttccacgtgacagtgccctag

SEQ ID NO: 62703 - DNA, 7737 bp, Artificial Sequence
  derived and/or modified sequence
atgcccgtgaccgagaaggacctggccgaggacgccccctggaagaaaatccaacagaatactttcaccagatggtgtaacgagcacctgaagtgcgtgaataagaggatcggcaatctccagaccgacctatccgacggcttacggctgatcgcactgctggaggttctttctcagaagcggatgtatagaaagtatcaccagcgccccacgtttagacagatgcagttggagaatgtaagcgttgctctggagtttttggaccgggagtccataaaattggtgagcatagactctaaggcgatcgtcgacggtaacctgaaactgatcttaggactggtgtggacgcttatactgcactacagcatttcgatgccagtttgggaagatgaaggcgacgatgatgcaaaaaagcaaactcctaagcagcgactacttggttggattcagaacaagattccatatctgccgattacaaatttcaatcagaattggcaagatgggaaggcgttgggcgccctagtggacagttgcgctcccggactgtgtcctgactgggaatcctgggacccccagaagcctgtcgataatgcgagagaagccatgcaacaagccgacgactggcttggagtgccacaagtcattaccccggaggaaataattcaccccgacgtagacgaacatagtgtgatgacgtacctgagtcagttccccaaagcaaaactcaaacccggagctccactaaagcccaaacttaatcccaaaaaagctagagcatatggcagaggtatagagcctaccggtaacatggttaagcagccggccaagttcaccgtcgatactattagcgctggccagggcgatgtgatggtgttcgtggaggatccggaagggaataaagaggaagcgcaagtcacaccagactctgataaaaataaaacctacagtgtggaatacctacccaaggtgaccggtctgcacaaggtcacagtgctgttcgcaggtcagcacatatcgaaatctcccttcgaggtttcagtggataaggctcagggcgacgcctctaaggtaacggccaagggcccagggcttgaggccgtaggcaatattgctaacaaaccaacgtacttcgatatatacaccgcaggcgctggggtcggcgacatcggagtggaagtggaggacccacagggcaaaaatactgtggagctgcttgtggaagataaggggaatcaagtgtacaggtgcgtgtacaaaccaatgcagcctggtccacacgtggttaagatattctttgcgggcgacactatccctaaatccccttttgttgtgcaggtgggtgaagcttgtaatccaaacgcatgtcgcgcctcgggcagaggcttacagcctaagggggtgcggataagagagacaacagactttaaggttgataccaaggctgccggttctggagagctgggagtgactatgaaggggcctaagggcctcgaagagttggtgaagcaaaaggacttcctggatggagtttatgccttcgagtattaccctagcacccccgggaggtacagcatagctattacatggggcgggcatcacattcccaaaagccctttcgaggtgcaggtcggacctgaagccggcatgcagaaggtgcgagcttggggccccggcctccacgggggcattgtgggccgttcggcggattttgtggtggagtccattgggtcagaggtaggctctctgggtttcgccatagagggaccctctcaggcaaaaatcgagtacaacgatcagaatgacgggagctgcgatgttaagtattggcctaaagagcccggcgaatacgcagtacacattatgtgcgatgatgaggatattaaagactctccttatatggcatttattcatcccgcaaccgggggatacaaccccgacctcgtccgggcctatggaccaggcctggaaaagagtggatgtatcgtcaacaatctggccgagtttactgtggacccaaaggatgcaggaaaggctccgcttaaaatttttgcccaggatggcgaagggcaaagaatcgacatccaaatgaaaaaccggatggatggcacgtacgcctgttcatacacccctgtgaaggcaatcaagcacacaatcgctgttgtgtggggcggggtgaacatcccacactcgccttatagagtcaacattgggcagggatctcacccacagaaggtgaaggtttttgggcccggcgtggagcggtcgggtttgaaagccaacgagcctacacacttcacagtagactgtacagaggctggcgagggggacgtctcagttggaatcaaatgcgacgcaagggtgctcagcgaagatgaggaggatgtggactttgacatcattcacaacgccaacgatactttcacagtcaaatacgtccccccagccgccggaagatacactatcaaggtccttttcgcttcacaggagatacccgcgagcccgtttagggtcaaagtcgatccttcacatgacgcttctaaggtaaaggccgagggccccgggctcagcaaagccggcgtggaaaatggtaaaccaacacatttcaccgtgtacaccaaaggtgccggtaaagccccactgaatgtccagttcaacagtccactgcctggagatgcagtcaaagaccttgacataatcgataattatgattattcccacacagtgaagtatacacccacccagcagggaaatatgcaggtgctcgttacatacgggggcgacccaattcctaaatctcccttcactgtcggagtggccgcacctctcgatctgagcaaaataaagctaaatggcttagagaaccgggtggaggtgggcaaagaccaagaattcactgtcgataccaggggagcgggaggccaggggaaacttgacgtaacaattctgtctccttctcgcaaggtggtgccctgtttggttacgcctgttactggacgcgaaaactccactgcgaagtttataccccgggaggaggggctgtacgcagtcgacgtcacatatgatggacatccagttcccggcagtccatacaccgtggaagccagtctgccgcccgatccttcaaaggtcaaggcgcacggacccggcctcgaaggaggcctggtcggtaagccagccgaatttacgattgacaccaaaggagccggcaccgggggcctggggctcacagttgaagggccctgcgaggccaaaatcgagtgctcggacaacggtgatgggacttgcagcgtgtcatatctgcctaccaagcccggagagtacttcgtgaatattctgttcgaggaggtccatattcccggatcaccgttcaaggccgacatcgagatgccattcgatccctcaaaagtggttgcctcagggccagggctagaacacggcaaagtcggggaggccggtctcctctctgttgactgcagtgaggccggacctggtgctcttggtttagaagccgtctccgatagcgggacaaaggcagaagtgtcaattcagaataacaaagacggcacgtacgctgtgacatatgtgcccctcacggccgggatgtacacccttactatgaagtacgggggtgagctagtccctcatttccccgccagagtgaaggttgagccggcagtggacacatccaggatcaaggtttttggacctgggatcgaaggaaaagacgtatttagggaggccactacagattttaccgtcgacagtcgacccctaacacaggtgggcggagaccatatcaaggcccacattgccaatccgagcggcgcctcgactgagtgttttgtgactgacaacgcggacggaacgtaccaggtggagtatacacccttcgagaaaggactgcatgtggtggaggttacttacgacgacgtgccgattcccaatagcccttttaaggtggcagtcaccgaaggctgtcaaccttctagggtgcaggctcagggccccgggctcaaggaggcctttaccaataagcctaatgtttttactgtcgtcacaaggggggctgggattggcggcctcggtatcaccgtcgagggccctagcgagtctaaaatcaattgccgcgacaataaagatggatcatgtagcgccgaatatatcccctttgctcctggggactacgatgtgaatatcacatatggaggagcccatatccccggatcccctttccgtgtgcctgtgaaggacgtggtcgacccaagcaaagttaagatcgcagggcctgggctgggatcaggtgttcgcgcacgggtattacagtccttcactgtggacagcagcaaggcgggtcttgcccccctggaggtccgggtactcggccctcgtggactggtagagccggttaatgtggtcgataatggggatggaactcacactgttacatacacgccatctcaggagggcccttatatggtgtcagtaaagtacgccgacgaagagattccaaggagtccctttaaagttaaggttttaccaacctatgatgcctctaaagtgacagctagtggccctggcctgtctagctacggggtccccgctagcctaccagttgacttcgctattgatgctagggatgcaggggagggcctgctggccgttcagattaccgaccaggagggtaaacccaagcgggcaatcgtccacgataataaggacggaacatacgcagttacttatatacctgacaagacaggcaggtatatgatcggggtgacttatggcggcgatgacatccccctgtcaccttataggattcgtgctactcagaccggggacgctagtaaatgcctcgccactggcccgggaattgcctcgactgttaagacaggcgaagaagtgggcttcgtcgtagacgcaaaaaccgccggtaaggggaaggtcacatgcaccgttctgacccctgacggaaccgaggccgaagcagacgttatcgaaaatgaagacggcacgtatgatatcttctacacagccgctaaacccggcacctatgtgatatatgtccgatttggaggtgtcgatattcccaactcaccgttcaccgtgatggtgacagaggaagcctacgtccccgtgagcgacatgaacggcctgggattcaagccatttgatctggtgatcccattcgcagtgagaaagggcgagattactggggaagtgcacatgccttccgggaagactgcaacacccgagatcgtggataacaaggacggaaccgtcaccgttaggtacgcccccaccgaagtggggttgcacgaaatgcatataaagtacatgggatcacacatccccgaaagccctctgcagttctatgtcaattatcctaactccggatctgtctctgcctatgggccaggcctagtgtacggggtggcaaataagacggcaacgttcacaatcgttaccgaagacgccggcgaggggggtctggacctggcaattgaagggccaagcaaggcagagatctcttgcatcgacaataaggatggcacttgcacagtgacttaccttcccaccttgccaggcgattattccatacttgtcaagtacaatgacaagcacattcccggatcgcccttcacagccaagattaccgatgacagccggcgatgctcgcaggttaaactgggtagtgcggcggacttcctacttgatatctccgagacggacttgagctcactgactgcttccattaaggctcctagcggccgggatgagccttgtctgctaaagcgtcttcctaacaatcacatcggtatttcttttatcccacgggaggtcggagagcacctggtgagcatcaagaagaacggcaaccatgttgcgaactcacctgtttctatcatggtcgtgcaaagcgagattggcgacgccaggcgagctaaggtgtatggccgcgggctctccgaggggcgcaccttcgagatgtcagatttcattgtggatactcgtgatgctggttacggtggcattagcctggctgtagagggaccgagtaaggttgatattcagacagaggacctagaggacggaacgtgcaaggtctcgtattttcctacagtgcccggcgtttacatagtgtctaccaagtttgcagacgaacatgtacctggttcaccctttaccgtgaagatttcaggagagggacgcgtaaaagaatcaatcaccagaaccagccgagccccctccgtggccaccgttggttctatatgtgatctgaacctgaaaatcccggagataaacagttctgacatgtctgctcatgtcactagcccttcagggcgcgtgacagaggctgagatagtgccaatggggaagaacagccattgtgtaaggttcgtcccacaagagatgggggtgcacaccgtatcagttaagtaccgagggcagcacgtaactggcagccctttccagttcaccgtcggcccactaggagaaggcggggcacataaggtgagggccggagggcccggcctggagcgcggtgaggccggagttcctgctgagttcagcatttggacaagagaagccggagccggtgggctgagcattgcagtggagggcccatctaaggccgagatcactttcgatgatcacaagaatggcagctgcggcgttagctacattgcgcaggaaccaggcaattatgaggtctccatcaagtttaacgatgaacatatcccggaaagtccatatttggtgccagttatcgcacctagcgacgacgctcgtaggctgaccgtcatgagcttacaggagtcagggctcaaggttaatcagcctgccagtttcgccattcgccttaatggagcaaaaggaaaaattgacgctaaagttcacagccccagtggggctgtggaagagtgtcacgttagtgagctggaacctgataaatatgccgtgcggttcatccctcatgaaaatggtgtgcacactattgacgttaaatttaatgggagccatgtggtgggttcaccatttaaggtgcgtgtgggggaacccggccaggcgggcaaccccgccctggtgtcagcctatgggacaggcctagaggggggaactaccggtattcaatctgagttctttatcaacacaactagggccggcccagggaccctgagcgtgaccatagaggggcctagtaaggtcaaaatggactgtcaggagacacctgaagggtacaaggtgatgtatacaccgatggcccccggaaactacttgatcagcgttaaatatggaggccccaaccacatcgtggggagccctttcaaggccaaggttacggggcagaggctggtctcccccggcagtgctaatgaaacatcatctatcctggtcgagagtgtcacaaggagttctacagaaacctgttattcggctatccccaaagccagctccgatgcctccaaggtgacctctaagggagctggtctgtccaaggcctttgtggggcaaaaatcttcctttcttgtagactgctccaaggccgggtctaacatgctgcttatcggggtccacggtcctactacaccttgtgaagaagtttctatgaagcacgtcggcaaccaacagtataatgtgacttatgtcgtgaaagaacggggggattatgtgctggccgtaaaatggggggaggagcacattcccggatcccccttccacgtgactgtgccctag

SEQ ID NO: 62704 - DNA, 7736 bp, Artificial Sequence
  derived and/or modified sequence
atgcctgtcacagaaaaggacttagccgaggatgcgccttggaagaaaatccaacagaataccttcacacgctggtgtaatgagcatctcaagtgtgtaaataagaggattggaaacctgcagactgacctctccgacgggctccggttaatcgccctgctggaagttctatcccagaagaggatgtatcgtaagtaccatcagcgcccaacctttcgccagatgcagctggaaaatgtgtcagtcgctcttgagttcctcgacagagaatctatcaaactggtcagtattgactccaaagcaattgtggacggtaatctgaagctcatcttgggtttggtgtggaccctgatcttacactatagtatcagcatgcctgtctgggaagatgagggtgatgatgatgccaaaaagcagacgccaaagcagcggctgctgggatggatccagaataaaattccttacctcccaatcaccaatttcaaccaaaactggcaggacggcaaggctctgggggctcttgtggatagctgcgcccctggcttgtgcccagattgggagagttgggacccgcagaagcctgtggacaacgcccgagaggctatgcaacaggcagacgattggttaggagtaccacaggttatcactcccgaggaaattatacaccctgatgtagatgaacactctgtgatgacctacctgtctcaatttcctaaagcgaagctcaaacccggtgcacctctgaaacctaagttaaaccccaaaaaggcgagggcttacgggagggggatagagccaactggcaacatggtcaaacaaccagcgaaattcactgtggacacaatttctgctggacagggtgatgtcatggtcttcgtggaggaccccgagggaaataaagaggaggcccaggtgacccccgactcagataaaaataagacttactcagtggagtatctgcccaaagtgacgggacttcacaaggtgactgtgctgtttgctgggcagcacataagtaaatctccctttgaggtatctgtggacaaggctcagggggacgcctccaaggtgacagctaagggaccagggctagaggccgtgggaaacattgccaacaaaccaacctacttcgacatttataccgccggtgctggcgtcggcgacatcggtgtcgaggtggaagatccccagggcaagaacacagtagagctgctggtggaggacaaaggcaatcaagtgtatagatgtgtctataagcctatgcagcccggtccacacgtggtgaaaattttttttgccggtgatacaattcctaagtctccttttgtcgttcaagtcggggaggcctgtaacccaaacgcctgccgggctagcgggagaggattgcagcctaaaggcgtccgaattagggagaccaccgactttaaggtcgatacaaaggctgccggaagcggagagctaggcgttaccatgaaaggccctaaaggcctggaagaactggtgaagcagaaggatttcctggatggcgtgtacgccttcgagtactacccctcaacacccggtcggtattcaatagcgattacatggggcggacaccacatcccgaaatctccgttcgaggtgcaggtagggccagaagcgggtatgcaaaaggtgagggcctgggggccagggctccatggtggaatcgttggaagatcagctgattttgtggtggagagtatcggaagtgaagttggctccctcggtttcgcaatcgaaggaccttcacaggcgaagatcgaatataacgatcagaacgacgggagttgtgacgtgaagtactggcctaaggaacccggagagtacgccgttcacataatgtgcgatgatgaggacatcaaggacagtccatacatggcatttatccatcccgctaccggaggatataatcctgacctcgtgagagcttatggtccgggtttggagaagagcggctgcattgttaacaatttggcggaattcacagttgaccctaaggatgcaggtaaggccccactgaagatttttgcccaggatggggaggggcaacgtatagacatccaaatgaaaaaccgaatggacggcacatacgcctgttcgtacacccctgtgaaggccatcaaacacacgattgcagtggtgtggggcggagtgaacatcccacattccccctaccgggtaaacatcggacagggaagccatcctcagaaggttaaggtgttcgggccaggggtcgagaggagtgggttgaaagcaaatgaacccacacactttacggtggactgcactgaggctggggagggcgacgtttccgtcgggattaagtgcgacgccagggtcctgtccgaagatgaggaggatgttgatttcgacataattcataatgcaaacgacacattcaccgttaagtacgtgccccctgccgctggcaggtatacaataaaagttctctttgcgtcccaagaaatcccagcaagccccttccgcgtaaaggtagaccctagccatgatgcgtctaaggtgaaggccgagggtcccggactgtctaaggcgggtgtggagaacgggaagcccactcactttacagtctatacaaaaggggctggaaaagcgccactcaacgtacagttcaattcacccttgcctggtgacgccgtgaaagaccttgacataatcgacaattacgattactctcacaccgtgaagtatacgcccacacagcaggggaatatgcaggtgctggtaacatatggaggcgaccctattcctaaatcaccctttactgtcggtgtggctgccccactggacctctccaaaatcaaactgaacgggctcgaaaatagagtggaagtcggaaaggatcaggaattcacagttgacaccaggggggctggagggcagggcaagctggacgttacaattttatcacccagccggaaggtggtaccatgcctggtgactcctgtgaccggcagggaaaactcaacagccaaatttatcccaagagaagaaggcttatacgccgtggacgtcacttacgacggccaccctgtgcctggatctccatatactgtggaggcgagcctgcctccagatccctcaaaagtgaaagcccacgggcctggccttgaagggggattagtcggcaagcccgctgagttcactattgacaccaaaggagcaggtacaggtggattagggctcaccgtggaagggccttgcgaagccaagattgagtgctctgataacggcgatggaacatgtagcgtctcctatctgcctaccaagcctggcgaatacttcgtgaatattttattcgaggaggtccacataccaggcagccccttcaaggcagatattgagatgccatttgatccttccaaagtggtcgccagcggtccagggctcgaacatggcaaagtcggggaggccggactcctctctgtcgactgtagcgaggccggacccggagccctggggttagaggccgtcagcgacagcggaaccaaagcggaggtcagcatccagaacaacaaagacggtacttatgctgttacctatgtcccgctcaccgctggaatgtacacacttacaatgaagtacggtggtgagctggtgccccatttccctgcccgtgttaaagtagaacctgctgttgacacctcaagaataaaagtgttcgggcctgggatcgaaggcaaggatgtgtttagagaggccacgacggattttaccgtcgatagcaggcctttgacccaagtcggtggagatcatatcaaagctcacatcgccaatccgtccggcgcatctacagagtgtttcgtgaccgataacgctgatggcacttatcaggtggagtatacaccattcgaaaaaggcctacatgtggtagaagtcacttacgacgacgtgccaatccccaactcaccttttaaagtggcggtgacagagggttgccaaccttcccgcgttcaggcccagggccctggcctgaaggaggcctttaccaacaaaccaaacgtcttcaccgttgtgactagaggtgctggcattgggggtctggggatcacagtcgagggcccttccgagtccaaaattaactgtcgagataacaaagatggcagttgctctgcggaatacatcccgttcgcccctggcgactacgacgtgaacattacctacggtggagcacacatacctggctcccctttccgcgtgcctgttaaagatgtggttgatcccagcaaagtcaagatcgccggtccgggtctgggatctggtgttcgtgccagagtcttgcagtcgttcaccgtggatagttccaaagccggactcgcccctctggaagtgagggtgttgggaccccgaggcttagtcgagccagtgaatgtcgttgataatggggacggaacccacacagtaacttacacgcctagccaagaaggcccttacatggtaagcgtgaagtacgctgacgaggaaatccccagatcacctttcaaagtgaaagttttaccgacttatgatgcaagtaaggtgacagcgagcggtcctggtttatcttcctacggggtaccagcctccctgccggttgacttcgccatcgacgcacgggatgctggcgaaggcctactggccgtgcagattaccgaccaagaaggtaaacctaaacgagcaatagtacatgataataaagatgggacttacgccgtgacctacatacccgataagactggtcggtatatgatcggcgtgacttatggaggggacgatatcccactcagcccttatcgtatcagagcaacacagacaggcgatgcctcaaagtgcctggccacaggacccggtatcgccagcactgtcaaaacaggtgaagaggtgggtttcgtcgtggacgcaaaaacggctggtaaggggaaagtgacctgcaccgttcttacacccgacggaaccgaggccgaagccgatgtgattgagaatgaagatggaacatacgatattttctacactgctgcgaagccgggaacctatgtcatctatgttagatttggaggtgtcgatatccctaactctccttttactgtgatggtaacagaggaggcatacgttcccgtctccgatatgaacggccttggcttcaagccattcgatctggttatccctttcgccgtgagaaagggtgagattaccggcgaggttcatatgccatcagggaagacagctacccctgagatcgtcgacaacaaagacggtaccgtgacagtccggtatgcccctacggaagtgggcctccacgaaatgcacataaagtatatgggctcccacattcctgaatccccactccagttctatgtgaactaccctaactccggctcagtttcagcttacggacccggactggtgtatggcgttgcgaacaaaactgctacttttactatcgtcaccgaggatgctggggagggtggcctggatctggcaattgaaggaccaagtaaggctgaaattagttgtatcgacaacaaagatgggacctgtacggtcacctacctgccgacactgcctggagactacagcatcctggtgaaatataatgataagcacattccaggaagcccattcaccgctaagattaccgatgacagccgcagatgctcccaagtcaaactgggctccgccgctgacttcctgctggatatctcagagacagatctatcatcgctcacggcttccatcaaagcacctagcgggagggatgagccgtgcctacttaagaggcttcccaacaatcatatcggtatttcttttatcccgagggaagtgggcgagcatctggtatcaattaagaaaaacggtaaccacgtggccaattccccggtctctatcatggtggttcagagcgagatcggggatgcccgacgggctaaggtctatgggcgagggctgagtgaggggagaaccttcgagatgagcgatttcatagtggatacaagggatgcaggctatgggggaatttccttggccgtggagggcccttccaaagtagatattcagacagaggacttggaggatggaacatgcaaggtgtcgtacttcccaaccgtgcccggagtgtacatagtttcaactaaattcgctgatgaacacgtcccgggtagtcctttcacagtgaaaatatccggggagggacgggttaaggaaagcataacacgcaccagcagggctcctagtgtggcaaccgtcggaagcatatgtgacttaaatctgaagattccagagatcaattcctctgacatgtctgcacatgtgacctcacccagcggacgcgttactgaagccgagattgttccgatgggaaaaaacagccactgcgttagatttgtgccccaggagatgggggtgcacaccgtttcggttaaataccggggtcagcatgtgactggttccccttttcaattcactgtcgggcctctgggggagggaggcgcacataaggtgcgagcaggtggccctggtttagaaagaggagaggccggagttcctgccgagttctctatctggacgagggaggccggtgcgggaggactgtccatagccgtggaaggcccatctaaagctgaaatcacctttgacgatcataagaatggcagctgcggggtctcttatatcgctcaggaacctgggaattacgaggtatcaatcaagttcaacgacgaacatatccctgagtccccttacctggtaccagtgatagccccttccgatgacgcaaggcggcttacggtcatgagtctgcaggagagcggactcaaggttaaccagccggctagtttcgctatacgcctcaacggcgcaaaggggaagattgacgctaaggtccactctccatctggagctgtcgaggagtgtcatgtttctgaattagagccggataagtacgcagtccgcttcatcccccatgaaaacggcgttcatacaatagacgtcaagttcaatggtagccacgtcgtgggaagtcccttcaaagttagagtcggcgaacccggtcaggccggaaaccccgcactggtgtcagcttatgggactggtctggaaggagggacaacaggtatccagagtgagttttttataaatactacaagagccggaccgggtaccctcagcgttacaattgaaggaccatctaaggtaaagatggactgccaagaaactccggagggctacaaggtcatgtatactcccatggccccaggcaattacctaatttccgtgaaatatggcggtccaaatcacatagtcggaagcccgttcaaagctaaggttacgggtcaacgccttgtgtctccaggaagcgctaatgagactagcagcatattggtggaatcagttactagatcctctacagagacttgttattctgccatcccaaaggcttcaagcgatgcttctaaagtgacctctaagggtgccggtctctctaaagcctttgtaggccagaagtctagtttcctggtcgattgcagcaaggccggaagcaacatgttgctcatcggggtgcacgggccaactacaccctgtgaggaggtgagcatgaagcacgtggggaaccagcagtacaacgttacctacgtggtgaaagagcgtggagactacgtcttagccgtgaaatggggagaagaacatatcccaggtagtccatttcatgtgacagtcccata

SEQ ID NO: 62705 - DNA, 7737 bp, Artificial Sequence
  derived and/or modified sequence
atgcccgtgaccgagaaggacctggccgaggacgccccctggaagaagatccagcagaacaccttcaccagatggtgcaacgagcacctgaagtgcgtgaacaagagaatcggcaacctgcagaccgacctgagcgacggcctgagactgatcgccctgctggaggtgctgagccagaagagaatgtacagaaagtaccaccagagacccaccttcagacagatgcagctggagaacgtgagcgtggccctggagttcctggacagagagagcatcaagctggtgagcatcgacagcaaggccatcgtggacggcaacctgaagctgatcctgggcctggtgtggaccctgatcctgcactacagcatcagcatgcccgtgtgggaggacgagggcgacgacgacgccaagaagcagacccccaagcagagactgctgggctggatccagaacaagatcccctacctgcccatcaccaacttcaaccagaactggcaggacggcaaggccctgggcgccctggtggacagctgcgcccccggcctgtgccccgactgggagagctgggacccccagaagcccgtggacaacgccagagaggccatgcagcaggccgacgactggctgggcgtgccccaggtgatcacccccgaggagatcatccaccccgacgtggacgagcacagcgtgatgacctacctgagccagttccccaaggccaagctgaagcccggcgcccccctgaagcccaagctgaaccccaagaaggccagagcctacggcagaggcatcgagcccaccggcaacatggtgaagcagcccgccaagttcaccgtggacaccatcagcgccggccagggcgacgtgatggtgttcgtggaggaccccgagggcaacaaggaggaggcccaggtgacccccgacagcgacaagaacaagacctacagcgtggagtacctgcccaaggtgaccggcctgcacaaggtgaccgtgctgttcgccggccagcacatcagcaagagccccttcgaggtgagcgtggacaaggcccagggcgacgccagcaaggtgaccgccaagggccccggcctggaggccgtgggcaacatcgccaacaagcccacctacttcgacatctacaccgccggcgccggcgtgggcgacatcggcgtggaggtggaggacccccagggcaagaacaccgtggagctgctggtggaggacaagggcaaccaggtgtacagatgcgtgtacaagcccatgcagcccggcccccacgtggtgaagatcttcttcgccggcgacaccatccccaagagccccttcgtggtgcaggtgggcgaggcctgcaaccccaacgcctgcagagccagcggcagaggcctgcagcccaagggcgtgagaatcagagagaccaccgacttcaaggtggacaccaaggccgccggcagcggcgagctgggcgtgaccatgaagggccccaagggcctggaggagctggtgaagcagaaggacttcctggacggcgtgtacgccttcgagtactaccccagcacccccggcagatacagcatcgccatcacctggggcggccaccacatccccaagagccccttcgaggtgcaggtgggccccgaggccggcatgcagaaggtgagagcctggggccccggcctgcacggcggcatcgtgggcagaagcgccgacttcgtggtggagagcatcggcagcgaggtgggcagcctgggcttcgccatcgagggccccagccaggccaagatcgagtacaacgaccagaacgacggcagctgcgacgtgaagtactggcccaaggagcccggcgagtacgccgtgcacatcatgtgcgacgacgaggacatcaaggacagcccctacatggccttcatccaccccgccaccggcggctacaaccccgacctggtgagagcctacggccccggcctggagaagagcggctgcatcgtgaacaacctggccgagttcaccgtggaccccaaggacgccggcaaggcccccctgaagatcttcgcccaggacggcgagggccagagaatcgacatccagatgaagaacagaatggacggcacctacgcctgcagctacacccccgtgaaggccatcaagcacaccatcgccgtggtgtggggcggcgtgaacatcccccacagcccctacagagtgaacatcggccagggcagccacccccagaaggtgaaggtgttcggccccggcgtggagagaagcggcctgaaggccaacgagcccacccacttcaccgtggactgcaccgaggccggcgagggcgacgtgagcgtgggcatcaagtgcgacgccagagtgctgagcgaggacgaggaggacgtggacttcgacatcatccacaacgccaacgacaccttcaccgtgaagtacgtgccccccgccgccggcagatacaccatcaaggtgctgttcgccagccaggagatccccgccagccccttcagagtgaaggtggaccccagccacgacgccagcaaggtgaaggccgagggccccggcctgagcaaggccggcgtggagaacggcaagcccacccacttcaccgtgtacaccaagggcgccggcaaggcccccctgaacgtgcagttcaacagccccctgcccggcgacgccgtgaaggacctggacatcatcgacaactacgactacagccacaccgtgaagtacacccccacccagcagggcaacatgcaggtgctggtgacctacggcggcgaccccatccccaagagccccttcaccgtgggcgtggccgcccccctggacctgagcaagatcaagctgaacggcctggagaacagagtggaggtgggcaaggaccaggagttcaccgtggacaccagaggcgccggcggccagggcaagctggacgtgaccatcctgagccccagcagaaaggtggtgccctgcctggtgacccccgtgaccggcagagagaacagcaccgccaagttcatccccagagaggagggcctgtacgccgtggacgtgacctacgacggccaccccgtgcccggcagcccctacaccgtggaggccagcctgccccccgaccccagcaaggtgaaggcccacggccccggcctggagggcggcctggtgggcaagcccgccgagttcaccatcgacaccaagggcgccggcaccggcggcctgggcctgaccgtggagggcccctgcgaggccaagatcgagtgcagcgacaacggcgacggcacctgcagcgtgagctacctgcccaccaagcccggcgagtacttcgtgaacatcctgttcgaggaggtgcacatccccggcagccccttcaaggccgacatcgagatgcccttcgaccccagcaaggtggtggccagcggccccggcctggagcacggcaaggtgggcgaggccggcctgctgagcgtggactgcagcgaggccggccccggcgccctgggcctggaggccgtgagcgacagcggcaccaaggccgaggtgagcatccagaacaacaaggacggcacctacgccgtgacctacgtgcccctgaccgccggcatgtacaccctgaccatgaagtacggcggcgagctggtgccccacttccccgccagagtgaaggtggagcccgccgtggacaccagcagaatcaaggtgttcggccccggcatcgagggcaaggacgtgttcagagaggccaccaccgacttcaccgtggacagcagacccctgacccaggtgggcggcgaccacatcaaggcccacatcgccaaccccagcggcgccagcaccgagtgcttcgtgaccgacaacgccgacggcacctaccaggtggagtacacccccttcgagaagggcctgcacgtggtggaggtgacctacgacgacgtgcccatccccaacagccccttcaaggtggccgtgaccgagggctgccagcccagcagagtgcaggcccagggccccggcctgaaggaggccttcaccaacaagcccaacgtgttcaccgtggtgaccagaggcgccggcatcggcggcctgggcatcaccgtggagggccccagcgagagcaagatcaactgcagagacaacaaggacggcagctgcagcgccgagtacatccccttcgcccccggcgactacgacgtgaacatcacctacggcggcgcccacatccccggcagccccttcagagtgcccgtgaaggacgtggtggaccccagcaaggtgaagatcgccggccccggcctgggcagcggcgtgagagccagagtgctgcagagcttcaccgtggacagcagcaaggccggcctggcccccctggaggtgagagtgctgggccccagaggcctggtggagcccgtgaacgtggtggacaacggcgacggcacccacaccgtgacctacacccccagccaggagggcccctacatggtgagcgtgaagtacgccgacgaggagatccccagaagccccttcaaggtgaaggtgctgcccacctacgacgccagcaaggtgaccgccagcggccccggcctgagcagctacggcgtgcccgccagcctgcccgtggacttcgccatcgacgccagagacgccggcgagggcctgctggccgtgcagatcaccgaccaggagggcaagcccaagagagccatcgtgcacgacaacaaggacggcacctacgccgtgacctacatccccgacaagaccggcagatacatgatcggcgtgacctacggcggcgacgacatccccctgagcccctacagaatcagagccacccagaccggcgacgccagcaagtgcctggccaccggccccggcatcgccagcaccgtgaagaccggcgaggaggtgggcttcgtggtggacgccaagaccgccggcaagggcaaggtgacctgcaccgtgctgacccccgacggcaccgaggccgaggccgacgtgatcgagaacgaggacggcacctacgacatcttctacaccgccgccaagcccggcacctacgtgatctacgtgagattcggcggcgtggacatccccaacagccccttcaccgtgatggtgaccgaggaggcctacgtgcccgtgagcgacatgaacggcctgggcttcaagcccttcgacctggtgatccccttcgccgtgagaaagggcgagatcaccggcgaggtgcacatgcccagcggcaagaccgccacccccgagatcgtggacaacaaggacggcaccgtgaccgtgagatacgcccccaccgaggtgggcctgcacgagatgcacatcaagtacatgggcagccacatccccgagagccccctgcagttctacgtgaactaccccaacagcggcagcgtgagcgcctacggccccggcctggtgtacggcgtggccaacaagaccgccaccttcaccatcgtgaccgaggacgccggcgagggcggcctggacctggccatcgagggccccagcaaggccgagatcagctgcatcgacaacaaggacggcacctgcaccgtgacctacctgcccaccctgcccggcgactacagcatcctggtgaagtacaacgacaagcacatccccggcagccccttcaccgccaagatcaccgacgacagcagaagatgcagccaggtgaagctgggcagcgccgccgacttcctgctggacatcagcgagaccgacctgagcagcctgaccgccagcatcaaggcccccagcggcagagacgagccctgcctgctgaagagactgcccaacaaccacatcggcatcagcttcatccccagagaggtgggcgagcacctggtgagcatcaagaagaacggcaaccacgtggccaacagccccgtgagcatcatggtggtgcagagcgagatcggcgacgccagaagagccaaggtgtacggcagaggcctgagcgagggcagaaccttcgagatgagcgacttcatcgtggacaccagagacgccggctacggcggcatcagcctggccgtggagggccccagcaaggtggacatccagaccgaggacctggaggacggcacctgcaaggtgagctacttccccaccgtgcccggcgtgtacatcgtgagcaccaagttcgccgacgagcacgtgcccggcagccccttcaccgtgaagatcagcggcgagggcagagtgaaggagagcatcaccagaaccagcagagcccccagcgtggccaccgtgggcagcatctgcgacctgaacctgaagatccccgagatcaacagcagcgacatgagcgcccacgtgaccagccccagcggcagagtgaccgaggccgagatcgtgcccatgggcaagaacagccactgcgtgagattcgtgccccaggagatgggcgtgcacaccgtgagcgtgaagtacagaggccagcacgtgaccggcagccccttccagttcaccgtgggccccctgggcgagggcggcgcccacaaggtgagagccggcggccccggcctggagagaggcgaggccggcgtgcccgccgagttcagcatctggaccagagaggccggcgccggcggcctgagcatcgccgtggagggccccagcaaggccgagatcaccttcgacgaccacaagaacggcagctgcggcgtgagctacatcgcccaggagcccggcaactacgaggtgagcatcaagttcaacgacgagcacatccccgagagcccctacctggtgcccgtgatcgcccccagcgacgacgccagaagactgaccgtgatgagcctgcaggagagcggcctgaaggtgaaccagcccgccagcttcgccatcagactgaacggcgccaagggcaagatcgacgccaaggtgcacagccccagcggcgccgtggaggagtgccacgtgagcgagctggagcccgacaagtacgccgtgagattcatcccccacgagaacggcgtgcacaccatcgacgtgaagttcaacggcagccacgtggtgggcagccccttcaaggtgagagtgggcgagcccggccaggccggcaaccccgccctggtgagcgcctacggcaccggcctggagggcggcaccaccggcatccagagcgagttcttcatcaacaccaccagagccggccccggcaccctgagcgtgaccatcgagggccccagcaaggtgaagatggactgccaggagacccccgagggctacaaggtgatgtacacccccatggcccccggcaactacctgatcagcgtgaagtacggcggccccaaccacatcgtgggcagccccttcaaggccaaggtgaccggccagagactggtgagccccggcagcgccaacgagaccagcagcatcctggtggagagcgtgaccagaagcagcaccgagacctgctacagcgccatccccaaggccagcagcgacgccagcaaggtgaccagcaagggcgccggcctgagcaaggccttcgtgggccagaagagcagcttcctggtggactgcagcaaggccggcagcaacatgctgctgatcggcgtgcacggccccaccaccccctgcgaggaggtgagcatgaagcacgtgggcaaccagcagtacaacgtgacctacgtggtgaaggagagaggcgactacgtgctggccgtgaagtggggcgaggagcacatccccggcagccccttccacgtgaccgtgccctag

SEQ ID NO: 62706 - protein, 866 aa, Artificial Sequence
  derived and/or modified sequence
MATGTGKHKLLSTGPTEPWSIREKLCLASSVMRSGDQNWVSVSRAIKPFAEPGRPPDWFSQKHCASQYSELLETTETPKRKRGEKGEVVETVEDVIVRKLTAERVEELKKVIKETQERYRRLKRDAELIQAGHMDSRLDELCNDIATKKKLEEEEAEVKRKATDAAYQARQAVKTPPRRLPTVMVRSPIDSASPGGDYPLGDLTPTTMEEATSGVTPGTLPSTPVTSFPGIPDTLPPGSAPLEAPMTPVTDDSPQKKMLGQKATPPPSPLLSELLKKGSLLPTSPRLVNESEMAVASGHLNSTGVLLEVGGVLPMIHGGEIQQTPNTVAASPAASVSQPDNCVPMEAVGDPHTVTVSMDSSEISMIINSIKEECFRSGVAEAPVGSKAPSIDGKEELDLAEKMDIAVSYTGEELDFETVGDIIAIIEDKVDDHPEVLDVAAVEAALSFCEENDDPQSLPGPWEHPIQQERDKPVPLPAPEMTVKQERLDFEETENKGIHELVDIREPSAEIKVEPAEPEPVISGAEIVAGVVPATSMEPPELRSQDLDEELGSTAAGEIVEADVAIGKGDETPLTNVKTEASPESMLSPSHGSNPIEDPLEAETQHKFEMSDSLKEESGTIFGSQIKDAPGEDEEEDGVSEAASLEEPKEEDQGEGYLSEMDNEPPVSESDDGFSIHNATLQSHTLADSIPSSPASSQFSVCSEDQEAIQAQKIWKKAIMLVWRAAANHRYANVFLQPVTDDIAPGYHSIVQRPMDLSTIKKNIENGLIRSTAEFQRDIMLMFQNAVMYNSSDHDVYHMAVEMQRDVLEQIQQFLATQLIMQTSESGISAKSLRGRDSTRKQDASEKDGGTRGRRCAIEADMKMKK

SEQ ID NO: 62707 - protein, 861 aa, Artificial Sequence
  derived and/or modified sequence
GKHKLLSTGPTEPWSIREKLCLASSVMRSGDQNWVSVSRAIKPFAEPGRPPDWFSQKHCASQYSELLETTETPKRKRGEKGEVVETVEDVIVRKLTAERVEELKKVIKETQERYRRLKRDAELIQAGHMDSRLDELCNDIATKKKLEEEEAEVKRKATDAAYQARQAVKTPPRRLPTVMVRSPIDSASPGGDYPLGDLTPTTMEEATSGVTPGTLPSTPVTSFPGIPDTLPPGSAPLEAPMTPVTDDSPQKKMLGQKATPPPSPLLSELLKKGSLLPTSPRLVNESEMAVASGHLNSTGVLLEVGGVLPMIHGGEIQQTPNTVAASPAASVSQPDNCVPMEAVGDPHTVTVSMDSSEISMIINSIKEECFRSGVAEAPVGSKAPSIDGKEELDLAEKMDIAVSYTGEELDFETVGDIIAIIEDKVDDHPEVLDVAAVEAALSFCEENDDPQSLPGPWEHPIQQERDKPVPLPAPEMTVKQERLDFEETENKGIHELVDIREPSAEIKVEPAEPEPVISGAEIVAGVVPATSMEPPELRSQDLDEELGSTAAGEIVEADVAIGKGDETPLTNVKTEASPESMLSPSHGSNPIEDPLEAETQHKFEMSDSLKEESGTIFGSQIKDAPGEDEEEDGVSEAASLEEPKEEDQGEGYLSEMDNEPPVSESDDGFSIHNATLQSHTLADSIPSSPASSQFSVCSEDQEAIQAQKIWKKAIMLVWRAAANHRYANVFLQPVTDDIAPGYHSIVQRPMDLSTIKKNIENGLIRSTAEFQRDIMLMFQNAVMYNSSDHDVYHMAVEMQRDVLEQIQQFLATQLIMQTSESGISAKSLRGRDSTRKQDASEKDGGTRGRRCAIEADMKMKK

SEQ ID NO: 62708 - DNA, 2601 bp, Artificial Sequence
  derived and/or modified sequence
atggccaccggcaccggcaagcacaagctgctgagcaccggccccaccgagccctggagcatcagagagaagctgtgcctggccagcagcgtgatgagaagcggcgaccagaactgggtgagcgtgagcagagccatcaagcccttcgccgagcccggcagaccccccgactggttcagccagaagcactgcgccagccagtacagcgagctgctggagaccaccgagacccccaagagaaagagaggcgagaagggcgaggtggtggagaccgtggaggacgtgatcgtgagaaagctgaccgccgagagagtggaggagctgaagaaggtgatcaaggagacccaggagagatacagaagactgaagagagacgccgagctgatccaggccggccacatggacagcagactggacgagctgtgcaacgacatcgccaccaagaagaagctggaggaggaggaggccgaggtgaagagaaaggccaccgacgccgcctaccaggccagacaggccgtgaagaccccccccagaagactgcccaccgtgatggtgagaagccccatcgacagcgccagccccggcggcgactaccccctgggcgacctgacccccaccaccatggaggaggccaccagcggcgtgacccccggcaccctgcccagcacccccgtgaccagcttccccggcatccccgacaccctgccccccggcagcgcccccctggaggcccccatgacccccgtgaccgacgacagcccccagaagaagatgctgggccagaaggccacccccccccccagccccctgctgagcgagctgctgaagaagggcagcctgctgcccaccagccccagactggtgaacgagagcgagatggccgtggccagcggccacctgaacagcaccggcgtgctgctggaggtgggcggcgtgctgcccatgatccacggcggcgagatccagcagacccccaacaccgtggccgccagccccgccgccagcgtgagccagcccgacaactgcgtgcccatggaggccgtgggcgacccccacaccgtgaccgtgagcatggacagcagcgagatcagcatgatcatcaacagcatcaaggaggagtgcttcagaagcggcgtggccgaggcccccgtgggcagcaaggcccccagcatcgacggcaaggaggagctggacctggccgagaagatggacatcgccgtgagctacaccggcgaggagctggacttcgagaccgtgggcgacatcatcgccatcatcgaggacaaggtggacgaccaccccgaggtgctggacgtggccgccgtggaggccgccctgagcttctgcgaggagaacgacgacccccagagcctgcccggcccctgggagcaccccatccagcaggagagagacaagcccgtgcccctgcccgcccccgagatgaccgtgaagcaggagagactggacttcgaggagaccgagaacaagggcatccacgagctggtggacatcagagagcccagcgccgagatcaaggtggagcccgccgagcccgagcccgtgatcagcggcgccgagatcgtggccggcgtggtgcccgccaccagcatggagccccccgagctgagaagccaggacctggacgaggagctgggcagcaccgccgccggcgagatcgtggaggccgacgtggccatcggcaagggcgacgagacccccctgaccaacgtgaagaccgaggccagccccgagagcatgctgagccccagccacggcagcaaccccatcgaggaccccctggaggccgagacccagcacaagttcgagatgagcgacagcctgaaggaggagagcggcaccatcttcggcagccagatcaaggacgcccccggcgaggacgaggaggaggacggcgtgagcgaggccgccagcctggaggagcccaaggaggaggaccagggcgagggctacctgagcgagatggacaacgagccccccgtgagcgagagcgacgacggcttcagcatccacaacgccaccctgcagagccacaccctggccgacagcatccccagcagccccgccagcagccagttcagcgtgtgcagcgaggaccaggaggccatccaggcccagaagatctggaagaaggccatcatgctggtgtggagagccgccgccaaccacagatacgccaacgtgttcctgcagcccgtgaccgacgacatcgcccccggctaccacagcatcgtgcagagacccatggacctgagcaccatcaagaagaacatcgagaacggcctgatcagaagcaccgccgagttccagagagacatcatgctgatgttccagaacgccgtgatgtacaacagcagcgaccacgacgtgtaccacatggccgtggagatgcagagagacgtgctggagcagatccagcagttcctggccacccagctgatcatgcagaccagcgagagcggcatcagcgccaagagcctgagaggcagagacagcaccagaaagcaggacgccagcgagaaggacggcggcaccagaggcagaagatgcgccatcgaggccgacatgaagatgaagaagtag

SEQ ID NO: 62709 - DNA, 2586 bp, Artificial Sequence
  derived and/or modified sequence
ggcaagcacaagctgctgagcaccggccccaccgagccctggagcatcagagagaagctgtgcctggccagcagcgtgatgagaagcggcgaccagaactgggtgagcgtgagcagagccatcaagcccttcgccgagcccggcagaccccccgactggttcagccagaagcactgcgccagccagtacagcgagctgctggagaccaccgagacccccaagagaaagagaggcgagaagggcgaggtggtggagaccgtggaggacgtgatcgtgagaaagctgaccgccgagagagtggaggagctgaagaaggtgatcaaggagacccaggagagatacagaagactgaagagagacgccgagctgatccaggccggccacatggacagcagactggacgagctgtgcaacgacatcgccaccaagaagaagctggaggaggaggaggccgaggtgaagagaaaggccaccgacgccgcctaccaggccagacaggccgtgaagaccccccccagaagactgcccaccgtgatggtgagaagccccatcgacagcgccagccccggcggcgactaccccctgggcgacctgacccccaccaccatggaggaggccaccagcggcgtgacccccggcaccctgcccagcacccccgtgaccagcttccccggcatccccgacaccctgccccccggcagcgcccccctggaggcccccatgacccccgtgaccgacgacagcccccagaagaagatgctgggccagaaggccacccccccccccagccccctgctgagcgagctgctgaagaagggcagcctgctgcccaccagccccagactggtgaacgagagcgagatggccgtggccagcggccacctgaacagcaccggcgtgctgctggaggtgggcggcgtgctgcccatgatccacggcggcgagatccagcagacccccaacaccgtggccgccagccccgccgccagcgtgagccagcccgacaactgcgtgcccatggaggccgtgggcgacccccacaccgtgaccgtgagcatggacagcagcgagatcagcatgatcatcaacagcatcaaggaggagtgcttcagaagcggcgtggccgaggcccccgtgggcagcaaggcccccagcatcgacggcaaggaggagctggacctggccgagaagatggacatcgccgtgagctacaccggcgaggagctggacttcgagaccgtgggcgacatcatcgccatcatcgaggacaaggtggacgaccaccccgaggtgctggacgtggccgccgtggaggccgccctgagcttctgcgaggagaacgacgacccccagagcctgcccggcccctgggagcaccccatccagcaggagagagacaagcccgtgcccctgcccgcccccgagatgaccgtgaagcaggagagactggacttcgaggagaccgagaacaagggcatccacgagctggtggacatcagagagcccagcgccgagatcaaggtggagcccgccgagcccgagcccgtgatcagcggcgccgagatcgtggccggcgtggtgcccgccaccagcatggagccccccgagctgagaagccaggacctggacgaggagctgggcagcaccgccgccggcgagatcgtggaggccgacgtggccatcggcaagggcgacgagacccccctgaccaacgtgaagaccgaggccagccccgagagcatgctgagccccagccacggcagcaaccccatcgaggaccccctggaggccgagacccagcacaagttcgagatgagcgacagcctgaaggaggagagcggcaccatcttcggcagccagatcaaggacgcccccggcgaggacgaggaggaggacggcgtgagcgaggccgccagcctggaggagcccaaggaggaggaccagggcgagggctacctgagcgagatggacaacgagccccccgtgagcgagagcgacgacggcttcagcatccacaacgccaccctgcagagccacaccctggccgacagcatccccagcagccccgccagcagccagttcagcgtgtgcagcgaggaccaggaggccatccaggcccagaagatctggaagaaggccatcatgctggtgtggagagccgccgccaaccacagatacgccaacgtgttcctgcagcccgtgaccgacgacatcgcccccggctaccacagcatcgtgcagagacccatggacctgagcaccatcaagaagaacatcgagaacggcctgatcagaagcaccgccgagttccagagagacatcatgctgatgttccagaacgccgtgatgtacaacagcagcgaccacgacgtgtaccacatggccgtggagatgcagagagacgtgctggagcagatccagcagttcctggccacccagctgatcatgcagaccagcgagagcggcatcagcgccaagagcctgagaggcagagacagcaccagaaagcaggacgccagcgagaaggacggcggcaccagaggcagaagatgcgccatcgaggccgacatgaagatgaagaagtag

SEQ ID NO: 62710 - DNA, 2601 bp, Artificial Sequence
  derived and/or modified sequence
atggctacagggacgggaaaacataagcttctgtcaactgggccaaccgaaccatggtccatcagggagaagctctgcctggcttcaagtgtgatgcggtccggagatcaaaactgggtaagtgtgagtcgggctataaaacctttcgccgagcctgggcggcctcccgactggttcagtcagaaacattgtgcaagccaatacagcgagcttctggaaaccactgagacacccaagcgcaagcgcggggagaaaggcgaagtggtggaaacagtagaggacgtgattgtgagaaagctcactgcggagcgcgttgaagaactgaaaaaagtcataaaggagacccaggaacgctacagaaggctcaaaagggatgcggagctgatccaggctgggcacatggacagtcggctggacgagctgtgcaatgacatagcaacaaagaaaaaacttgaagaagaagaagctgaggttaagagaaaggccacagatgccgcatatcaggcccgacaagctgtgaagacccccccccgccggctgccaacagtaatggtgagatcaccaatcgacagtgcctctccaggtggagactacccactcggagatcttaccccgactaccatggaggaagcgacatccggtgtaactccaggaacactgccatccactcctgtgacaagctttccaggtatccctgatacactcccgccggggtccgctcccttagaagcgcctatgacacccgtgacggacgatagcccccagaagaagatgttaggacaaaaggccactcctccaccaagcccccttcttagcgagcttctgaaaaagggttccctgctgccgaccagccctcggctggtcaacgagagtgaaatggccgtggcgtctgggcacctgaactccaccggtgtgctgctcgaggttggcggagttctacctatgatacacggaggggaaattcagcaaacacccaatactgtggctgcaagtcccgctgcaagtgtgtcccagcctgacaattgcgttccgatggaagcagtaggcgacccccacactgtgaccgtgtccatggactcttctgagatcagcatgatcattaactcaatcaaggaagaatgcttcagatccggagtggccgaagcaccggtgggctctaaggccccaagcatcgacggtaaagaagaactcgatctggcggagaaaatggatatcgctgtgtcctacaccggtgaggaactggacttcgaaacagtgggagatattatcgccattattgaggataaggtcgatgaccatcctgaagtgctcgatgtcgccgcagtcgaggcagcattgtccttctgtgaggagaacgatgatccacaaagcctcccagggccgtgggaacacccaattcagcaagagcgcgataagcccgtgccacttcccgcccctgagatgacagtgaaacaggagcgcctggattttgaggagacagaaaataaagggatccatgaactggtggacattcgtgagccttcagccgagatcaaggtggagccagctgaaccagaaccagttattagcggcgcggagatagtcgctggcgtggtgcccgctaccagcatggagcctccagagctgcgatcccaagatctggatgaggaattggggagcaccgccgcaggagaaatcgtagaagcggatgtggccatcggaaaaggagacgagacgcctctgactaacgttaaaactgaagctagccctgagtcaatgctttctccatcacatgggtccaatccaatcgaagatcccctggaggctgagacacagcacaaattcgaaatgagtgacagcctgaaagaagaatcaggtacaatctttggttcccagattaaagacgcaccgggggaggacgaagaggaggacggggtgagcgaggcggcctccctggaagaaccaaaggaagaagaccaaggcgaagggtacctatccgaaatggacaatgaacctccagtatcagagagcgatgacgggttcagtattcacaacgccaccctgcagagccacaccctcgccgactcgatccctagctcccccgcttcaagccagttctcggtctgttccgaagatcaggaggccatccaggcccagaagatctggaaaaaagccatcatgctggtttggcgggctgctgccaatcacaggtacgctaacgtcttcctgcagcccgtgaccgatgacattgcaccgggatatcactcaatcgttcaaaggccgatggatctcagcaccatcaagaagaacatagagaacggcctcatacggtccaccgcagaatttcagcgtgatattatgcttatgttccagaacgctgtgatgtacaacagcagcgaccacgacgtttaccacatggccgtggagatgcaacgcgatgtattagagcagatccaacagttcctcgccacccagcttattatgcaaacgtcagaaagcggaatatctgcaaagtcactcaggggccgagactccacccgtaagcaagacgctagtgaaaaggacggaggaacaagaggccgacgctgcgctatcgaggcagacatgaaaatgaagaagtag

SEQ ID NO: 62711 - DNA, 2586 bp, Artificial Sequence
  derived and/or modified sequence
ggcaaacataagctcctaagtacaggccctactgagccgtggtctattcgggagaaactgtgcctcgcctcctcagtaatgagaagcggtgaccaaaactgggtctctgtcagtcgggcaattaaaccctttgccgagccgggcagaccgccggattggttttcccagaagcactgcgctagccagtattctgagcttctcgaaaccacagagacaccgaaacgtaagcgtggcgaaaagggtgaagtcgtggaaactgtagaggacgttattgtcaggaaactgactgccgagagggtggaggagcttaaaaaggtcattaaggaaactcaggagcgttatcgacgtctaaagcgagatgccgaactcatccaagcagggcacatggacagtagactggatgaactgtgcaatgatatcgctaccaaaaaaaagctagaggaggaagaggcggaagtgaagaggaaagcaaccgatgcagcctatcaagctcgacaggctgtcaaaactccaccgagacgacttcctactgtcatggtgcgcagccccatagatagcgctagcccggggggagactatcctcttggcgatctaactccaaccaccatggaggaggccactagtggggtcactccaggcaccctgcccagtaccccggtgacctcctttccgggcattcccgacacgctgcctcctggaagcgccccacttgaagccccaatgactcccgtcacagatgattctcctcagaagaaaatgctgggacaaaaggccactccccccccttccccccttcttagtgaactactcaagaagggcagcctgctgccaacaagcccccgtctggtgaatgaaagcgaaatggcagtggcctccggacatctcaattcaaccggtgtgctgcttgaagtgggaggcgtgctgccaatgattcacggaggggagatccaacagacccccaacaccgttgccgcaagtcccgctgcctccgtttctcagcctgacaactgtgtgcctatggaggccgtgggcgatcctcatacagtaaccgtatccatggattcttcagagatctcaatgatcataaactctattaaggaggagtgtttcagaagtggggtcgctgaggcccctgtgggaagcaaggcgccaagtattgacggtaaggaggagcttgatctggcggagaagatggatatagccgtttcatacaccggggaagagctggatttcgagacggtcggggatattatcgccatcatcgaggataaggttgatgatcatcctgaggtgctggatgttgccgccgtggaggccgccctgtccttttgcgaagaaaacgatgatccacagtccctgccaggcccctgggaacatccaatccagcaggagcgcgacaaaccagttcccttgcctgcccctgaaatgactgtgaagcaggagaggctagatttcgaagagacggaaaacaagggtatccacgagttggtcgacatcagagaaccttcggcagagatcaaagtggaaccagcggagccagagccggtaatcagcggtgcagaaatcgtggcaggagtggtccccgccacctccatggaaccaccagagctgcggagtcaggacctggacgaagaattgggatctacggccgctggagagatagtggaagccgacgtggctatcgggaagggggatgagacccccctgaccaacgtgaagacagaggcgtccccagagtcaatgctgtctccttcacacggcagtaaccccatcgaggatccgctcgaggccgaaacccagcataaattcgagatgtcggatagtctgaaggaggagagtggcacgattttcgggtctcagatcaaggacgcccctggcgaggatgaggaggaggacggagtctcagaagcggcatctctggaggagcccaaggaagaggatcaaggggagggctatctttccgagatggataatgaacctcctgtgtctgagagcgatgatggctttagtatccataatgcgaccttacagagccacactctggccgattcaatcccctctagtcctgctagtagccagttctcagtatgtagtgaggatcaggaggcaatacaggcccagaaaatttggaagaaggccattatgcttgtgtggagagcagccgcaaaccatcgatatgcaaacgtcttcttgcagcccgtgaccgacgacatcgcccctggatatcattccatagtacagcgccccatggacctaagcactattaaaaaaaatattgagaacggtttgatacggagtactgctgaatttcagagggacatcatgctgatgtttcagaacgcagtgatgtataactctagcgaccatgacgtctaccacatggccgtggaaatgcaaagagacgtattggaacagattcaacagttcctcgccacccagctgattatgcaaacttctgagagcggaattagcgccaaaagcttgcgcggacgtgacagtacacggaaacaggatgcaagcgaaaaggacggagggacccgaggaaggagatgtgctatcgaggcagacatgaagatgaaaaagtag

SEQ ID NO: 62712 - DNA, 2601 bp, Artificial Sequence
  derived and/or modified sequence
atggccactggaacaggcaagcacaagctgctgagcacaggccccacagagccctggagcatccgggagaagctgtgcctggccagctctgtgatgaggtctggggaccagaactgggtgtctgtgtcccgggccatcaagccctttgctgagcccggccggcccccagactggttcagccagaagcactgtgccagccagtacagcgagctgctggagaccacagagacccccaagaggaagagaggagagaagggggaggtggtggagaccgtggaggatgtgattgtgaggaagctgacagctgagcgggtggaggagctgaagaaggtgatcaaggagacccaggagcgctaccgccgcctgaagagagatgctgagctgatccaggccggccacatggacagccggctggatgagctgtgcaatgacatcgccaccaagaagaagctggaggaggaggaggccgaggtgaagaggaaggccacagatgctgcctaccaggcccggcaggccgtgaagaccccaccccggcggctgcccaccgtgatggtgcgcagccccattgattctgccagccctggaggagactaccccctgggggacctgacccccaccaccatggaggaggccaccagcggcgtgaccccaggcaccctgcccagcacccctgtgaccagcttccctggcatcccagacaccctgcccccaggcagcgcccccctggaggcccccatgacccctgtgacagatgacagcccccagaagaagatgctgggccagaaggccaccccaccacccagccccctgctgtctgagctgctgaagaagggcagcctgctgcccaccagcccccggctggtgaatgaaagtgagatggctgtggccagcggccacctgaacagcactggagtgctgctggaggtgggcggcgtgctgcccatgattcatggaggagagatccagcagacccccaacacagtggccgccagccctgctgcctctgtgtcccagcctgacaactgtgtgcccatggaggccgtgggggacccccacacagtgacagtgtccatggacagcagcgagatctccatgatcatcaacagcatcaaggaggagtgcttccgctctggagtggccgaggcccctgtgggcagcaaggcccccagcattgatggcaaggaggagctggacctggccgagaagatggacattgctgtgtcctacaccggggaggagctggactttgagaccgtgggggacatcatcgccatcatcgaggacaaggtggatgaccaccctgaggtgctggatgtggccgctgtggaggccgccctgtccttctgtgaagaaaatgatgacccccagagcctgcccggcccctgggagcaccccatccagcaggagcgggacaagcctgtgcccctgcctgcccctgagatgacagtgaagcaggagcggctggactttgaggagacagagaacaagggcatccacgagctggtggacatccgggagcccagcgctgagatcaaggtggagcctgctgagcctgagcccgtcatctctggagctgagatcgtggccggcgtggtgcctgccacctccatggagcccccagagctgcggagccaggacctggatgaggagctgggcagcacagctgctggggagatcgtggaggctgatgtggccatcggcaaaggagatgagacccccctgaccaacgtgaagacagaggccagccctgagagcatgctgagccccagccacggcagcaaccccatcgaggaccccctggaggccgagacccagcacaagtttgagatgtctgacagcctgaaggaggagagcggcaccatcttcggcagccagatcaaggatgcccctggagaagatgaggaggaggatggagtgtctgaggccgccagcctggaggagcccaaggaggaggaccagggcgagggctacctgtctgagatggacaatgaacctcctgtgtctgagagtgatgatggcttcagcatccacaatgccaccctgcagagccacaccctggccgacagcatccccagcagccctgccagcagccagttctctgtgtgcagcgaggaccaggaggccatccaggcccagaagatctggaagaaggccatcatgctggtgtggagggctgctgccaaccacagatatgccaacgtgttcctgcagcctgtgacagatgacatcgcccctggctaccacagcatcgtgcagaggcccatggacctgagcaccatcaagaagaacattgaaaatggcctcatccgcagcacagctgagttccagagggacatcatgctgatgttccagaatgctgtgatgtacaacagcagtgaccatgatgtgtaccacatggctgtggagatgcagagagatgtgctggagcagatccagcagttcctggccacccagctgatcatgcagaccagcgagagcggcatcagcgccaagagcctgcggggccgggacagcaccaggaagcaggatgccagcgagaaggatggcggcacccggggccgccgctgtgccatcgaggccgacatgaagatgaagaagtag

SEQ ID NO: 62713 - DNA, 2586 bp, Artificial Sequence
  derived and/or modified sequence
gggaagcacaagctgctgagcacaggccccacagagccctggagcatccgggagaagctgtgcctggccagctctgtgatgaggtctggggaccagaactgggtgtctgtgtcccgggccatcaagccctttgctgagcccggccggcccccagactggttcagccagaagcactgtgccagccagtacagcgagctgctggagaccacagagacccccaagaggaagagaggagagaagggggaggtggtggagaccgtggaggatgtgattgtgaggaagctgacagctgagcgggtggaggagctgaagaaggtgatcaaggagacccaggagcgctacagaaggctgaagagagatgctgagctgatccaggccggccacatggacagccggctggatgagctgtgcaatgacatcgccaccaagaagaagctggaggaggaggaggccgaggtgaagaggaaggccacagatgctgcctaccaggcccggcaggccgtgaagaccccaccccggcggctgcccaccgtgatggtgcgcagccccatcgacagcgccagccctggaggagactaccccctgggggacctgacccccaccaccatggaggaggccaccagcggcgtgaccccaggcaccctgcccagcacccctgtgaccagcttccctggcatcccagacaccctgcccccaggcagcgcccccctggaggcccccatgacccctgtgacagatgacagcccccagaagaagatgctgggccagaaggccaccccaccacccagccccctgctgtctgagctgctgaagaagggcagcctgctgcccaccagcccccggctggtgaatgaaagtgagatggctgtggccagcggccacctgaacagcactggagtgctgctggaggtgggcggcgtgctgcccatgatccacggcggggagatccagcagacccccaacacagtggccgccagccctgctgcctctgtgtcccagcctgacaactgtgtgcccatggaggccgtgggggacccccacacagtgacagtgtccatggacagcagcgagatctccatgatcatcaacagcatcaaggaggagtgcttccgcagcggcgtggccgaggcccctgtgggcagcaaggcccccagcattgatggcaaggaggagctggacctggccgagaagatggacattgctgtgtcctacacaggagaggagctggactttgaaacagtgggggacatcatcgccatcatcgaggacaaggtggatgaccaccctgaggtgctggatgtggccgctgtggaggccgccctgtccttctgtgaggagaatgatgacccccagagcctgcccggcccctgggagcaccccatccagcaggagcgggacaagcctgtgcccctgcctgcccctgagatgacagtgaagcaggagcggctggactttgaggagacagaaaataaaggcatccacgagctggtggacatccgggagcccagcgctgagatcaaggtggagcctgctgagcctgagcctgtgatcagcggggctgagatcgtggccggcgtggtgcctgccacctccatggagcccccagagctgcggagccaggacctggatgaggagctgggcagcacagctgctggggagatcgtggaggctgatgtggccatcggcaaaggagatgagacccccctgaccaacgtgaagacagaggccagccctgagagcatgctgagccccagccacggcagcaaccccatcgaggaccccctggaggccgagacccagcacaagtttgagatgtctgacagcctgaaggaggagagcggcaccatcttcggcagccagatcaaggatgcccctggagaagatgaggaggaggatggagtgtctgaggccgccagcctggaggagcccaaggaggaggaccagggcgagggctacctgtctgagatggacaatgagccccctgtgtctgagagtgatgatggcttcagcatccacaatgccaccctgcagagccacaccctggccgacagcatccccagcagccctgccagcagccagttctctgtgtgcagcgaggaccaggaggccatccaggcccagaagatctggaagaaggccatcatgctggtgtggagggctgctgccaaccacagatatgccaacgtgttcctgcagcctgtgacagatgacatcgcccctggctaccacagcatcgtgcagaggcccatggacctgagcaccatcaagaagaacattgaaaatggcctcatccgcagcacagctgagttccagagggacatcatgctgatgttccagaatgctgtgatgtacaacagcagtgaccatgatgtgtaccacatggctgtggagatgcagagagatgtgctggagcagatccagcagttcctggccacccagctgatcatgcagaccagcgagagcggcatcagcgccaagagcctgcggggccgggacagcaccaggaagcaggatgccagcgagaaggatggcggcacccggggcagaagatgtgccattgaagctgacatgaagatgaagaagtag

SEQ ID NO: 62714 - DNA, 2601 bp, Artificial Sequence
  derived and/or modified sequence
atggccaccggcaccggcaagcacaagctgctgagcaccggccccaccgagccttggagcatcagggagaaactgtgcttggcatcctcagttatgcgctcaggagaccagaactgggtttctgtctcgagagccattaagcctttcgcagagccaggccgccctcccgactggttcagtcagaaacactgcgcgtcccaatacagtgagctgctggagacaacggagaccccaaagcggaagcggggggagaagggagaagtggtagagacggtggaggatgtcatcgtgagaaagctgactgctgaacgagtagaggagctaaagaaggttatcaaggagactcaggagcgttatcggcgcctgaagcgggatgccgagctaattcaagcaggacacatggattcaaggttggacgagttatgcaatgacattgccacgaaaaaaaaactggaggaggaagaagccgaggtgaagagaaaagctaccgatgccgcataccaggctcggcaggccgtaaagacccccccgcgccggcttcccactgtgatggtccgatcgcctatcgactccgcttcgcccggcggtgactacccgctaggagatctaaccccaacaacgatggaggaggctacctctggagtgacccctgggacactgcctagtacacccgtcacctcatttcccggaattccagacactcttccacccggaagtgcacccctcgaagctcccatgaccccagttaccgatgactcaccccagaaaaaaatgctcggtcaaaaggccacaccacctcctagccccctcttgtccgagttattaaagaaggggagcttattacctacttctcctcgtcttgtgaatgagtccgaaatggctgtggcctctggtcatcttaattctactggtgtgctgctggaggtggggggcgtgctgccaatgatacacggtggagagatccagcaaacacccaacacggtggcggcgtcccctgctgcttcagtctcccagccagataattgtgtgcccatggaggctgtcggcgacccacatactgtgacagtgtccatggacagctcagagatcagcatgataattaattctatcaaagaggagtgttttcgctctggagtcgccgaagctcccgtggggagcaaagcgccctccatcgacggcaaagaggagttggacctggcagaaaagatggacattgcagtgagttacacgggcgaagaacttgacttcgaaactgtgggcgatatcatcgccattatcgaggacaaagtggatgaccatcctgaagtgctcgatgtggccgccgttgaagctgctttgtcattttgtgaggaaaatgatgaccctcagagcctcccagggccctgggagcatccaatccagcaggagagggacaagccggtgccattgccggccccagaaatgaccgtcaaacaggaacgactggattttgaagaaactgagaacaaaggaatccacgaattagtagatatcagagaaccttcggcggagataaaagtggaaccggcagagcctgagcccgtgatcagcggcgccgagatcgtggcaggcgtggtgccagcgacttcaatggaaccacctgaactgcgtagccaagacttggacgaggagctagggagcacagcagccggcgagatcgttgaggcggacgtggctatcgggaagggggatgaaaccccccttacaaatgtgaaaacagaagctagtcccgagtccatgctttcgccaagccatggatccaaccctatcgaggacccacttgaggccgagacgcagcataaatttgagatgagcgacagtttgaaggaggagagtgggactatcttcgggagccagataaaggatgcgcccggcgaggatgaggaggaggacggagtatcagaagcagcatctctggaggagccgaaggaggaagaccagggtgaaggctacctttccgagatggataacgaacccccagtgagcgagtcagatgatggttttagcattcataacgcaaccctccagtctcacactctggccgactcgatcccttccagcccagcttcttctcagttctcagtgtgctccgaagatcaggaggcaattcaggcacagaagatctggaagaaggccatcatgctggtctggagggctgccgcgaatcaccggtacgccaacgtgtttctccagcccgtcacagacgacattgcaccaggttatcactcgatcgtacagcggcctatggatctatctacaatcaagaagaatattgaaaatggactgatacgaagcactgctgaattccaaagagacattatgctgatgttccagaatgcggttatgtataactcttccgatcatgatgtgtaccatatggccgtcgagatgcagcgggatgtgctggagcagatccagcagtttcttgccactcagctcatcatgcagacttccgagtccggcatttcagccaaatcactcagaggacgcgatagcactcggaaacaggatgcctctgagaaggacggcggaactcggggccggcgctgtgcaattgaagccgatatgaaaatgaagaagtag

SEQ ID NO: 62715 - DNA, 2586 bp, Artificial Sequence
  derived and/or modified sequence
ggcaagcacaagctgctgagcaccggccccaccgagccctggagcatacgggaaaagctgtgcttagccagttccgttatgagatctggcgatcagaactgggtgagcgtgagccgcgcgattaaaccatttgccgaaccgggtagaccaccggattggttctctcagaagcactgtgccagtcagtactctgagctcctggaaactacagagactccgaagcgcaagaggggcgagaagggagaggttgtggaaacagtcgaagacgtgattgtgaggaaattaaccgccgagagggtggaggaactcaaaaaggtgattaaggagacccaggagaggtaccggcgcctgaagagagatgccgagctcatccaggcaggtcacatggattctaggctcgacgagctctgcaacgatattgcaactaaaaagaaactagaggaggaagaagccgaggtcaaacgcaaagccaccgatgcagcctatcaggctagacaggccgttaagactcctccacgacgccttccgacagtgatggttagatcaccaatcgactccgcatctcctggtggcgactaccccctaggcgatcttacgccaacaactatggaggaggccaccagtggagtgaccccagggacccttcccagtacgcctgtgacatccttccctggaattcccgatacactgccacctgggagtgcgcccctggaagccccgatgacgcctgtaacagatgactctccccagaagaagatgctgggccagaaggccacccctcctccttcccctttgctcagcgagctgctgaagaagggcagcttgctgccaacttctccccggttggttaacgaatccgagatggctgtggctagtgggcacctgaactccacgggcgtgctcttggaggtagggggggtgctacccatgatacatggaggggaaatacagcagacccccaataccgtggccgccagccctgcagcatctgtatcccagcctgacaactgtgtgcccatggaagccgtgggggaccctcacacagtgactgtctcaatggattcgagcgaaattagtatgattatcaatagtataaaggaagagtgttttcgcagtggagtagccgaagcacctgtagggagtaaggcgccaagcatcgacggtaaagaggagctcgaccttgccgagaagatggacattgccgtttcatatactggcgaggagctggacttcgaaaccgtgggtgacataattgccatcatcgaagacaaagtggacgatcatcccgaggtcttagatgttgcagctgtggaggctgccttgtcgttctgtgaagagaatgacgacccccagtctctgccaggaccctgggaacaccccatccaacaagaaagggacaaaccagtacctctcccagctcccgagatgactgttaagcaagagcgcctcgatttcgaggaaacggagaataagggcatacacgagttggtcgacatccgggagccctctgcagagattaaagtcgaacccgccgagcccgaaccagtgatctctggagcggaaattgtggccggggtggtccctgctacctcaatggagccccctgaactaaggagccaggacttagacgaggagcttggtagcacagcggctggagaaatcgtcgaagccgatgtggccattggaaagggcgacgagactccactgacgaatgtcaagacagaggccagccccgaatctatgttgagcccctcccacggctcaaaccctatcgaagaccctcttgaggccgagacacagcacaaatttgaaatgagcgattctttgaaagaagaaagcgggacgatctttggttcgcagatcaaggatgcacccggcgaagatgaagaggaagatggcgttagtgaagccgccagccttgaggaacccaaagaggaagaccagggggaaggttatctaagcgagatggataacgaacccccggtcagtgagagcgatgacgggttctccatccataatgcaaccctgcaatctcacacattggctgactcgatcccatcctcacccgcatcatctcagttctctgtgtgttcagaggatcaggaagcaatccaggcacagaaaatttggaaaaaagccatcatgttggtgtggcgggccgcagcaaatcaccgctacgccaacgttttcctgcaaccggtgaccgatgacatcgccccggggtaccattcaatcgttcagaggccgatggaccttagcaccattaaaaaaaacattgagaatggacttatccgcagcaccgcggaattccaaagagacattatgcttatgttccagaacgcggtgatgtataacagttccgaccatgacgtgtaccatatggccgtggagatgcagcgagacgttcttgaacagattcagcaatttctggctacccagttgatcatgcagacaagcgaatctggtattagcgcaaagagtctaagaggccgcgactctacaagaaagcaggacgccagcgaaaaggacggcggtacccgaggccggcggtgtgccatcgaagccgatatgaagatgaaaaagtag

SEQ ID NO: 62716 - DNA, 2601 bp, Artificial Sequence
  derived and/or modified sequence
atggctaccggcactggcaaacacaagctgctgagcaccggtccgacagaaccttggagcatccgcgagaagttgtgcttggcttctagtgtgatgagatcgggcgatcagaactgggtgtccgtaagccgcgctattaagccttttgcagaaccagggcgacctcctgactggttttctcagaagcactgcgctagtcaatatagtgaattgcttgagacaaccgagaccccaaagagaaagaggggtgagaaaggggaagtcgttgagaccgtggaagacgtgatagttagaaagttgaccgctgagcgggtcgaggagcttaaaaaggtcattaaggagacccaggagcgctacagaaggcttaagagggatgccgagttgatccaagctggtcacatggacagtcggctcgatgaactctgtaacgacatcgccaccaaaaaaaaactggaggaggaagaggcagaggtaaagagaaaagccacagatgcagcatatcaggcacgccaggctgttaaaacacccccacggagactccctacggtaatggtgagatcacccatagattcggcgagcccaggcggagactaccccttgggcgatctgacgcccaccacaatggaggaagccaccagcggggtgacgccagggacccttccctcgacacccgtgacatcgttccccggaattcctgacactttacctcccggaagtgctccattggaggcccctatgacgccagtgacagatgactctccacagaagaagatgcttggccagaaagcaacgcctccaccctcccctctgctgtccgaattgctgaagaaaggctcactgctgcccacctcccctagactggtcaacgagagtgagatggctgtggctagcggccatctgaacagtactggagttttacttgaggtcgggggtgtgttgccaatgatccatgggggagagattcaacagactcctaacactgtggcagctagtcctgcagcaagcgtgtcccaaccagacaactgtgtgccaatggaggcggtcggagatccacacactgtcacagtcagtatggacagttctgaaatctccatgataatcaatagcatcaaggaagagtgctttagatccggcgtagccgaagctccagtggggtcaaaagccccaagtatcgatggtaaggaagagctggacctggctgaaaaaatggacattgccgtgagttacactggagaagagctcgatttcgaaacagtgggagacataattgccataatcgaggataaggtcgatgaccatccggaagtacttgatgtagcagcggtggaagcagcactctccttttgcgaagaaaatgatgacccacaatctctgccaggaccttgggagcacccaatacagcaggaacgcgataaaccagttcctcttcccgctcctgagatgacggttaagcaggagagactggacttcgaagaaaccgaaaataagggaattcacgaacttgtggacatccgcgagccaagtgcagagatcaaggtcgagcctgcagagccagagcctgtcatatctggcgctgagatagtcgctggtgtcgtgcccgctacatccatggaacctccagagctgaggtctcaggatctggatgaagaactgggaagcacggctgccggtgagatcgtggaagctgatgttgccattggtaagggagatgagacccccctaactaacgttaagaccgaggccagtcctgagtccatgctctccccctcacatggcagtaaccccattgaggacccactggaggctgaaacccagcataagttcgaaatgtcagactctctgaaggaagaatctggtaccatcttcggtagccagataaaggacgcgcctggagaggatgaagaagaagatggggtctctgaagccgcaagcctggaggagcctaaggaggaggaccaaggcgagggctacctcagtgaaatggataatgaaccgcctgtatctgaaagtgacgacgggttcagcatccacaatgccaccctccagagtcacacactcgcggactcaatcccaagtagtcctgcctcttcccagttctcggtatgctcggaggatcaggaagccatacaggcgcagaaaatctggaaaaaagctataatgctcgtgtggagggccgctgctaatcatcgttacgcaaacgttttcctgcagcctgttacagacgatattgcccctggctatcacagtatcgtacagagacctatggatttgagcacgataaaaaaaaatattgaaaacgggctcataaggagcacggcagagtttcagcgagatatcatgcttatgtttcagaatgctgtgatgtacaatagcagtgaccacgacgtttatcacatggcagttgagatgcaaagagatgttctcgagcagatccagcagttcctcgcaacgcagctgatcatgcagacaagtgaatccggaatttccgcaaagagcttgcggggtcgtgattcgactcgcaagcaagatgcatccgagaaggatggcggtacgcgaggacgtcgctgtgccattgaagcagacatgaaaatgaaaaaatag

SEQ ID NO: 62717 - DNA, 2586 bp, Artificial Sequence
  derived and/or modified sequence
gggaaacacaaactgctgtccacaggcccaaccgaaccctggtctatacgcgagaagctgtgcctagctagctcagtgatgagaagtggagaccaaaattgggtttcggtatctagagctatcaaaccttttgccgaaccagggagacctcctgattggtttagccagaaacactgtgcgtctcagtactcagagctcttggagactaccgaaactcccaaaagaaagagaggcgagaagggggaagtcgtggaaaccgtagaggatgtcatagtccggaaattaactgccgagagagttgaggaactgaagaaagtgatcaaggaaacccaggaaaggtacaggaggctgaaaagggatgcagaacttattcaggcagggcatatggattctaggcttgatgagttgtgcaatgacattgctacaaagaagaagctcgaggaagaagaagcagaggtcaagcgaaaggctacagacgccgcataccaagctaggcaagcggtcaagactccccctcgaagactaccaactgtcatggtcagaagcccgattgattcagcatcgcctggaggcgattacccgctcggagacctcacccctacaacaatggaagaggcaacctctggcgttacaccgggtactttaccctcaacccccgttacatctttcccgggaattcctgatacactgcctccagggtcagcccctcttgaggccccaatgaccccagtgactgatgactcccctcagaagaaaatgctgggccagaaagccacaccgcctccaagtcctttactgtccgagctgctgaaaaaaggcagcctactgcctaccagcccccgtctggttaacgagtcagaaatggcggtagcatccggccatttaaacagcaccggagtgctcttggaggtgggtggggtcctgcccatgatccatggcggagaaatccagcaaacgccgaataccgtggctgcaagcccagccgcttccgtgagtcagcctgacaactgtgtgccgatggaggctgtgggagatcctcataccgtgacggtctcaatggattctagcgaaatctctatgatcatcaatagcataaaagaagagtgttttcgatccggtgtggctgaagccccagtgggcagcaaagccccttctatcgacggcaaagaggagttggacttagccgagaaaatggacattgctgtcagttacaccggggaggaattagacttcgaaaccgtaggcgatatcatcgccatcatcgaagataaggtagacgaccatcccgaggtgcttgacgttgcggctgtcgaggcagccttgtccttctgcgaagaaaacgatgatccacagagcctgcctgggccttgggaacatccaattcaacaagagcgagataagcctgtgccactcccagctcccgagatgaccgtgaaacaagagcgcttagattttgaggaaacagagaataaaggtatccacgagctggtggatattagagagccctctgcagagatcaaggttgaacctgccgaaccagagccagtcatatctggcgctgagatcgtggctggggttgtgccagccacgtcgatggagccccctgaactgcgcagtcaggacctagacgaggaactcggaagtaccgccgctggcgagatcgtggaggccgacgtggccattggtaagggcgacgaaacaccgctgacgaatgtgaagaccgaggcgtctcccgagagtatgctgtccccctctcacgggagtaatcctatcgaggaccccctggaagccgagactcagcataaattcgaaatgagtgacagccttaaagaggaaagcgggaccatctttggcagccagattaaggatgcacctggcgaagacgaggaagaagatggtgtgtctgaggctgcaagcctagaggagcctaaagaggaagaccagggggagggttacttatccgagatggacaatgagccaccagtgagcgagtcggatgacgggttctctatacacaacgcaaccctgcagtcccacacactagcggacagcatccctagttcgccagcctcatctcagtttagcgtatgcagcgaggatcaggaagccattcaggcccagaagatttggaaaaaggcgatcatgctcgtgtggagggccgctgccaatcacaggtacgccaatgtgttcctccaacctgtgacggatgatatcgcaccgggttatcatagcattgtgcaacgtcctatggatctttctactataaagaagaatatcgagaacgggctaatccgttccaccgcagaattccagcgagatattatgttgatgtttcagaatgctgtcatgtacaactcttccgatcacgatgtgtatcatatggcggtcgagatgcagcgggatgtgctggaacagatccagcagttcctcgccacccagctcatcatgcagaccagcgagtcaggaatttcagctaagtccctgagagggagagatagcaccagaaaacaggatgcttccgaaaaagacggtggcacaaggggcaggagatgcgctatcgaagccgatatgaagatgaagaagtag

SEQ ID NO: 62718 - DNA, 2967 bp, Artificial Sequence
  derived and/or modified sequence
gggtttcggcccttccagaccgtctctcctcagggttggagacttcggggccaagatggcgacgggaacgggcaaacacaagctgctaagcactggccccacagagccatggtccatccgagagaagctatgtttagcatcttctgtcatgagaagtggcgatcaaaattgggtatcagttagcagagcaatcaagccctttgcagaacctggccgccctccagactggttctctcaaaaacattgtgcttcccagtactcggagcttttagagaccactgagacaccaaaacggaaacgaggtgaaaagggagaagtggtggaaactgttgaagatgttattgttcggaaattgactgctgagcgagttgaagaactaaagaaagtgataaaggaaacccaggagagatatagacggctaaagagagatgcagaactaattcaagctggacacatggacagcagactggatgagctttgcaatgacattgcaacgaaaaagaaattggaagaagaggaggctgaagtaaagaggaaggctacagatgctgcataccaggctcgtcaagcagtaaaaacacccccccggaggttacccactgtgatggttcgctctcctatagattctgcctccccaggaggtgattatccacttggggacttgactccaaccactatggaagaggctacctctggggtaacccccgggactttgccgagtaccccagtcacctcgtttcctgggattcctgacacccttcctccaggctctgcacccttagaagcccccatgaccccagtaacagatgattcaccccagaaaaagatgcttggacagaaagcaactccacccccctcccctctgctgtcagagctcttgaagaagggcagcctcctgcctactagccccagactggtcaatgagagtgaaatggctgtggcttctggccacctgaacagtacaggtgtcctcctggaggtaggcggggtccttcccatgatacatggtggggagatacagcaaacacccaatactgttgcagcctcccctgctgcatcagtgagtcaacccgacaactgtgttcccatggaggctgtgggggatccacatactgtgactgtttccatggacagcagtgaaatatccatgatcatcaattctatcaaagaagagtgttttcgatcaggggtagcagaggctcctgttggatcaaaggctcccagcatagatgggaaggaagaattagatctggctgagaagatggatattgctgtgtcttacacaggtgaagagctggattttgagactgttggagacatcattgccatcattgaggacaaggtagatgatcatcctgaagtgctggatgtggcagcagtggaagcagcactgtcattttgtgaagaaaatgatgatcctcagtccctgcctggcccctgggagcatcctatccagcaggagcgggacaagccagtacctctccctgcaccagaaatgacggtcaagcaagagagactggactttgaggaaacggaaaacaagggaatacatgaactggtggacatcagggagcccagtgcagagatcaaggtggaacctgcagaaccagagccagtcatttcaggagccgaaatagtagctggagttgttccagccacaagtatggagccaccagaactcaggagtcaggacttagatgaggaactgggaagtactgcagctggagagattgttgaagcagatgttgccattgggaaaggcgatgagactccacttacaaatgtgaagacagaggcatcccctgaaagcatgttgtctccatcacatggctcaaatcccattgaagatcctttagaggcagagactcagcacaagtttgaaatgtcagactcattgaaagaagaatcagggactatttttggaagccagataaaggatgccccaggtgaggatgaggaggaagatggtgtcagtgaagcggccagcctagaggagcctaaggaagaggatcaaggagaaggctacttgtcagaaatggataatgaacctcctgtgagcgagagtgatgatggcttcagcatacacaatgctacactgcagtcacacacactggcagactccatccccagcagccctgcttcttcacagttctctgtctgtagtgaggatcaggaagctattcaggcacagaaaatttggaagaaagccatcatgcttgtatggagagctgcagctaatcataggtatgccaatgtcttcctgcagcctgttacagatgacatagcacctggctaccacagcattgtgcagaggcctatggatttgtcaactattaagaaaaacatagaaaatggactgatccgaagcacagctgaatttcagcgtgacattatgctgatgtttcagaatgctgtaatgtacaatagctcagaccatgatgtctatcacatggcagtggagatgcagcgagatgtcttggaacagatccagcaattcttggccacgcagttgattatgcaaacatccgagtctgggatcagtgctaaaagtcttcgagggagagattctacccgcaaacaggatgcttcagagaaggatggaggaaccaggggacgccgctgtgccattgaagcagatatgaagatgaaaaagtgaagcctcagagttaccctctttgagccgaacctaaaataaaagtaaacaagatagagcttgggcttgcgggcccagttccagaggtggaagttacagaagaggaggtacctgggccacacgacatgagctggaaaatctctcttagagagttggagtagcacaattgcctgttttagggcagaaaccatgggctatgttaatgtcctaatgtgtagctagcagatcgtagctagtttgtattgtcttgtcaattgtacagactttttaaaaaaaacaaccaccagtgaaatgtgtgtgtatacaataaactg

SEQ ID NO: 62719 - DNA, 2912 bp, Artificial Sequence
  derived and/or modified sequence
ggcaaacacaagctgctaagcactggccccacagagccatggtccatccgagagaagctatgtttagcatcttctgtcatgagaagtggcgatcaaaattgggtatcagttagcagagcaatcaagccctttgcagaacctggccgccctccagactggttctctcaaaaacattgtgcttcccagtactcggagcttttagagaccactgagacaccaaaacggaaacgaggtgaaaagggagaagtggtggaaactgttgaagatgttattgttcggaaattgactgctgagcgagttgaagaactaaagaaagtgataaaggaaacccaggagagatatagacggctaaagagagatgcagaactaattcaagctggacacatggacagcagactggatgagctttgcaatgacattgcaacgaaaaagaaattggaagaagaggaggctgaagtaaagaggaaggctacagatgctgcataccaggctcgtcaagcagtaaaaacacccccccggaggttacccactgtgatggttcgctctcctatagattctgcctccccaggaggtgattatccacttggggacttgactccaaccactatggaagaggctacctctggggtaacccccgggactttgccgagtaccccagtcacctcgtttcctgggattcctgacacccttcctccaggctctgcacccttagaagcccccatgaccccagtaacagatgattcaccccagaaaaagatgcttggacagaaagcaactccacccccctcccctctgctgtcagagctcttgaagaagggcagcctcctgcctactagccccagactggtcaatgagagtgaaatggctgtggcttctggccacctgaacagtacaggtgtcctcctggaggtaggcggggtccttcccatgatacatggtggggagatacagcaaacacccaatactgttgcagcctcccctgctgcatcagtgagtcaacccgacaactgtgttcccatggaggctgtgggggatccacatactgtgactgtttccatggacagcagtgaaatatccatgatcatcaattctatcaaagaagagtgttttcgatcaggggtagcagaggctcctgttggatcaaaggctcccagcatagatgggaaggaagaattagatctggctgagaagatggatattgctgtgtcttacacaggtgaagagctggattttgagactgttggagacatcattgccatcattgaggacaaggtagatgatcatcctgaagtgctggatgtggcagcagtggaagcagcactgtcattttgtgaagaaaatgatgatcctcagtccctgcctggcccctgggagcatcctatccagcaggagcgggacaagccagtacctctccctgcaccagaaatgacggtcaagcaagagagactggactttgaggaaacggaaaacaagggaatacatgaactggtggacatcagggagcccagtgcagagatcaaggtggaacctgcagaaccagagccagtcatttcaggagccgaaatagtagctggagttgttccagccacaagtatggagccaccagaactcaggagtcaggacttagatgaggaactgggaagtactgcagctggagagattgttgaagcagatgttgccattgggaaaggcgatgagactccacttacaaatgtgaagacagaggcatcccctgaaagcatgttgtctccatcacatggctcaaatcccattgaagatcctttagaggcagagactcagcacaagtttgaaatgtcagactcattgaaagaagaatcagggactatttttggaagccagataaaggatgccccaggtgaggatgaggaggaagatggtgtcagtgaagcggccagcctagaggagcctaaggaagaggatcaaggagaaggctacttgtcagaaatggataatgaacctcctgtgagcgagagtgatgatggcttcagcatacacaatgctacactgcagtcacacacactggcagactccatccccagcagccctgcttcttcacagttctctgtctgtagtgaggatcaggaagctattcaggcacagaaaatttggaagaaagccatcatgcttgtatggagagctgcagctaatcataggtatgccaatgtcttcctgcagcctgttacagatgacatagcacctggctaccacagcattgtgcagaggcctatggatttgtcaactattaagaaaaacatagaaaatggactgatccgaagcacagctgaatttcagcgtgacattatgctgatgtttcagaatgctgtaatgtacaatagctcagaccatgatgtctatcacatggcagtggagatgcagcgagatgtcttggaacagatccagcaattcttggccacgcagttgattatgcaaacatccgagtctgggatcagtgctaaaagtcttcgagggagagattctacccgcaaacaggatgcttcagagaaggatggaggaaccaggggacgccgctgtgccattgaagcagatatgaagatgaaaaagtgaagcctcagagttaccctctttgagccgaacctaaaataaaagtaaacaagatagagcttgggcttgcgggcccagttccagaggtggaagttacagaagaggaggtacctgggccacacgacatgagctggaaaatctctcttagagagttggagtagcacaattgcctgttttagggcagaaaccatgggctatgttaatgtcctaatgtgtagctagcagatcgtagctagtttgtattgtcttgtcaattgtacagactttttaaaaaaaacaaccaccagtgaaatgtgtgtgtatacaataaactgaaaaaaaaaactagc

SEQ ID NO: 62720 - protein, 668 aa, Artificial Sequence
  derived and/or modified sequence
MTERIHSINLHNFSNSVLETLNEQRNRGHFCDVTVRIHGSMLRAHRCVLAAGSPFFQDKLLLGYSDIEIPSVVSVQSVQKLIDFMYSGVLRVSQSEALQILTAASILQIKTVIDECTRIVSQNVGDVFPGIQDSGQDTPRGTPESGTSGQSSDTESGYLQSHPQHSVDRIYSALYACSMQNGSGERSFYSGAVVSHHETALGLPRDHHMEDPSWITRIHERSQQMERYLSTTPETTHCRKQPRPVRIQTLVGNIHIKQEMEDDYDYYGQQRVQILERNESEECTEDTDQAEGTESEPKGESFDSGVSSSIGTEPDSVEQQFGPGAARDSQAEPTQPEQAAEAPAEGGPQTNQLETGASSPERSNEVEMDSTVITVSNSSDKSVLQQPSVNTSIGQPLPSTQLYLRQTETLTSNLRMPLTLTSNTQVIGTAGNTYLPALFTTQPAGSGPKPFLFSLPQPLAGQQTQFVTVSQPGLSTFTAQLPAPQPLASSAGHSTASGQGEKKPYECTLCNKTFTAKQNYVKHMFVHTGEKPHQCSICWRSFSLKDYLIKHMVTHTGVRAYQCSICNKRFTQKSSLNVHMRLHRGEKSYECYICKKKFSHKTLLERHVALHSASNGTPPAGTPPGARAGPPGVVACTEGTTYVCSVCPAKFDQIEQFNDHMRMHVSDG

SEQ ID NO: 62721 - protein, 741 aa, Artificial Sequence
  derived and/or modified sequence
MLERKKPKTAENQKASEENEITQPGGSSAKPGLPCLNFEAVLSPDPALIHSTHSLTNSHAHTGSSDCDISCKGMTERIHSINLHNFSNSVLETLNEQRNRGHFCDVTVRIHGSMLRAHRCVLAAGSPFFQDKLLLGYSDIEIPSVVSVQSVQKLIDFMYSGVLRVSQSEALQILTAASILQIKTVIDECTRIVSQNVGDVFPGIQDSGQDTPRGTPESGTSGQSSDTESGYLQSHPQHSVDRIYSALYACSMQNGSGERSFYSGAVVSHHETALGLPRDHHMEDPSWITRIHERSQQMERYLSTTPETTHCRKQPRPVRIQTLVGNIHIKQEMEDDYDYYGQQRVQILERNESEECTEDTDQAEGTESEPKGESFDSGVSSSIGTEPDSVEQQFGPGAARDSQAEPTQPEQAAEAPAEGGPQTNQLETGASSPERSNEVEMDSTVITVSNSSDKSVLQQPSVNTSIGQPLPSTQLYLRQTETLTSNLRMPLTLTSNTQVIGTAGNTYLPALFTTQPAGSGPKPFLFSLPQPLAGQQTQFVTVSQPGLSTFTAQLPAPQPLASSAGHSTASGQGEKKPYECTLCNKTFTAKQNYVKHMFVHTGEKPHQCSICWRSFSLKDYLIKHMVTHTGVRAYQCSICNKRFTQKSSLNVHMRLHRGEKSYECYICKKKFSHKTLLERHVALHSASNGTPPAGTPPGARAGPPGVVACTEGTTYVCSVCPAKFDQIEQFNDHMRMHVSDG

SEQ ID NO: 62722 - protein, 19 aa, Artificial Sequence
  derived and/or modified sequence
MLERKKPKTAENQKASEEN

SEQ ID NO: 62723 - DNA, 3541 bp, Artificial Sequence
  derived and/or modified sequence
gaagaagtaggggcggggggaagtttaggagttgaggaaagaagattaaagagcgcgaggagacaaataaaaagaagtgttaagaattgcctttgggactctgaaggctgaagaattgatgaattgcaagtttgtgccccatagctgcacagactgcctgaagttacatttagagactgaaatcactgcaccttaaaaacaaaagattgagctgcactgtattcctaatgtttcatcattactaacaggatattcctcatgacattgctgtctgatctttgaccatcagtctgtgacctgccccttctctttacatgcagccgctctctgctccctgccccaatgaacatctgcactaggcccaagccttggagtaatttacctgaagagtgacaccattgattttgaaactactgaagaaacccaagacagctgaaaaccagaaggcatctgaggagaatgagattactcagccgggtggatccagcgccaagccgggccttccctgcctgaactttgaagctgttttgtctccagacccagccctcatccactcaacacattcactgacaaactctcacgctcacaccgggtcatctgattgtgacatcagttgcaaggggatgaccgagcgcattcacagcatcaaccttcacaacttcagcaattccgtgctcgagaccctcaacgagcagcgcaaccgtggccacttctgtgacgtaacggtgcgcatccacgggagcatgctgcgcgcacaccgctgcgtgctggcagccggcagccccttcttccaggacaaactgctgcttggctacagcgacatcgagatcccgtcggtggtgtcagtgcagtcagtgcaaaagctcattgacttcatgtacagcggcgtgctacgggtctcgcagtcggaagctctgcagatcctcacggccgccagcatcctgcagatcaaaacagtcatcgacgagtgcacgcgcatcgtgtcacagaacgtgggcgatgtgttcccggggatccaggactcgggccaggacacgccgcggggcactcccgagtcaggcacgtcaggccagagcagcgacacggagtcgggctacctgcagagccacccacagcacagcgtggacaggatctactcggcactctacgcgtgctccatgcagaatggcagcggcgagcgctctttttacagcggcgcagtggtcagccaccacgagactgcgctcggcctgccccgcgaccaccacatggaagaccccagctggatcacacgcatccatgagcgctcgcagcagatggagcgctacctgtccaccacccccgagaccacgcactgccgcaagcagccccggcctgtgcgcatccagaccctagtgggcaacatccacatcaagcaggagatggaggacgattacgactactacgggcagcaaagggtgcagatcctggaacgcaacgaatccgaggagtgcacggaagacacagaccaggccgagggcaccgagagtgagcccaaaggtgaaagcttcgactcgggcgtcagctcctccataggcaccgagcctgactcggtggagcagcagtttgggcctggggcggcgcgggacagccaggctgaacccacccaacccgagcaggctgcagaagcccccgctgagggtggtccgcagacaaaccagctagaaacaggtgcttcctctccggagagaagcaatgaagtggagatggacagcactgttatcactgtcagcaacagctccgacaagagcgtcctacaacagccttcggtcaacacgtccatcgggcagccattgccaagtacccagctctacttacgccagacagaaaccctcaccagcaacctgaggatgcctctgaccttgaccagcaacacgcaggtcattggcacagctggcaacacctacctgccagccctcttcactacccagcccgcgggcagtggccccaagcctttcctcttcagcctgccacagcccctggcaggccagcagacccagtttgtgacagtgtcccagcccggtctgtcgacctttactgcacagctgccagcgccacagcccctggcctcatccgcaggccacagcacagccagtgggcaaggcgaaaaaaagccttatgagtgcactctctgcaacaagactttcaccgccaaacagaactacgtcaagcacatgttcgtacacacaggtgagaagccccaccaatgcagcatctgttggcgctccttctccttaaaggattaccttatcaagcacatggtgacacacacaggagtgagggcataccagtgtagtatctgcaacaagcgcttcacccagaagagctccctcaacgtgcacatgcgcctccaccggggagagaagtcctacgagtgctacatctgcaaaaagaagttctctcacaagaccctcctggagcgacacgtggccctgcacagtgccagcaatgggaccccccctgcaggcacacccccaggtgcccgcgctggccccccaggcgtggtggcctgcacggaggggaccacttacgtctgctccgtctgcccagcaaagtttgaccaaatcgagcagttcaacgaccacatgaggatgcatgtgtctgacggataagtagtatctttctctctttcttatgaacaaaacaaaacaacaacaaaaaacaaacaaacaaaaaagctatggcactagaatttaagaaatgttttggtttcatttttactttctgtttttgtttttgtttcgtttcattttgtactacatgaagaactgttttttgcctgctggtacattacatttccggaggcttgggtgaataatagttttcccagtctccctcggatggtggccttaaggcctggtagtgcttcaagaggtccactggttggatctctagctactggcctctaaatacaacccttctttacaaaaaaatcttttaaaaaaaagtaaaaaaaaaaaaaaaatttccacttgtgaagagcactacaaaaaatatataacaaaatctaaaaggcctactgtctttaagtacaccgcttgcagtgtttcagtggacattttcacaattctggccgcttggacttcacagtaaccagttaaaactgtggaatatcacttctggttgaaaacccagaggaaaggccctgctgttttccacctaccacgttgtctgatttcataaaagggctgtgggggtgggaagggcagtgggttcggtggtgtgggaaagaaagacgaatggcaggcttcttccccagattctgcccgggtccacacaccctggcccaccttctccatatccccctcttgcagcagaagccaggaagacttggacaagcaacaagcaacagtggctatcgtatttattcagtgtcttcgctgagccacagcctcagcacaatcaagagggactttcatgaaaggcaggaatgcagataaaacaaagatatcagaaatttgcacctatgtttctaggtacaagagaaggattatttccaacaatctttgcaaaaaaaaaaaaa

SEQ ID NO: 62724 - DNA, 2226 bp, Artificial Sequence
  derived and/or modified sequence
atgctggagagaaagaagcccaagaccgccgagaaccagaaggccagcgaggagaacgagatcacccagcccggcggcagcagcgccaagcccggcctgccctgcctgaacttcgaggccgtgctgagccccgaccccgccctgatccacagcacccacagcctgaccaacagccacgcccacaccggcagcagcgactgcgacatcagctgcaagggcatgaccgagagaatccacagcatcaacctgcacaacttcagcaacagcgtgctggagaccctgaacgagcagagaaacagaggccacttctgcgacgtgaccgtgagaatccacggcagcatgctgagagcccacagatgcgtgctggccgccggcagccccttcttccaggacaagctgctgctgggctacagcgacatcgagatccccagcgtggtgagcgtgcagagcgtgcagaagctgatcgacttcatgtacagcggcgtgctgagagtgagccagagcgaggccctgcagatcctgaccgccgccagcatcctgcagatcaagaccgtgatcgacgagtgcaccagaatcgtgagccagaacgtgggcgacgtgttccccggcatccaggacagcggccaggacacccccagaggcacccccgagagcggcaccagcggccagagcagcgacaccgagagcggctacctgcagagccacccccagcacagcgtggacagaatctacagcgccctgtacgcctgcagcatgcagaacggcagcggcgagagaagcttctacagcggcgccgtggtgagccaccacgagaccgccctgggcctgcccagagaccaccacatggaggaccccagctggatcaccagaatccacgagagaagccagcagatggagagatacctgagcaccacccccgagaccacccactgcagaaagcagcccagacccgtgagaatccagaccctggtgggcaacatccacatcaagcaggagatggaggacgactacgactactacggccagcagagagtgcagatcctggagagaaacgagagcgaggagtgcaccgaggacaccgaccaggccgagggcaccgagagcgagcccaagggcgagagcttcgacagcggcgtgagcagcagcatcggcaccgagcccgacagcgtggagcagcagttcggccccggcgccgccagagacagccaggccgagcccacccagcccgagcaggccgccgaggcccccgccgagggcggcccccagaccaaccagctggagaccggcgccagcagccccgagagaagcaacgaggtggagatggacagcaccgtgatcaccgtgagcaacagcagcgacaagagcgtgctgcagcagcccagcgtgaacaccagcatcggccagcccctgcccagcacccagctgtacctgagacagaccgagaccctgaccagcaacctgagaatgcccctgaccctgaccagcaacacccaggtgatcggcaccgccggcaacacctacctgcccgccctgttcaccacccagcccgccggcagcggccccaagcccttcctgttcagcctgccccagcccctggccggccagcagacccagttcgtgaccgtgagccagcccggcctgagcaccttcaccgcccagctgcccgccccccagcccctggccagcagcgccggccacagcaccgccagcggccagggcgagaagaagccctacgagtgcaccctgtgcaacaagaccttcaccgccaagcagaactacgtgaagcacatgttcgtgcacaccggcgagaagccccaccagtgcagcatctgctggagaagcttcagcctgaaggactacctgatcaagcacatggtgacccacaccggcgtgagagcctaccagtgcagcatctgcaacaagagattcacccagaagagcagcctgaacgtgcacatgagactgcacagaggcgagaagagctacgagtgctacatctgcaagaagaagttcagccacaagaccctgctggagagacacgtggccctgcacagcgccagcaacggcaccccccccgccggcaccccccccggcgccagagccggcccccccggcgtggtggcctgcaccgagggcaccacctacgtgtgcagcgtgtgccccgccaagttcgaccagatcgagcagttcaacgaccacatgagaatgcacgtgagcgacggctag

SEQ ID NO: 62725 - DNA, 60 bp, Artificial Sequence
  derived and/or modified sequence
atgctggagagaaagaagcccaagaccgccgagaaccagaaggccagcgaggagaactag

SEQ ID NO: 62726 - DNA, 2226 bp, Artificial Sequence
  derived and/or modified sequence
atgctggagcgcaagaaacccaagaccgccgaaaaccagaaggcaagtgaagagaacgagatcacccagccaggaggttctagcgctaagccggggctgccatgtttgaattttgaagcagtgttgagtccggatccagcactgatccactccacgcattctctcacaaatagccacgcacacactggctcttcagattgcgatatctcttgcaaggggatgactgagcggatccattccatcaacctccacaacttcagcaactcagtgctggaaactttgaacgagcagcgtaaccggggccacttttgtgatgtcaccgttagaatccatggctcaatgcttagggctcacaggtgtgtcctagcagccggatctccgtttttccaggataagcttctactgggctattcagacattgagattccatcggtggtgagcgtgcagagcgtgcagaagctgattgactttatgtacagtggggtgctgagggtttcacagtccgaggctctgcaaatacttaccgctgcttccatcctccagatcaaaaccgtgatcgatgaatgtacccgcattgtcagtcagaatgttggtgacgttttcccagggattcaggacagcgggcaagatacccctagagggacaccggaaagtggaacctcgggtcaatcttctgataccgaatctggatacttgcagtctcatcctcagcactcagtggaccggatctattctgctctgtacgcttgcagtatgcagaatggttccggggaacgaagcttttattccggagcagtggtctcgcatcatgaaacggcgctcggccttccccgagatcatcacatggaagatccaagttggatcactcggatccacgagagatcacagcagatggagcggtaccttagcaccacacccgagacaacacactgccggaagcagccacggcctgtgcgaatccagactttggtgggtaacattcatataaaacaagagatggaagatgattacgactactatggccaacagagggttcaaattcttgaacgcaatgagagcgaggaatgcactgaggatactgatcaggctgagggtactgaatcagaaccgaaaggggaaagtttcgacagcggcgtgtcaagctcaatcgggaccgaacccgatagtgtcgaacagcaattcggccccggcgctgcacgtgatagccaggccgagccaactcagccggaacaggcagccgaagccccggcggaaggggggccacagactaaccagctcgagacgggggcctcaagtcccgagcgctctaatgaagtggagatggattctactgttatcacggtgtccaactcatcagacaaatcagtcttgcagcagccaagcgtgaacacctccattggccagcctctcccatcaacacaactttatttgagacagaccgagactctcacctccaacctgaggatgccactgactctcacctccaatacgcaagtcatcggcaccgcggggaacacctatttacccgccttgtttactacacaacctgccggaagtggaccaaagcctttcctcttttctttaccacaaccactggctgggcagcagactcaattcgtcaccgtcagtcaaccgggcctaagtacctttacagcccaacttcccgcaccccagcccttagccagcagcgccgggcatagcactgcgtcaggacagggcgagaagaaaccatatgaatgtacactgtgtaataaaactttcaccgctaagcagaactacgttaaacatatgtttgtccataccggtgagaaaccacatcagtgtagtatttgctggagatcctttagcttgaaggactatctgattaagcacatggttacacacaccggagtccgggcataccagtgttccatttgcaacaaaagatttacccaaaagagtagtcttaacgtgcatatgcgattgcacagaggagagaagtcatacgaatgttacatctgtaagaagaagttctcccacaaaaccctgcttgagagacatgtggccctgcattccgcttcaaatgggacaccgcctgccgggaccccccccggcgcccgagccggccccccaggggttgtggcatgtacagaaggaacgacttatgtttgctctgtttgccctgccaagttcgaccaaattgagcagttcaatgatcacatgaggatgcatgtctccgacggttag

SEQ ID NO: 62727 - DNA, 60 bp, Artificial Sequence
  derived and/or modified sequence
atgctggagcggaagaagcccaaaactgccgagaaccagaaggcctcagaggaaaattag

SEQ ID NO: 62728 - DNA, 2226 bp, Artificial Sequence
  derived and/or modified sequence
atgctggagaggaagaagcccaagacagctgagaaccagaaggccagcgaggagaatgagatcacccagcccggcggcagcagcgccaagccaggcctgccctgcctgaactttgaggccgtgctgagcccagaccctgccctgatccacagcacccacagcctgaccaacagccacgcccacacaggcagcagtgactgtgacatcagctgcaagggcatgacagagcgcatccacagcatcaacctgcacaacttcagcaacagcgtgctggagaccctgaatgagcagaggaacagaggccacttctgtgatgtgacagtgcgcatccacggctccatgctgcgggcccaccgctgtgtgctggccgccggcagccccttcttccaggacaagctgctgctgggctacagcgacatcgagatccccagcgtggtgtctgtgcagagcgtgcagaagctgattgacttcatgtacagcggcgtgctgcgggtgtcccagagcgaggccctgcagatcctgacagctgccagcatcctgcagatcaagacagtgattgatgagtgcacccgcatcgtgtcccagaatgtgggagatgtgtttcctggcatccaggacagcggccaggacaccccccggggcaccccagagagcggcaccagcggccagagcagtgacacagaaagtggctacctgcagagccacccccagcacagcgtggaccgcatctacagcgccctgtatgcctgcagcatgcagaatggcagcggggagaggagcttctacagcggggctgtggtgagccaccacgagacagccctgggcctgccccgggaccaccacatggaggaccccagctggatcacccgcatccacgagaggagccagcagatggagcgctacctgagcaccaccccagagaccacccactgcaggaagcagcccaggcctgtgcgcatccagaccctggtgggcaacatccacatcaagcaggagatggaggatgattatgactactacggccagcagagggtgcagatcctggagagaaatgaaagtgaagaatgtacagaggacacagaccaggccgagggcacagagagcgagcccaagggggagagctttgattctggagtgagcagcagcattggaacagagccagattctgtggagcagcagtttggacctggggccgcccgggacagccaggccgagcccacccagcctgagcaggccgctgaggccccagctgagggcggcccccagaccaaccagctggagaccggggccagcagccctgagaggagcaatgaggtggagatggacagcaccgtcatcaccgtgagcaacagcagtgacaagtctgtgctgcagcagcccagcgtgaacaccagcatcggccagcccctgcccagcacccagctgtacctgcggcagacagagaccctgaccagcaacctgaggatgcccctgaccctgaccagcaacacccaggtgattggaacagctggcaacacctacctgcctgccctcttcaccacccagcctgctggcagcggccccaagcccttcctgttcagcctgccccagcccctggccggccagcagacccagtttgtgacagtgtcccagcccggcctgagcaccttcaccgcccagctgcctgccccccagcccctggccagcagcgctggccacagcacagccagcggccagggcgagaagaagccctatgaatgtaccctgtgcaacaagaccttcaccgccaagcagaactacgtgaagcacatgtttgtgcacactggagagaagccccaccagtgcagcatctgctggaggagcttcagcctgaaggactacctgatcaagcacatggtgacccacactggagtgcgggcctaccagtgcagcatctgcaacaagcgcttcacccagaagagcagcctgaatgtgcacatgaggctgcacagaggagagaagagctatgagtgctacatctgcaagaagaagttcagccacaagaccctgctggagcggcacgtggccctgcacagcgccagcaatggcaccccacctgctggcaccccacctggggcccgggccggccccccaggagtggtggcctgcacagagggcaccacctacgtgtgcagcgtgtgcccagccaagtttgaccagatcgagcagttcaatgaccacatgaggatgcacgtgtctgatggatag

SEQ ID NO: 62729 - DNA, 60 bp, Artificial Sequence
  derived and/or modified sequence
atgctggagaggaagaagcccaagacagctgagaaccagaaggccagcgaggagaactag

SEQ ID NO: 62730 - DNA, 2226 bp, Artificial Sequence
  derived and/or modified sequence
atgctggagcggaagaagcccaagaccgccgagaaccagaaggcctcagaggagaacgaaattacacaaccagggggctctagtgccaaacccggacttccatgcctgaatttcgaagctgttctttcacccgacccagccctgattcacagcacgcattccctcactaattcccacgctcacactgggtcgtccgattgtgatatttcgtgtaagggtatgactgagaggatccatagtataaacctgcataattttagcaactccgtattagaaacgctcaacgagcagcgcaacaggggccatttctgtgacgtgacagtgaggatccacggctccatgctcagagcccatcggtgcgtcctcgcagcaggtagccctttcttccaggacaaactcctgctcggatatagcgatattgagatcccctcagtcgtatctgttcagagcgtgcagaagttaattgacttcatgtactctggggtgttgcgcgtgagtcagagcgaagcactgcaaatacttaccgctgccagcatcctgcagatcaagaccgttatcgacgagtgtacccgtatcgtatctcagaatgtcggtgacgtcttccctggtatacaggatagtggccaggacacaccccggggcacacctgaaagtggaacttctggtcagtcctctgatacagagagcggatacctgcagtcacaccctcagcacagcgtagacagaatctattcagccctgtacgcttgcagcatgcagaatggcagtggtgagaggtccttttattctggcgccgtcgtgtcacaccatgaaaccgccctgggtctaccccgcgaccaccacatggaggaccccagctggattacccgcattcacgagaggtcacagcagatggagagatacttaagcactaccccagaaaccacccattgccgcaaacagccgaggcccgtgcgaatccaaactctggtcggaaatatccatatcaaacaggagatggaggatgattacgactactatggtcagcagagagtgcaaattctggagaggaacgagtctgaagaatgcacagaggacacggatcaggccgagggtacagagtcagaacccaaaggggaatcttttgactctggagtttcctcctcaatcggcactgagccagactcagttgagcagcaatttgggccaggggctgctcgcgactcacaggccgaacctacccaacctgagcaagcagcagaagcccctgccgaaggagggccgcagactaatcagctcgagaccggagccagcagtcccgagaggtcgaacgaagtggaaatggactccactgtgattaccgtgtccaattcatcggataaatccgtcctgcagcaaccatctgtaaatacgtccatcggacagcccctgccctctacacagttgtatctgagacagacagaaaccctgacctcaaacctgaggatgcctctgacgctgactagtaatactcaagttatcgggactgctggcaatacctatctgccagcactgttcacgacgcaacccgccggctctggtcctaagccctttctgttttcactaccccaaccactggcgggccagcagactcagtttgtcactgtgtcacagcccggactgagcacatttacggcgcaattgccagctccccagcctctcgcttcttcggccggacacagcactgcctctgggcagggtgaaaagaagccctatgagtgcaccctatgcaataaaactttcacagcaaagcagaactatgtgaaacacatgttcgtccacacaggtgaaaaacctcatcagtgcagcatttgctggagatcgttttcactcaaagattacctgatcaaacacatggtaacccacacaggcgtaagagcataccaatgcagcatctgcaacaagaggtttacacaaaaatctagcttgaatgtgcatatgcgtcttcaccggggagaaaaatcctatgaatgttacatatgtaaaaagaaattctcgcataaaacactcctagaacgacacgtggctttacactcagctagcaatggcacccctcccgcaggtactcctcctggggctagagcaggccctcccggcgtggtggcctgcactgaaggcaccacctacgtgtgctccgtatgtccagcaaaattcgaccagattgaacaattcaatgatcatatgcggatgcacgtgtccgatggctag

SEQ ID NO: 62731 - DNA, 60 bp, Artificial Sequence
  derived and/or modified sequence
atgctggagcggaagaagcccaagaccgccgagaaccagaaggccagtgaggagaattag

SEQ ID NO: 62732 - DNA, 2226 bp, Artificial Sequence
  derived and/or modified sequence
atgctcgaaaggaagaaaccaaaaacagcggagaatcaaaaggctagtgaggaaaacgagattacccaacccggtggctcctccgccaaaccaggcctgccctgtctaaactttgaggcagtcttatcacccgaccctgctctgattcactcgacccacagcttgaccaatagtcacgcccatactggcagtagtgattgcgatataagctgcaaggggatgacggagcgcatccattccatcaacctgcataacttctccaacagtgtgttggagacattaaatgagcagcggaacagaggacatttctgcgatgtgacagttaggatacacggttctatgctcagggcccaccgttgtgttctggctgccggttccccattctttcaggacaaacttctgctgggttattccgacatcgagattccatctgtggtgagtgtgcaatctgtgcagaaactgatagacttcatgtacagcggcgtactgcgagtttcacagagcgaggccttgcagattctgaccgcagccagtatcctccagattaaaacagttatcgatgagtgtacaagaattgtgagtcagaatgtgggggacgttttccccggaatccaggattcggggcaggacactcctagaggaacccccgagtctggcaccagcggccagtccagcgatactgagagcggatacctacagtcccatcctcagcatagtgtcgacaggatctattccgctctctacgcttgttccatgcaaaacggcagtggagagcggagtttctatagcggggctgtcgtgtcgcaccatgaaacggccttaggactgcccagagatcaccacatggaagacccaagctggattacacgaatccacgagcggtcacagcagatggaacgctatctgtctacgaccccagaaaccacgcattgtcgcaaacagccaagaccagttagaattcaaactctggttgggaacatccacattaaacaggagatggaggacgattacgactactatggccaacagcgcgtgcagatccttgagcgcaacgagagcgaggagtgtactgaagatacagaccaggcagaaggcaccgagagcgagcctaaaggggagtcctttgactccggagtttcttccagcatcggaacagaacctgatagcgtcgagcagcagtttggccctggggcagctcgagattcacaggccgagccaacccagcctgaacaggccgcagaagccccagcagagggcggaccccaaaccaatcaattagagaccggtgcctctagcccggaacggtccaatgaggttgaaatggactcaaccgttatcacggtgagtaactctagtgacaaatccgtccttcaacagccctccgtgaacacctctatagggcagcccttgcccagcacccagctgtacctacgccaaaccgaaactctcacatccaatctccggatgcccctgacgttaactagtaacacccaagtgataggaactgccggtaacacctatctcccggcacttttcactacccagcctgcgggatccgggccaaaacccttcctgttttccttgcctcagcctttggcaggtcagcagacccagttcgtgacagtttcgcaacccggactatctacatttactgctcagctccccgctcctcagcctcttgcctcgtctgctggacacagcaccgcttcaggtcagggagagaagaaaccttatgaatgtacgctctgtaacaaaacttttacagctaagcaaaattatgttaagcacatgtttgtccacaccggcgagaaacctcaccagtgttccatctgttggcgcagtttttcacttaaggattacctcataaaacatatggtcacgcacacaggcgtgcgcgcttaccagtgcagcatctgcaataagcgatttacgcaaaagtcgtctctgaacgtgcacatgcgactgcacaggggggagaagtcttatgagtgttacatttgcaagaagaaattctctcacaaaaccttactggagagacacgtagccctacactctgcaagtaatggaacccctccagccggaactccccctggagcacgtgcaggaccacccggtgtcgtcgcttgtacggaggggaccacctacgtgtgttccgtttgccctgctaagtttgaccagatcgagcagttcaatgatcatatgaggatgcatgtttcagatggttag

SEQ ID NO: 62733 - DNA, 60 bp, Artificial Sequence
  derived and/or modified sequence
atgttagagaggaagaagcctaagacagccgaaaaccagaaagcgagtgaggaaaattag

SEQ ID NO: 62734 - DNA, 2956 bp, Artificial Sequence
  derived and/or modified sequence
ggggcggggggaagtttaggagttgaggaaagaagattaaagagcgcgaggagacaaataaaaagaagtgttaagaattgcctttgggactctgaaggctgaagaattgatgaattgcaagtttgtgccccatagctgcacagactgcctgaagttacatttagagactgaaatcactgcaccttaaaaacaaaagattgagctgcactgtattcctaatgtttcatcattactaacaggatattcctcatgacattgctgtctgatctttgaccatcagtctgtgacctgccccttctctttacatgcagccgctctctgctccctgccccaatgaacatctgcactaggcccaagccttggagtaatttacctgaagagtgacaccattgattttgaaactactgaagaaacccaagacagctgaaaaccagaaggcatctgaggagaatgagattactcagccgggtggatccagcgccaagccgggccttccctgcctgaactttgaagctgttttgtctccagacccagccctcatccactcaacacattcactgacaaactctcacgctcacaccgggtcatctgattgtgacatcagttgcaaggggatgaccgagcgcattcacagcatcaaccttcacaacttcagcaattccgtgctcgagaccctcaacgagcagcgcaaccgtggccacttctgtgacgtaacggtgcgcatccacgggagcatgctgcgcgcacaccgctgcgtgctggcagccggcagccccttcttccaggacaaactgctgcttggctacagcgacatcgagatcccgtcggtggtgtcagtgcagtcagtgcaaaagctcattgacttcatgtacagcggcgtgctacgggtctcgcagtcggaagctctgcagatcctcacggccgccagcatcctgcagatcaaaacagtcatcgacgagtgcacgcgcatcgtgtcacagaacgtgggcgatgtgttcccggggatccaggactcgggccaggacacgccgcggggcactcccgagtcaggcacgtcaggccagagcagcgacacggagtcgggctacctgcagagccacccacagcacagcgtggacaggatctactcggcactctacgcgtgctccatgcagaatggcagcggcgagcgctctttttacagcggcgcagtggtcagccaccacgagactgcgctcggcctgccccgcgaccaccacatggaagaccccagctggatcacacgcatccatgagcgctcgcagcagatggagcgctacctgtccaccacccccgagaccacgcactgccgcaagcagccccggcctgtgcgcatccagaccctagtgggcaacatccacatcaagcaggagatggaggacgattacgactactacgggcagcaaagggtgcagatcctggaacgcaacgaatccgaggagtgcacggaagacacagaccaggccgagggcaccgagagtgagcccaaaggtgaaagcttcgactcgggcgtcagctcctccataggcaccgagcctgactcggtggagcagcagtttgggcctggggcggcgcgggacagccaggctgaacccacccaacccgagcaggctgcagaagcccccgctgagggtggtccgcagacaaaccagctagaaacaggtgcttcctctccggagagaagcaatgaagtggagatggacagcactgttatcactgtcagcaacagctccgacaagagcgtcctacaacagccttcggtcaacacgtccatcgggcagccattgccaagtacccagctctacttacgccagacagaaaccctcaccagcaacctgaggatgcctctgaccttgaccagcaacacgcaggtcattggcacagctggcaacacctacctgccagccctcttcactacccagcccgcgggcagtggccccaagcctttcctcttcagcctgccacagcccctggcaggccagcagacccagtttgtgacagtgtcccagcccggtctgtcgacctttactgcacagctgccagcgccacagcccctggcctcatccgcaggccacagcacagccagtgggcaaggcgaaaaaaagccttatgagtgcactctctgcaacaagactttcaccgccaaacagaactacgtcaagcacatgttcgtacacacaggtgagaagccccaccaatgcagcatctgttggcgctccttctccttaaaggattaccttatcaagcacatggtgacacacacaggagtgagggcataccagtgtagtatctgcaacaagcgcttcacccagaagagctccctcaacgtgcacatgcgcctccaccggggagagaagtcctacgagtgctacatctgcaaaaagaagttctctcacaagaccctcctggagcgacacgtggccctgcacagtgccagcaatgggaccccccctgcaggcacacccccaggtgcccgcgctggccccccaggcgtggtggcctgcacggaggggaccacttacgtctgctccgtctgcccagcaaagtttgaccaaatcgagcagttcaacgaccacatgaggatgcatgtgtctgacggataagtagtatctttctctctttcttatgaacaaaacaaaacaacaacaaaaaacaaacaaacaaaaaagctatggcactagaatttaagaaatgttttggtttcatttttactttctgtttttgtttttgtttcgtttcattttgtactacatgaagaactgttttttgcctgctggtacattacatttccggaggcttgggtgaataatagttttcccagtctccctcggatggtggccttaaggcctggtagtgcttcaagaggtccactggttggatctctagctactggcctctaaatacaacccttctttacaaaaaaatcttttaaaaaaaa

SEQ ID NO: 62735 - DNA, 3323 bp, Artificial Sequence
  derived and/or modified sequence
acttgttgcttacggtacagtccagcatgagctggaaatgtaggaacctcagcctcccgagcagaaagaatctttgaccatcagtctgtgacctgccccttctctttacatgcagccgctctctgctccctgccccaatgaacatctgcactaggcccaagccttggagtaatttacctgaagagtgacaccattgattttgaaactactgaagaaacccaagacagctgaaaaccagaaggcatctgaggagaatgagattactcagccgggtggatccagcgccaagccgggccttccctgcctgaactttgaagctgttttgtctccagacccagccctcatccactcaacacattcactgacaaactctcacgctcacaccgggtcatctgattgtgacatcagttgcaaggggatgaccgagcgcattcacagcatcaaccttcacaacttcagcaattccgtgctcgagaccctcaacgagcagcgcaaccgtggccacttctgtgacgtaacggtgcgcatccacgggagcatgctgcgcgcacaccgctgcgtgctggcagccggcagccccttcttccaggacaaactgctgcttggctacagcgacatcgagatcccgtcggtggtgtcagtgcagtcagtgcaaaagctcattgacttcatgtacagcggcgtgctacgggtctcgcagtcggaagctctgcagatcctcacggccgccagcatcctgcagatcaaaacagtcatcgacgagtgcacgcgcatcgtgtcacagaacgtgggcgatgtgttcccggggatccaggactcgggccaggacacgccgcggggcactcccgagtcaggcacgtcaggccagagcagcgacacggagtcgggctacctgcagagccacccacagcacagcgtggacaggatctactcggcactctacgcgtgctccatgcagaatggcagcggcgagcgctctttttacagcggcgcagtggtcagccaccacgagactgcgctcggcctgccccgcgaccaccacatggaagaccccagctggatcacacgcatccatgagcgctcgcagcagatggagcgctacctgtccaccacccccgagaccacgcactgccgcaagcagccccggcctgtgcgcatccagaccctagtgggcaacatccacatcaagcaggagatggaggacgattacgactactacgggcagcaaagggtgcagatcctggaacgcaacgaatccgaggagtgcacggaagacacagaccaggccgagggcaccgagagtgagcccaaaggtgaaagcttcgactcgggcgtcagctcctccataggcaccgagcctgactcggtggagcagcagtttgggcctggggcggcgcgggacagccaggctgaacccacccaacccgagcaggctgcagaagcccccgctgagggtggtccgcagacaaaccagctagaaacaggtgcttcctctccggagagaagcaatgaagtggagatggacagcactgttatcactgtcagcaacagctccgacaagagcgtcctacaacagccttcggtcaacacgtccatcgggcagccattgccaagtacccagctctacttacgccagacagaaaccctcaccagcaacctgaggatgcctctgaccttgaccagcaacacgcaggtcattggcacagctggcaacacctacctgccagccctcttcactacccagcccgcgggcagtggccccaagcctttcctcttcagcctgccacagcccctggcaggccagcagacccagtttgtgacagtgtcccagcccggtctgtcgacctttactgcacagctgccagcgccacagcccctggcctcatccgcaggccacagcacagccagtgggcaaggcgaaaaaaagccttatgagtgcactctctgcaacaagactttcaccgccaaacagaactacgtcaagcacatgttcgtacacacaggtgagaagccccaccaatgcagcatctgttggcgctccttctccttaaaggattaccttatcaagcacatggtgacacacacaggagtgagggcataccagtgtagtatctgcaacaagcgcttcacccagaagagctccctcaacgtgcacatgcgcctccaccggggagagaagtcctacgagtgctacatctgcaaaaagaagttctctcacaagaccctcctggagcgacacgtggccctgcacagtgccagcaatgggaccccccctgcaggcacacccccaggtgcccgcgctggccccccaggcgtggtggcctgcacggaggggaccacttacgtctgctccgtctgcccagcaaagtttgaccaaatcgagcagttcaacgaccacatgaggatgcatgtgtctgacggataagtagtatctttctctctttcttatgaacaaaacaaaacaacaacaaaaaacaaacaaacaaaaaagctatggcactagaatttaagaaatgttttggtttcatttttactttctgtttttgtttttgtttcgtttcattttgtactacatgaagaactgttttttgcctgctggtacattacatttccggaggcttgggtgaataatagttttcccagtctccctcggatggtggccttaaggcctggtagtgcttcaagaggtccactggttggatctctagctactggcctctaaatacaacccttctttacaaaaaaatcttttaaaaaaaagtaaaaaaaaaaaaaaaatttccacttgtgaagagcactacaaaaaatatataacaaaatctaaaaggcctactgtctttaagtacaccgcttgcagtgtttcagtggacattttcacaattctggccgcttggacttcacagtaaccagttaaaactgtggaatatcacttctggttgaaaacccagaggaaaggccctgctgttttccacctaccacgttgtctgatttcataaaagggctgtgggggtgggaagggcagtgggttcggtggtgtgggaaagaaagacgaatggcaggcttcttccccagattctgcccgggtccacacaccctggcccaccttctccatatccccctcttgcagcagaagccaggaagacttggacaagcaacaagcaacagtggctatcgtatttattcagtgtcttcgctgagccacagcctcagcacaatcaagagggactttcatgaaaggcaggaatgcagataaaacaaagatatcagaaatttgcacctatgtttctaggtacaagagaaggattatttccaacaatctttgc

SEQ ID NO: 62736 - DNA, 3740 bp, Artificial Sequence
  derived and/or modified sequence
ggaattttatctctgctcacagtctacattacaacattagttcattctgggcactttagcttccttgaatctccagttgatctcacacccatgcctatgatattcttctcctggttaatcaagaattctctatttctgctccgtcatccatgccactacaaataaaaagaagtgttaagaattgcctttgggactctgaaggctgaagaattgatgaattgcaagtttgtgccccatagctgcacagcctatgtctaagcacagctcatcttcacaaactgaagtggatcttgatttctggaaatgtccaaataatgacaacaaccccatggaggtggatacatcagagtcagctggaggtggtcagaattatttgcaatgtttgggaaagcacctaccaaggcttcctattacctatttcacagaatgtttcatcattactaacaggatattcctcatgacattgctgtctgatctttgaccatcagtctgtgacctgccccttctctttacatgcagccgctctctgctccctgccccaatgaacatctgcactaggcccaagccttggagtaatttacctgaagagtgacaccattgattttgaaactactgaagaaacccaagacagctgaaaaccagaaggcatctgaggagaatgagattactcagccgggtggatccagcgccaagccgggccttccctgcctgaactttgaagctgttttgtctccagacccagccctcatccactcaacacattcactgacaaactctcacgctcacaccgggtcatctgattgtgacatcagttgcaaggggatgaccgagcgcattcacagcatcaaccttcacaacttcagcaattccgtgctcgagaccctcaacgagcagcgcaaccgtggccacttctgtgacgtaacggtgcgcatccacgggagcatgctgcgcgcacaccgctgcgtgctggcagccggcagccccttcttccaggacaaactgctgcttggctacagcgacatcgagatcccgtcggtggtgtcagtgcagtcagtgcaaaagctcattgacttcatgtacagcggcgtgctacgggtctcgcagtcggaagctctgcagatcctcacggccgccagcatcctgcagatcaaaacagtcatcgacgagtgcacgcgcatcgtgtcacagaacgtgggcgatgtgttcccggggatccaggactcgggccaggacacgccgcggggcactcccgagtcaggcacgtcaggccagagcagcgacacggagtcgggctacctgcagagccacccacagcacagcgtggacaggatctactcggcactctacgcgtgctccatgcagaatggcagcggcgagcgctctttttacagcggcgcagtggtcagccaccacgagactgcgctcggcctgccccgcgaccaccacatggaagaccccagctggatcacacgcatccatgagcgctcgcagcagatggagcgctacctgtccaccacccccgagaccacgcactgccgcaagcagccccggcctgtgcgcatccagaccctagtgggcaacatccacatcaagcaggagatggaggacgattacgactactacgggcagcaaagggtgcagatcctggaacgcaacgaatccgaggagtgcacggaagacacagaccaggccgagggcaccgagagtgagcccaaaggtgaaagcttcgactcgggcgtcagctcctccataggcaccgagcctgactcggtggagcagcagtttgggcctggggcggcgcgggacagccaggctgaacccacccaacccgagcaggctgcagaagcccccgctgagggtggtccgcagacaaaccagctagaaacaggtgcttcctctccggagagaagcaatgaagtggagatggacagcactgttatcactgtcagcaacagctccgacaagagcgtcctacaacagccttcggtcaacacgtccatcgggcagccattgccaagtacccagctctacttacgccagacagaaaccctcaccagcaacctgaggatgcctctgaccttgaccagcaacacgcaggtcattggcacagctggcaacacctacctgccagccctcttcactacccagcccgcgggcagtggccccaagcctttcctcttcagcctgccacagcccctggcaggccagcagacccagtttgtgacagtgtcccagcccggtctgtcgacctttactgcacagctgccagcgccacagcccctggcctcatccgcaggccacagcacagccagtgggcaaggcgaaaaaaagccttatgagtgcactctctgcaacaagactttcaccgccaaacagaactacgtcaagcacatgttcgtacacacaggtgagaagccccaccaatgcagcatctgttggcgctccttctccttaaaggattaccttatcaagcacatggtgacacacacaggagtgagggcataccagtgtagtatctgcaacaagcgcttcacccagaagagctccctcaacgtgcacatgcgcctccaccggggagagaagtcctacgagtgctacatctgcaaaaagaagttctctcacaagaccctcctggagcgacacgtggccctgcacagtgccagcaatgggaccccccctgcaggcacacccccaggtgcccgcgctggccccccaggcgtggtggcctgcacggaggggaccacttacgtctgctccgtctgcccagcaaagtttgaccaaatcgagcagttcaacgaccacatgaggatgcatgtgtctgacggataagtagtatctttctctctttcttatgaacaaaacaaaacaacaacaaaaaacaaacaaacaaaaaagctatggcactagaatttaagaaatgttttggtttcatttttactttctgtttttgtttttgtttcgtttcattttgtactacatgaagaactgttttttgcctgctggtacattacatttccggaggcttgggtgaataatagttttcccagtctccctcggatggtggccttaaggcctggtagtgcttcaagaggtccactggttggatctctagctactggcctctaaatacaacccttctttacaaaaaaatcttttaaaaaaaagtaaaaaaaaaaaaaaaatttccacttgtgaagagcactacaaaaaatatataacaaaatctaaaaggcctactgtctttaagtacaccgcttgcagtgtttcagtggacattttcacaattctggccgcttggacttcacagtaaccagttaaaactgtggaatatcacttctggttgaaaacccagaggaaaggccctgctgttttccacctaccacgttgtctgatttcataaaagggctgtgggggtgggaagggcagtgggttcggtggtgtgggaaagaaagacgaatggcaggcttcttccccagattctgcccgggtccacacaccctggcccaccttctccatatccccctcttgcagcagaagccaggaagacttggacaagcaacaagcaacagtggctatcgtatttattcagtgtcttcgctgagccacagcctcagcacaatcaagagggactttcatgaaaggcaggaatgcagataaaacaaagatatcagaaatttgcacctatgtttctaggtacaagagaaggattatttccaacaatctttgcaaaaaaaaaaaaa

SEQ ID NO: 62737 - DNA, 2816 bp, Artificial Sequence
  derived and/or modified sequence
acatttcaaaaaaaatacatagactgatgtttcagacttgtgcagcataagcctacagggtacgaagaatgaactctgagaatgtttggagaatgtttcatcattactaacaggatattcctcatgacattgctgtctgatctttgaccatcagtctgtgacctgccccttctctttacatgcagccgctctctgctccctgccccaatgaacatctgcactaggcccaagccttggagtaatttacctgaagagtgacaccattgattttgaaactactgaagaaacccaagacagctgaaaaccagaaggcatctgaggagaatgagattactcagccgggtggatccagcgccaagccgggccttccctgcctgaactttgaagctgttttgtctccagacccagccctcatccactcaacacattcactgacaaactctcacgctcacaccgggtcatctgattgtgacatcagttgcaaggggatgaccgagcgcattcacagcatcaaccttcacaacttcagcaattccgtgctcgagaccctcaacgagcagcgcaaccgtggccacttctgtgacgtaacggtgcgcatccacgggagcatgctgcgcgcacaccgctgcgtgctggcagccggcagccccttcttccaggacaaactgctgcttggctacagcgacatcgagatcccgtcggtggtgtcagtgcagtcagtgcaaaagctcattgacttcatgtacagcggcgtgctacgggtctcgcagtcggaagctctgcagatcctcacggccgccagcatcctgcagatcaaaacagtcatcgacgagtgcacgcgcatcgtgtcacagaacgtgggcgatgtgttcccggggatccaggactcgggccaggacacgccgcggggcactcccgagtcaggcacgtcaggccagagcagcgacacggagtcgggctacctgcagagccacccacagcacagcgtggacaggatctactcggcactctacgcgtgctccatgcagaatggcagcggcgagcgctctttttacagcggcgcagtggtcagccaccacgagactgcgctcggcctgccccgcgaccaccacatggaagaccccagctggatcacacgcatccatgagcgctcgcagcagatggagcgctacctgtccaccacccccgagaccacgcactgccgcaagcagccccggcctgtgcgcatccagaccctagtgggcaacatccacatcaagcaggagatggaggacgattacgactactacgggcagcaaagggtgcagatcctggaacgcaacgaatccgaggagtgcacggaagacacagaccaggccgagggcaccgagagtgagcccaaaggtgaaagcttcgactcgggcgtcagctcctccataggcaccgagcctgactcggtggagcagcagtttgggcctggggcggcgcgggacagccaggctgaacccacccaacccgagcaggctgcagaagcccccgctgagggtggtccgcagacaaaccagctagaaacaggtgcttcctctccggagagaagcaatgaagtggagatggacagcactgttatcactgtcagcaacagctccgacaagagcgtcctacaacagccttcggtcaacacgtccatcgggcagccattgccaagtacccagctctacttacgccagacagaaaccctcaccagcaacctgaggatgcctctgaccttgaccagcaacacgcaggtcattggcacagctggcaacacctacctgccagccctcttcactacccagcccgcgggcagtggccccaagcctttcctcttcagcctgccacagcccctggcaggccagcagacccagtttgtgacagtgtcccagcccggtctgtcgacctttactgcacagctgccagcgccacagcccctggcctcatccgcaggccacagcacagccagtgggcaaggcgaaaaaaagccttatgagtgcactctctgcaacaagactttcaccgccaaacagaactacgtcaagcacatgttcgtacacacaggtgagaagccccaccaatgcagcatctgttggcgctccttctccttaaaggattaccttatcaagcacatggtgacacacacaggagtgagggcataccagtgtagtatctgcaacaagcgcttcacccagaagagctccctcaacgtgcacatgcgcctccaccggggagagaagtcctacgagtgctacatctgcaaaaagaagttctctcacaagaccctcctggagcgacacgtggccctgcacagtgccagcaatgggaccccccctgcaggcacacccccaggtgcccgcgctggccccccaggcgtggtggcctgcacggaggggaccacttacgtctgctccgtctgcccagcaaagtttgaccaaatcgagcagttcaacgaccacatgaggatgcatgtgtctgacggataagtagtatctttctctctttcttatgaacaaaacaaaacaacaacaaaaaacaaacaaacaaaaaagctatggcactagaatttaagaaatgttttggtttcatttttactttctgtttttgtttttgtttcgtttcattttgtactacatgaagaactgttttttgcctgctggtacattacatttccggaggcttgggtgaataatagttttcccagtctccctcggatggtggccttaaggcctggtagtgcttcaagaggtccactggttggatctctagctactggcctctaaatacaacccttctttacaaaaaaa

SEQ ID NO: 62738 - DNA, 587 bp, Artificial Sequence
  derived and/or modified sequence
aaggtttttcaaagaggcagtggaggaggttctaataaatttggaaggaaacagttccctgtcttgggaaaaggagaactcctgactgattagcattcacaccagatgcagccgctctctgctccctgccccaatgaacatctgcactaggcccaagccttggagtaatttacctgaagagtgacaccattgattttgaaactactgaagaaacccaagacagctgaaaaccagaaggcatctgaggagaatgagattactcagccgggtggatccagcgccaagccgggccttccctgcctgaactttgaagctgttttgtctccagacccagccctcatccactcaacacattcactgacaaactctcacgctcacaccgggtcatctgattgtgacatcagttgcaaggggatgaccgagcgcattcacagcatcaaccttcacaacttcagcaattccgtgctcgagaccctcaacgagcagcgcaaccgtggccacttctgtgacgtaacggtgcgcatccacgggagcatgctgcgcgcacaccgctgcgtgctggcagccggcagccccttcttccagga

SEQ ID NO: 62739 - DNA, 3133 bp, Artificial Sequence
  derived and/or modified sequence
atctagcctcccagcctcactgcattatttgtgaaaatggccagtgtgaggaattattaattaaagctaacaaatcaccctgacaagctgtgccctggcatggctgaaggttgattggcgaaagtcttctcctttggagaaaagactttttgtgctcgtgacgcagtcagggacggattattgaatatgcaagttagaagaaaaatcacaggacaagcaaattgagtatttactggcaaataattgcactcttaagctgtggctctcttcctaaattcttaacattctcgagggttagaaagaaacacagaaaaatgcatcggtacagagtacatttcaaaaaaaatacatagactgatgtttcagacttgtgcagaatgtttcatcattactaacaggatattcctcatgacattgctgtctgatctttgaccatcagtctgtgacctgccccttctctttacatgcagccgctctctgctccctgccccaatgaacatctgcactaggcccaagccttggagtaatttacctgaagagtgacaccattgattttgaaactactgaagaaacccaagacagctgaaaaccagaaggcatctgaggagaatgagattactcagccgggtggatccagcgccaagccgggccttccctgcctgaactttgaagctgttttgtctccagacccagccctcatccactcaacacattcactgacaaactctcacgctcacaccgggtcatctgattgtgacatcagttgcaaggggatgaccgagcgcattcacagcatcaaccttcacaacttcagcaattccgtgctcgagaccctcaacgagcagcgcaaccgtggccacttctgtgacgtaacggtgcgcatccacgggagcatgctgcgcgcacaccgctgcgtgctggcagccggcagccccttcttccaggacaaactgctgcttggctacagcgacatcgagatcccgtcggtggtgtcagtgcagtcagtgcaaaagctcattgacttcatgtacagcggcgtgctacgggtctcgcagtcggaagctctgcagatcctcacggccgccagcatcctgcagatcaaaacagtcatcgacgagtgcacgcgcatcgtgtcacagaacgtgggcgatgtgttcccggggatccaggactcgggccaggacacgccgcggggcactcccgagtcaggcacgtcaggccagagcagcgacacggagtcgggctacctgcagagccacccacagcacagcgtggacaggatctactcggcactctacgcgtgctccatgcagaatggcagcggcgagcgctctttttacagcggcgcagtggtcagccaccacgagactgcgctcggcctgccccgcgaccaccacatggaagaccccagctggatcacacgcatccatgagcgctcgcagcagatggagcgctacctgtccaccacccccgagaccacgcactgccgcaagcagccccggcctgtgcgcatccagaccctagtgggcaacatccacatcaagcaggagatggaggacgattacgactactacgggcagcaaagggtgcagatcctggaacgcaacgaatccgaggagtgcacggaagacacagaccaggccgagggcaccgagagtgagcccaaaggtgaaagcttcgactcgggcgtcagctcctccataggcaccgagcctgactcggtggagcagcagtttgggcctggggcggcgcgggacagccaggctgaacccacccaacccgagcaggctgcagaagcccccgctgagggtggtccgcagacaaaccagctagaaacaggtgcttcctctccggagagaagcaatgaagtggagatggacagcactgttatcactgtcagcaacagctccgacaagagcgtcctacaacagccttcggtcaacacgtccatcgggcagccattgccaagtacccagctctacttacgccagacagaaaccctcaccagcaacctgaggatgcctctgaccttgaccagcaacacgcaggtcattggcacagctggcaacacctacctgccagccctcttcactacccagcccgcgggcagtggccccaagcctttcctcttcagcctgccacagcccctggcaggccagcagacccagtttgtgacagtgtcccagcccggtctgtcgacctttactgcacagctgccagcgccacagcccctggcctcatccgcaggccacagcacagccagtgggcaaggcgaaaaaaagccttatgagtgcactctctgcaacaagactttcaccgccaaacagaactacgtcaagcacatgttcgtacacacaggtgagaagccccaccaatgcagcatctgttggcgctccttctccttaaaggattaccttatcaagcacatggtgacacacacaggagtgagggcataccagtgtagtatctgcaacaagcgcttcacccagaagagctccctcaacgtgcacatgcgcctccaccggggagagaagtcctacgagtgctacatctgcaaaaagaagttctctcacaagaccctcctggagcgacacgtggccctgcacagtgccagcaatgggaccccccctgcaggcacacccccaggtgcccgcgctggccccccaggcgtggtggcctgcacggaggggaccacttacgtctgctccgtctgcccagcaaagtttgaccaaatcgagcagttcaacgaccacatgaggatgcatgtgtctgacggataagtagtatctttctctctttcttatgaacaaaacaaaacaacaacaaaaaacaaacaaacaaaaaagctatggcactagaatttaagaaatgttttggtttcatttttactttctgtttttgtttttgtttcgtttcattttgtactacatgaagaactgttttttgcctgctggtacattacatttccggaggcttgggtgaataatagttttcccagtctccctcggatggtggccttaaggcctggtagtgcttcaagaggtccactggttggatctctagctactggcctctaaatacaacccttctttacaaaaaaatcttttaaaaaaaagtaaaaaaaaaaaaaaaa

SEQ ID NO: 62740 - DNA, 2757 bp, Artificial Sequence
  derived and/or modified sequence
ttgggaaacagcccagtggtataaggatgaggaaactgaagcccagagaggtgaagtgaggtgcccaaggccacacagcaagttagaggcacagctagtacggtagctcaagtctcctgactcccagtccagtgctcctcccattactccacgagtcctgtctctaagcttcctgacaaatgctagaacggaagaaacccaagacagctgaaaaccagaaggcatctgaggagaatgagattactcagccgggtggatccagcgccaagccgggccttccctgcctgaactttgaagctgttttgtctccagacccagccctcatccactcaacacattcactgacaaactctcacgctcacaccgggtcatctgattgtgacatcagttgcaaggggatgaccgagcgcattcacagcatcaaccttcacaacttcagcaattccgtgctcgagaccctcaacgagcagcgcaaccgtggccacttctgtgacgtaacggtgcgcatccacgggagcatgctgcgcgcacaccgctgcgtgctggcagccggcagccccttcttccaggacaaactgctgcttggctacagcgacatcgagatcccgtcggtggtgtcagtgcagtcagtgcaaaagctcattgacttcatgtacagcggcgtgctacgggtctcgcagtcggaagctctgcagatcctcacggccgccagcatcctgcagatcaaaacagtcatcgacgagtgcacgcgcatcgtgtcacagaacgtgggcgatgtgttcccggggatccaggactcgggccaggacacgccgcggggcactcccgagtcaggcacgtcaggccagagcagcgacacggagtcgggctacctgcagagccacccacagcacagcgtggacaggatctactcggcactctacgcgtgctccatgcagaatggcagcggcgagcgctctttttacagcggcgcagtggtcagccaccacgagactgcgctcggcctgccccgcgaccaccacatggaagaccccagctggatcacacgcatccatgagcgctcgcagcagatggagcgctacctgtccaccacccccgagaccacgcactgccgcaagcagccccggcctgtgcgcatccagaccctagtgggcaacatccacatcaagcaggagatggaggacgattacgactactacgggcagcaaagggtgcagatcctggaacgcaacgaatccgaggagtgcacggaagacacagaccaggccgagggcaccgagagtgagcccaaaggtgaaagcttcgactcgggcgtcagctcctccataggcaccgagcctgactcggtggagcagcagtttgggcctggggcggcgcgggacagccaggctgaacccacccaacccgagcaggctgcagaagcccccgctgagggtggtccgcagacaaaccagctagaaacaggtgcttcctctccggagagaagcaatgaagtggagatggacagcactgttatcactgtcagcaacagctccgacaagagcgtcctacaacagccttcggtcaacacgtccatcgggcagccattgccaagtacccagctctacttacgccagacagaaaccctcaccagcaacctgaggatgcctctgaccttgaccagcaacacgcaggtcattggcacagctggcaacacctacctgccagccctcttcactacccagcccgcgggcagtggccccaagcctttcctcttcagcctgccacagcccctggcaggccagcagacccagtttgtgacagtgtcccagcccggtctgtcgacctttactgcacagctgccagcgccacagcccctggcctcatccgcaggccacagcacagccagtgggcaaggcgaaaaaaagccttatgagtgcactctctgcaacaagactttcaccgccaaacagaactacgtcaagcacatgttcgtacacacaggtgagaagccccaccaatgcagcatctgttggcgctccttctccttaaaggattaccttatcaagcacatggtgacacacacaggagtgagggcataccagtgtagtatctgcaacaagcgcttcacccagaagagctccctcaacgtgcacatgcgcctccaccggggagagaagtcctacgagtgctacatctgcaaaaagaagttctctcacaagaccctcctggagcgacacgtggccctgcacagtgccagcaatgggaccccccctgcaggcacacccccaggtgcccgcgctggccccccaggcgtggtggcctgcacggaggggaccacttacgtctgctccgtctgcccagcaaagtttgaccaaatcgagcagttcaacgaccacatgaggatgcatgtgtctgacggataagtagtatctttctctctttcttatgaacaaaacaaaacaacaacaaaaaacaaacaaacaaaaaagctatggcactagaatttaagaaatgttttggtttcatttttactttctgtttttgtttttgtttcgtttcattttgtactacatgaagaactgttttttgcctgctggtacattacatttccggaggcttgggtgaataatagttttcccagtctccctcggatggtggccttaaggcctggtagtgcttcaagaggtccactggttggatctctagctactggcctctaaatacaacccttctttacaaaaaaatcttttaaaaaaaagtaaaaaaaaaaaaaaa

SEQ ID NO: 62741 - DNA, 2800 bp, Artificial Sequence
  derived and/or modified sequence
gcagggagcttaacagccaggcctggacaccctcaagagactgtgtgctgattctcagtcgtcactccttggatcaggaaccatagtcctgatctttgaccatcagtctgtgacctgccccttctctttacatgcagccgctctctgctccctgccccaatgaacatctgcactaggcccaagccttggagtaatttacctgaagagtgacaccattgattttgaaactactgaagaaacccaagacagctgaaaaccagaaggcatctgaggagaatgagattactcagccgggtggatccagcgccaagccgggccttccctgcctgaactttgaagctgttttgtctccagacccagccctcatccactcaacacattcactgacaaactctcacgctcacaccgggtcatctgattgtgacatcagttgcaaggggatgaccgagcgcattcacagcatcaaccttcacaacttcagcaattccgtgctcgagaccctcaacgagcagcgcaaccgtggccacttctgtgacgtaacggtgcgcatccacgggagcatgctgcgcgcacaccgctgcgtgctggcagccggcagccccttcttccaggacaaactgctgcttggctacagcgacatcgagatcccgtcggtggtgtcagtgcagtcagtgcaaaagctcattgacttcatgtacagcggcgtgctacgggtctcgcagtcggaagctctgcagatcctcacggccgccagcatcctgcagatcaaaacagtcatcgacgagtgcacgcgcatcgtgtcacagaacgtgggcgatgtgttcccggggatccaggactcgggccaggacacgccgcggggcactcccgagtcaggcacgtcaggccagagcagcgacacggagtcgggctacctgcagagccacccacagcacagcgtggacaggatctactcggcactctacgcgtgctccatgcagaatggcagcggcgagcgctctttttacagcggcgcagtggtcagccaccacgagactgcgctcggcctgccccgcgaccaccacatggaagaccccagctggatcacacgcatccatgagcgctcgcagcagatggagcgctacctgtccaccacccccgagaccacgcactgccgcaagcagccccggcctgtgcgcatccagaccctagtgggcaacatccacatcaagcaggagatggaggacgattacgactactacgggcagcaaagggtgcagatcctggaacgcaacgaatccgaggagtgcacggaagacacagaccaggccgagggcaccgagagtgagcccaaaggtgaaagcttcgactcgggcgtcagctcctccataggcaccgagcctgactcggtggagcagcagtttgggcctggggcggcgcgggacagccaggctgaacccacccaacccgagcaggctgcagaagcccccgctgagggtggtccgcagacaaaccagctagaaacaggtgcttcctctccggagagaagcaatgaagtggagatggacagcactgttatcactgtcagcaacagctccgacaagagcgtcctacaacagccttcggtcaacacgtccatcgggcagccattgccaagtacccagctctacttacgccagacagaaaccctcaccagcaacctgaggatgcctctgaccttgaccagcaacacgcaggtcattggcacagctggcaacacctacctgccagccctcttcactacccagcccgcgggcagtggccccaagcctttcctcttcagcctgccacagcccctggcaggccagcagacccagtttgtgacagtgtcccagcccggtctgtcgacctttactgcacagctgccagcgccacagcccctggcctcatccgcaggccacagcacagccagtgggcaaggcgaaaaaaagccttatgagtgcactctctgcaacaagactttcaccgccaaacagaactacgtcaagcacatgttcgtacacacaggtgagaagccccaccaatgcagcatctgttggcgctccttctccttaaaggattaccttatcaagcacatggtgacacacacaggagtgagggcataccagtgtagtatctgcaacaagcgcttcacccagaagagctccctcaacgtgcacatgcgcctccaccggggagagaagtcctacgagtgctacatctgcaaaaagaagttctctcacaagaccctcctggagcgacacgtggccctgcacagtgccagcaatgggaccccccctgcaggcacacccccaggtgcccgcgctggccccccaggcgtggtggcctgcacggaggggaccacttacgtctgctccgtctgcccagcaaagtttgaccaaatcgagcagttcaacgaccacatgaggatgcatgtgtctgacggataagtagtatctttctctctttcttatgaacaaaacaaaacaacaacaaaaaacaaacaaacaaaaaagctatggcactagaatttaagaaatgttttggtttcatttttactttctgtttttgtttttgtttcgtttcattttgtactacatgaagaactgttttttgcctgctggtacattacatttccggaggcttgggtgaataatagttttcccagtctccctcggatggtggccttaaggcctggtagtgcttcaagaggtccactggttggatctctagctactggcctctaaatacaacccttctttacaaaaaaatcttttaaaaaaaagtaaaaaaaaaaaaaaaa

SEQ ID NO: 62742 - DNA, 551 bp, Artificial Sequence
  derived and/or modified sequence
actcagaagagacacagacaggagagaggaggaggggtggggggagagagagagaatcaatatcaagaatagaaggagctccgaagccattttttttttaaagaagtatcgggacttgggagagggtgacaaagaaggtttttcaaagaggcagtggaggaggttctaataaatttggaaggaaacagttccctgtcttgggaaaaggagaactcctgactgattagcattcacaccagatgcagccgctctctgctccctgccccaatgaacatctgcactaggcccaagccttggagtaatttacctgaagagtgacaccattgattttgaaactactatgaggaaactgaagcccagagaggtgaagtgaggtgcccaaggccacacagcaagttagaggcacagctagtacggtagctcaagtctcctgactcccagtccagtgctcctcccattactccacgagtcctgtctctaagcttcctgacaaatgctagaacggaagaaacccaagacagctgaaaaccagaaggcatctgaggagaatg

SEQ ID NO: 62743 - protein, 57 aa, Artificial Sequence
  derived and/or modified sequence
MTERIHSINLHNFSNSVLETLNEQRNRGHFCDVTVRIHGSMLRAHRCVLAAGSPFFQ

SEQ ID NO: 62744 - DNA, 2007 bp, Artificial Sequence
  derived and/or modified sequence
atgaccgagagaatccacagcatcaacctgcacaacttcagcaacagcgtgctggagaccctgaacgagcagagaaacagaggccacttctgcgacgtgaccgtgagaatccacggcagcatgctgagagcccacagatgcgtgctggccgccggcagccccttcttccaggacaagctgctgctgggctacagcgacatcgagatccccagcgtggtgagcgtgcagagcgtgcagaagctgatcgacttcatgtacagcggcgtgctgagagtgagccagagcgaggccctgcagatcctgaccgccgccagcatcctgcagatcaagaccgtgatcgacgagtgcaccagaatcgtgagccagaacgtgggcgacgtgttccccggcatccaggacagcggccaggacacccccagaggcacccccgagagcggcaccagcggccagagcagcgacaccgagagcggctacctgcagagccacccccagcacagcgtggacagaatctacagcgccctgtacgcctgcagcatgcagaacggcagcggcgagagaagcttctacagcggcgccgtggtgagccaccacgagaccgccctgggcctgcccagagaccaccacatggaggaccccagctggatcaccagaatccacgagagaagccagcagatggagagatacctgagcaccacccccgagaccacccactgcagaaagcagcccagacccgtgagaatccagaccctggtgggcaacatccacatcaagcaggagatggaggacgactacgactactacggccagcagagagtgcagatcctggagagaaacgagagcgaggagtgcaccgaggacaccgaccaggccgagggcaccgagagcgagcccaagggcgagagcttcgacagcggcgtgagcagcagcatcggcaccgagcccgacagcgtggagcagcagttcggccccggcgccgccagagacagccaggccgagcccacccagcccgagcaggccgccgaggcccccgccgagggcggcccccagaccaaccagctggagaccggcgccagcagccccgagagaagcaacgaggtggagatggacagcaccgtgatcaccgtgagcaacagcagcgacaagagcgtgctgcagcagcccagcgtgaacaccagcatcggccagcccctgcccagcacccagctgtacctgagacagaccgagaccctgaccagcaacctgagaatgcccctgaccctgaccagcaacacccaggtgatcggcaccgccggcaacacctacctgcccgccctgttcaccacccagcccgccggcagcggccccaagcccttcctgttcagcctgccccagcccctggccggccagcagacccagttcgtgaccgtgagccagcccggcctgagcaccttcaccgcccagctgcccgccccccagcccctggccagcagcgccggccacagcaccgccagcggccagggcgagaagaagccctacgagtgcaccctgtgcaacaagaccttcaccgccaagcagaactacgtgaagcacatgttcgtgcacaccggcgagaagccccaccagtgcagcatctgctggagaagcttcagcctgaaggactacctgatcaagcacatggtgacccacaccggcgtgagagcctaccagtgcagcatctgcaacaagagattcacccagaagagcagcctgaacgtgcacatgagactgcacagaggcgagaagagctacgagtgctacatctgcaagaagaagttcagccacaagaccctgctggagagacacgtggccctgcacagcgccagcaacggcaccccccccgccggcaccccccccggcgccagagccggcccccccggcgtggtggcctgcaccgagggcaccacctacgtgtgcagcgtgtgccccgccaagttcgaccagatcgagcagttcaacgaccacatgagaatgcacgtgagcgacggctag

SEQ ID NO: 62745 - DNA, 174 bp, Artificial Sequence
  derived and/or modified sequence
atgaccgagagaatccacagcatcaacctgcacaacttcagcaacagcgtgctggagaccctgaacgagcagagaaacagaggccacttctgcgacgtgaccgtgagaatccacggcagcatgctgagagcccacagatgcgtgctggccgccggcagccccttcttccagtag

SEQ ID NO: 62746 - DNA, 2007 bp, Artificial Sequence
  derived and/or modified sequence
atgactgagcgaattcattccataaacttgcataacttttccaactcagttctcgagaccctgaatgagcagcgaaatcggggccatttctgcgacgttactgtccgcatccacggatcaatgctccgcgcccaccggtgcgtactcgctgcgggaagtcccttcttccaggacaagctgctgttaggctattccgacatcgaaatcccctctgtagtcagtgtgcagagcgtgcaaaagctcattgattttatgtatagtggtgtattgagagtgtcccagtcggaggcgttacagatactcactgccgcgagcatcttacaaatcaaaacagtgattgacgagtgtacaagaatagtcagccagaatgtgggcgacgttttccctggaatccaagacagtgggcaggacactcctagagggacacctgagagtggtacaagcggtcagagctccgacactgaatccggatatttacagagccacccgcagcattccgtagatcggatttacagcgccctgtacgcctgttcgatgcagaacggaagcggcgaaagaagcttctactcaggcgctgtagtaagtcaccacgaaacagccctcggattgcctcgggatcaccacatggaggaccctagctggattaccagaatccatgaacggtcacagcaaatggaaagatatttaagtaccactccagagacgactcactgccgtaagcagcctcgacccgtgcgaattcagaccttagtgggaaatatccacatcaagcaggaaatggaagatgactacgactactacggccagcagcgagtgcagatcctcgaaaggaatgagtccgaagagtgcaccgaggatacggaccaggctgaaggcacggagtctgagcctaaaggcgagagctttgacagtggcgtctcctcctctatcggaaccgagccagattccgttgagcagcagttcggccctggtgccgccagagatagccaggccgagcctacccagccggaacaggcagccgaggcccccgccgagggggggcctcagacgaaccagctggaaacgggcgcatctagccctgagcgatccaacgaggtcgaaatggattccacagttattaccgtatcgaacagttctgacaagagcgtgttacagcagccatccgtgaacacttcaattggtcagccactgccctccactcagttgtacctgagacagaccgaaactttgacttctaacctgagaatgcccttaacgttgacctccaacacacaagtaatcggtacggcaggtaatacatatttaccggccctcttcaccacccagcctgccggtagcgggcccaagccatttttgttcagcctgccccagcccctggccggacagcaaactcagttcgtgaccgtgagtcagccaggattgagcaccttcaccgctcagctgcccgctcctcagccactcgcatcatccgctggccatagcaccgcgtctggtcagggcgagaagaagccctacgaatgtacattgtgcaataaaacttttaccgctaagcagaactatgtaaagcatatgttcgtgcacacgggcgagaagcctcaccagtgctctatctgctggcgatccttctccctcaaagattatctgattaaacacatggttacacataccggggtccgcgcctatcagtgttccatttgcaataagcggtttactcagaaatcatcactgaatgtccacatgagactacaccggggggaaaagagctatgagtgttatatctgtaaaaaaaagttttcccacaagaccttgctcgagcggcacgtggctctccactcggcatcgaacggcacccctcccgccggaacccctcctggagcacgagcaggcccacctggtgtcgtagcgtgcacagaaggtaccacttatgtgtgctctgtgtgtccggccaagtttgatcaaatagaacagtttaatgaccacatgcgaatgcatgtgtccgatggctag

SEQ ID NO: 62747 - DNA, 2007 bp, Artificial Sequence
  derived and/or modified sequence
atgacagagcgtatacatagtattaatctccataactttagcaatagtgttcttgagactctgaacgagcagcggaaccgcgggcacttctgcgatgtgacagtgcgaattcacggttcaatgttgcgagcccatcgctgtgttctggctgctgggagcccatttttccaggataagttacttctgggatactccgatattgaaattcctagcgtcgtgtctgtccagtccgtacagaagttgatcgacttcatgtattccggagtcctgcgggtttcacagagcgaggccctgcagatcctgactgctgcttcaattctgcagattaagaccgtaatcgacgagtgcacacgcatcgtgtcacagaacgtgggtgacgtctttcccgggattcaagactccggacaggacacgccccggggcactcccgagtctggtacctctggccagtcaagcgacaccgagtctggatatttacagtcccaccctcagcactccgttgacagaatctactccgcgctctatgcttgtagcatgcagaacggcagtggggaaagaagcttttactccggcgcagtcgtttcccaccacgagaccgcccttggcctgcctagagaccaccatatggaagacccaagctggatcacacggatccacgaacgttcacaacagatggaacgataccttagcaccacccccgagacaacccattgtcgcaaacagccaaggcccgtaagaatccagactctggtaggcaatatccacataaagcaagaaatggaggacgactacgactactatgggcagcaacgggtccagattctggagcggaatgagtccgaagagtgtactgaagacacggaccaggctgagggcacagagtccgagccgaagggcgagtcctttgactcaggtgtttcttctagcattggcaccgagcctgattccgtcgaacagcagttcgggccaggcgcagcacgggattctcaggctgagccgacgcagcccgaacaggcagctgaggcccctgccgagggcggtccccagacgaaccagttagagacaggggccagctctccagagaggtccaacgaagttgagatggacagtaccgtaatcacggtctcaaactctagcgacaagtccgtgctgcaacagcccagtgtcaacacatctataggccaacccctgccatccacacagctgtatcttcgtcagaccgagaccctgacttctaaccttcggatgcctctgactctgacttcaaacacgcaagttattggtacggccgggaatacgtaccttcccgcgctcttcaccacccagcctgccgggagcggcccaaaaccttttttattttcactgccacaaccactcgccggccagcagacacagttcgtgaccgtatcgcaacccggcctatctacctttacagcccagcttccagcgccccagcctctggcctctagcgccgggcatagcaccgcaagtggacagggcgagaagaagccatacgaatgcacactctgtaataaaacattcacagccaagcaaaattatgtgaaacacatgttcgtgcatacgggggagaaaccccaccaatgctccatttgctggcgaagcttcagcttaaaggactacctcattaaacatatggttacccacacaggtgtccgagcttaccaatgttccatctgcaataaaagattcactcagaaatcttcacttaatgtacatatgcgcctgcaccgtggcgaaaaaagctatgagtgctatatatgcaaaaaaaaattttctcataaaactcttctggaacgccacgtggcactgcatagcgccagtaatggaactccacctgctggaactcctcccggcgctagggccggcccaccgggtgtagttgcgtgtactgagggtacaacatacgtgtgtagcgtttgtccagcaaagttcgatcaaattgaacagtttaatgatcacatgcgcatgcacgtgagcgatggttag

SEQ ID NO: 62748 - DNA, 2007 bp, Artificial Sequence
  derived and/or modified sequence
atgaccgaaaggatccacagcatcaatcttcataacttctcgaattcagtgctagagacgcttaatgagcagcgcaaccgcggacatttttgtgacgtgaccgttcgcattcatggctctatgttacgagcccacaggtgtgtgctggccgccgggtctccattctttcaggacaaacttctcctagggtactctgatattgaaatcccttcagtggtatctgttcaatccgtgcaaaaactgatcgatttcatgtactctggcgtactgcgcgtcagccagtctgaggctctccagatattaaccgccgcctccattctgcagatcaagacagttattgatgagtgcaccaggatagtctctcagaacgttggtgacgtattccctggcatacaggattcaggccaggacaccccccgggggactccagaatccggaaccagtggacagagttccgacaccgaatccgggtacttgcaaagtcacccgcagcactcagtggaccggatctattcagccctgtatgcctgctcaatgcagaacggttcgggcgagagatcgttttactccggcgctgtggttagccatcacgaaaccgccttaggtctccccagagaccaccatatggaggacccatcatggattacacggatccatgagcgtagtcagcagatggagaggtacctgtctacgacccctgaaactacccattgtcggaaacagccccgtccggtgcggatccagactcttgtcggcaatattcatatcaagcaggagatggaggacgactacgactactatggacagcagagggttcagatcttggaacgtaatgaatctgaggagtgcactgaagacaccgaccaggctgagggcaccgaaagtgagccaaaaggggagagctttgactccggggtcagctcctcgatcgggaccgagcctgacagtgttgagcagcagtttggtccgggcgcagcacgcgacagtcaggctgaacctacccagcctgaacaggcggcggaagctccggcggagggtggccctcagaccaatcagcttgaaacgggggcttcctcacccgaacgttcgaatgaggtggagatggactccacagtgattactgtctccaactccagtgataagagtgtactgcaacagccaagcgtcaatacctctattggacaaccgctgcccagtactcagttgtacctgcgacagacagagacgctgacgtcgaatctccggatgcctctgacactgacctccaacacgcaggtgattgggacagctgggaacacatacctccctgctctattcaccacgcagcccgctggctcaggcccaaagccgtttttattcagcctgcctcagccactggcaggtcagcaaactcaattcgtgaccgttagccagcccggattaagcacgttcacggctcagttacccgctccacagccacttgcttctagcgctgggcatagcaccgctagtggtcagggagaaaagaagccctatgagtgcaccctctgtaacaagacttttaccgctaaacagaactacgtgaagcatatgtttgtgcacaccggagaaaaaccccatcagtgctcaatttgctggcgcagcttctctctcaaggattacctgattaaacacatggtgactcacactggagtgagagcctatcagtgctctatttgcaacaagcgatttacccagaaatctagtctgaacgtccacatgagattacatcgaggagagaaaagctacgagtgctacatatgcaagaagaagttctctcataagactcttctagaaagacatgtggccctgcactcagctagtaatgggactccacccgctggcacacctccaggtgctagagccggccctccaggtgtggtggcctgcaccgagggtactacatatgtgtgttcggtttgtcccgccaaattcgaccagatagagcagtttaacgaccatatgcggatgcacgtcagcgatgggtag

SEQ ID NO: 62749 - DNA, 2007 bp, Artificial Sequence
  derived and/or modified sequence
atgaccgagcggatccattccataaatctgcacaacttctccaactctgtattggagactctcaatgaacaaaggaataggggacatttttgcgacgtgaccgtacgaatccacgggagcatgttgagggcacacagatgcgttttagccgcgggctccccattctttcaagacaagttgctgcttggctattccgatattgagatcccctccgttgtctctgtgcaatcagtccagaaactgatcgatttcatgtactccggcgttctgcgtgtgtctcagtctgaagccctgcaaattctgacggcagcctcaatcctgcagatcaaaaccgttattgatgaatgtactagaatcgtatcccagaacgttggagacgtctttcctggtatccaggattccggtcaggacacaccccgaggcaccccagaatcagggaccagcggacagagctccgacacagagtccgggtatctgcagagccacccccagcatagcgtggatagaatttactctgccctctatgcctgcagtatgcaaaacggctcaggcgagcgcagtttttactcaggcgccgtcgtgtctcatcatgagacagcccttgggctaccacgggaccatcatatggaggacccatcttggattaccaggattcacgagcggtctcagcaaatggaacggtatctcagcacgacacctgagacgactcattgtcgtaagcagccccgccccgtccggattcagactctggtcggcaacatccatatcaagcaggaaatggaggatgattacgattactatggacagcagagggtgcagatccttgaaagaaatgaatctgaagagtgtactgaggatacggatcaggccgaagggacagagagcgaacctaagggtgagtccttcgacagcggggtttcatctagtattgggaccgagcccgacagcgtggaacagcagttcggaccaggcgccgccagggacagccaagctgaacccactcagccagaacaggccgccgaagcaccagcagaagggggcccccagaccaaccagctggagacaggagccagctctccagaaaggagcaacgaggtggagatggatagcaccgttatcaccgtttcgaacagttccgataagagcgtcctgcagcagccaagcgtgaacacctcaataggccaacctttacccagcactcagttatacctccggcagacagaaactctaacatccaacctgaggatgccactgacgctgacttctaacactcaggtgattgggaccgccggtaatacctacttacccgcactctttacaacacagcctgcaggttctgggccgaagcctttcctgttctcgcttccacagcccttggcggggcagcaaactcaatttgttaccgtcagtcagcccggcctcagcacatttactgctcagctcccggcccctcagccactcgctagctccgccggtcattcaacagcgtccggtcagggtgagaagaagccttacgagtgtaccctttgtaataagacctttactgccaagcagaattatgtgaagcatatgttcgtgcacactggcgaaaagccacaccagtgcagtatttgttggcgtagcttctccttgaaagactatctgataaagcatatggtaacgcacactggcgtccgcgcctaccagtgtagtatctgcaataagcgatttactcagaagtcctctctgaacgtgcacatgcggcttcatagaggggagaagtcctacgagtgctatatctgtaagaagaaatttagtcacaagacactgctggaaaggcacgtggctcttcactctgcatcaaatggaacacctcctgccggaaccccaccaggagcccgagcaggacccccgggagtggtcgcgtgcacggaagggacgacctacgtgtgcagtgtgtgtccagctaaatttgatcagattgagcaatttaatgatcatatgcggatgcatgtgtctgatgggtag

SEQ ID NO: 62750 - DNA, 174 bp, Artificial Sequence
  derived and/or modified sequence
atgactgagcgtatccacagtatcaatctgcacaatttttctaactccgtcttagaaaccctgaacgagcagagaaacagaggccacttctgcgacgtaacagtccgcatccatgggtcaatgctgagggcgcatcgctgcgtcctcgcggccgggagccctttcttccagtag

SEQ ID NO: 62751 - DNA, 2007 bp, Artificial Sequence
  derived and/or modified sequence
atgacagaacgtatccattcaattaatctgcataatttctccaattcagtcctcgagacgttaaatgagcagaggaatcggggacatttctgtgatgtaacggtgaggatccacggttctatgctcagagcccatcggtgcgtactggctgcaggcagcccgttcttccaagataaactgctgctaggatacagcgacatcgaaatcccatcagttgtgtccgtgcaatccgtccagaaactgatagattttatgtactccggggtgctgcgggtcagccagtctgaagccttacagattctcacagccgcgtccattttgcaaatcaagaccgtaattgacgagtgcactcgtatagtgagccagaatgtcggcgatgtatttcccggaattcaggactctggccaggacactcctagaggcacccctgaatctggaacaagcggccagagttccgacacagaaagtgggtacctgcagtctcaccctcaacactccgtggacaggatttacagtgccctgtatgcttgtagtatgcagaatggatccggagaaagaagcttttacagtggggccgtggtgtctcaccatgagaccgctttgggcctcccacgggaccaccacatggaggaccccagctggataaccagaattcacgagagatcgcagcagatggagagatacctcagcaccaccccagagaccacgcactgccggaaacagccccgcccggtccggatccaaactttggtcggtaatattcatatcaaacaggaaatggaggacgattatgattactatgggcaacagagagtgcagatcttggagagaaacgaaagcgaggagtgtaccgaagatactgaccaggctgaggggactgagtcagagccgaaaggcgagagctttgacagcggggtaagtagttctatcggaacagaacctgactctgtcgagcaacaattcggacccggcgctgccagggattcccaggcggagcctacacagccagagcaggcagcagaggccccagcagagggcggccctcagaccaaccagctcgagactggggcttcaagcccagagcggtccaatgaagtggagatggattccactgtgattactgtttctaactccagcgacaagagcgtacttcagcagccctcagtaaacaccagcataggtcagccactgccctcaacgcagctgtacctgaggcaaacagagacactcacaagtaacttacggatgcctttaactttaacaagcaacactcaggtgatcggcaccgccggaaacacatacctccctgctctcttcacgacacagcccgcgggcagcgggccaaagcctttcctgtttagcttgccccagccgctcgccggacagcagacgcagttcgttaccgtgtcgcagcctggattgagcaccttcacagcacaactccctgccccccagccgctcgcctccagtgctggacatagtacagcttctgggcaaggagaaaaaaagccctacgagtgtacactctgcaacaaaaccttcaccgcaaaacagaactacgtgaagcacatgtttgtgcatacaggcgaaaagccccatcagtgcagcatctgttggagatccttttcactgaaggattatttaatcaaacacatggtgacacacactggagtccgcgcctaccagtgctcaatctgcaacaaaaggtttacccagaagagttccctgaatgtgcatatgcggttacataggggcgagaagagttatgagtgctacatctgcaagaagaagttctcccataaaaccttgcttgagcggcatgtcgcactgcattctgcctctaacggtacaccaccagccggaaccccgcccggcgcccgggcaggacctcccggcgttgtggcgtgtaccgaaggaaccacatatgtgtgcagcgtctgcccggcgaaatttgaccagattgaacaattcaatgaccacatgcgtatgcatgtctcggacggttag

SEQ ID NO: 62752 - DNA, 2007 bp, Artificial Sequence
  derived and/or modified sequence
atgaccgagcgaatacacagcatcaacttacacaatttctccaactctgtgctcgagacactgaatgagcagcggaaccggggacacttttgcgacgtgaccgtcaggattcatggctctatgctcagagctcataggtgtgtgcttgccgcgggaagcccattttttcaggataagctgctgctcggctactccgacatcgagatcccatctgtggtgtccgttcagtccgttcagaagctgatcgatttcatgtacagcggggttctgcgggtctcccagtccgaagcattgcagattctcactgctgctagcatcttgcagataaaaactgtcatcgacgagtgtaccagaatcgtcagtcagaacgtgggggacgtcttccctggtatccaggattctggacaggatacaccacgcggaacaccagagagcggcacttccggccagtcttccgacactgaatctggatatcttcagagccacccccagcacagcgtggaccgcatctatagcgcactgtatgcctgttctatgcaaaacggaagcggggaacgtagtttttattctggagccgttgttagtcatcacgaaactgctctgggactgcctagggatcatcatatggaggatcccagctggataaccagaattcacgaacgatcccagcaaatggagaggtacctgagcacgacccctgaaactactcattgcagaaagcagcctagaccagtcagaatccagacactagtcggcaacatccacataaagcaagaaatggaggacgattatgattactatggtcagcagcgtgtgcagatccttgagaggaatgagagtgaagaatgtactgaggacaccgatcaggcagaaggcaccgagagcgagccaaagggagagtcattcgacagtggggtgtcgtcatcaatcggcaccgaacccgactctgtcgaacagcaatttggacccggtgctgcgcgggattctcaggcggagcccacccagccagagcaggccgccgaggctcctgcagaaggaggccctcagaccaaccagctagaaacaggagccagctccccagaaaggtcaaacgaagtggaaatggactctactgtgatcactgtgtccaatagctcagacaaatcagttctgcagcagccaagcgtgaacacatccatcggacagccacttccctctacacagctgtatcttagacagacagagacgctgacgtccaacttacggatgcccctgacgcttacgtctaatacacaagtcatcggaaccgccggaaatacgtatctgcccgcactgttcactacccaaccggctgggtccggcccaaaaccgttcctttttagcttaccccaaccattggctggacaacagacacaattcgtcaccgtttcccaacctggcctgagcaccttcaccgcgcagctccccgctccacagcctctagcctcatcggcaggccactcaacagcgtcgggacagggtgagaaaaagccctatgagtgcacactctgcaacaaaactttcacagcaaaacagaattacgttaagcacatgttcgtgcacacaggagagaagccccaccagtgcagtatctgctggaggagcttcagtctgaaggactaccttatcaaacacatggttacccacaccggcgtgcgtgcctaccagtgtagtatatgtaacaagaggtttacccagaagtcttctctgaacgtacatatgcgcctgcatcgcggtgaaaaaagctatgagtgctacatctgcaaaaagaaattcagccataagactctgctcgagcggcatgtggctctgcattccgcttccaacggaacgccacctgcaggcactccacccggtgccagggctggaccgcccggcgttgtggcctgcaccgaagggactacttacgtgtgtagtgtctgccctgctaagtttgatcagattgaacagtttaatgaccatatgagaatgcatgtcagcgatggctag

SEQ ID NO: 62753 - DNA, 2007 bp, Artificial Sequence
  derived and/or modified sequence
atgacagagcgcatccacagcatcaacctgcacaacttcagcaacagcgtgctggagaccctgaatgagcagaggaacagaggccacttctgtgatgtgacagtgcgcatccacggctccatgctgcgggcccaccgctgtgtgctggccgccggcagccccttcttccaggacaagctgctgctgggctacagcgacatcgagatccccagcgtggtgtctgtgcagagcgtgcagaagctgattgacttcatgtacagcggcgtgctgcgggtgtcccagagcgaggccctgcagatcctgacagctgccagcatcctgcagatcaagacagtgattgatgaatgtaccagaattgtgtcccagaatgtgggagatgtgtttcctggcatccaggacagcggccaggacaccccccggggcaccccagagagcggcaccagcggccagagcagtgacacagagagcggctacctgcagagccacccccagcacagcgtggaccgcatctacagcgccctgtatgcctgcagcatgcagaatggaagtggagagaggagcttctacagcggggctgtggtgagccaccatgaaacagccctgggcctgccccgggaccaccacatggaggaccccagctggatcacccgcatccacgagaggagccagcagatggagcgctacctgagcaccaccccagagaccacccactgcaggaagcagcccaggcctgtgcgcatccagaccctggtgggcaacatccacatcaagcaggagatggaggatgattatgactactacggccagcagagggtgcagatcctggagagaaatgaaagtgaggagtgcacagaggacacagaccaggccgagggcacagaaagtgagcccaagggggagagctttgacagcggcgtgagcagcagcatcggcacagagccagacagcgtggagcagcagtttggacctggagctgcccgggacagccaggccgagcccacccagcctgagcaggccgctgaggccccagctgagggcggcccccagaccaaccagctggagactggagccagcagccctgagaggagcaatgaggtggagatggacagcaccgtcatcaccgtgagcaacagcagtgacaagtctgtgctgcagcagcccagcgtgaacaccagcatcggccagcccctgcccagcacccagctgtacctgcggcagacagagaccctgaccagcaacctgaggatgcccctgaccctgaccagcaacacccaggtgattggaacagctggcaacacctacctgcctgccctcttcaccacccagcctgctggcagcggccccaagcccttcctgttcagcctgccccagcccctggccggccagcagacccagtttgtgacagtgtcccagcccggcctgagcaccttcaccgcccagctgcctgccccccagcccctggccagcagcgctggccacagcacagccagcggccagggcgagaagaagccctatgagtgcaccctgtgcaacaagaccttcaccgccaagcagaactacgtgaagcacatgtttgtgcacactggagagaagccccaccagtgcagcatctgctggaggagcttcagcctgaaggactacctgatcaagcacatggtgacccacactggagtgcgggcctaccagtgcagcatctgcaacaagcgcttcacccagaagagcagcctgaatgtgcacatgaggctgcacagaggagagaagagctatgagtgctacatctgcaagaagaagttcagccacaagaccctgctggagagacatgtggccctgcacagcgccagcaatggcaccccacctgctggcaccccacctggggcccgggccggccccccaggagtggtggcctgcacagagggcaccacctacgtgtgcagcgtgtgcccagccaagtttgaccagatcgagcagttcaatgaccacatgaggatgcacgtgtctgatggatag

SEQ ID NO: 62754 - DNA, 174 bp, Artificial Sequence
  derived and/or modified sequence
atgacagagcgcatccacagcatcaacctgcacaacttcagcaacagcgtgctggagaccctgaatgagcagaggaacagaggccacttctgtgatgtgacagtgcgcatccacggctccatgctgcgggcccaccgctgtgtgctggccgccggcagccccttcttccagtag

SEQ ID NO: 62755 - DNA, 2007 bp, Artificial Sequence
  derived and/or modified sequence
atgaccgagcggatccacagcatcaacctgcacaacttcagcaacagcgtgttagagacactcaacgagcagcggaatagagggcatttttgcgatgtcacggtgcgtatccatggcagcatgctgcgggcacaccggtgtgtccttgccgcgggctccccattcttccaggacaagctgttgctgggctattccgacattgagatcccgagcgtggtgtctgtgcagtccgtacagaaactcatcgattttatgtacagtggggtactgcgcgtctcccagtctgaggcactccaaattctgaccgccgccagcatccttcagatcaaaacggtcattgacgaatgcaccaggatcgtgtcccaaaatgttggggacgttttccccgggattcaggattcgggacaggacactccacgcgggaccccggagagtggcacatctggccaatctagtgacacagagagcggatacctgcagtcacatccacagcactctgtggatagaatttactcagcactatatgcctgttcaatgcagaatggcagtggcgaacgcagtttttattcaggcgccgtggtgtcccaccatgagactgcattgggcttaccgcgcgatcatcacatggaagacccatcttggatcacacgcatccatgagagatcgcaacagatggagcgctatttatccactacccccgagactacacattgtcgcaagcaacctagacccgtacgaatccagacactggtcgggaatatccatatcaaacaagagatggaggacgattatgactactacggccaacagagagtgcagatcttggaacgaaacgaatccgaggagtgcaccgaagatacggatcaggccgagggcaccgagagcgaacccaaaggagagagtttcgactccggtgtcagcagctctatagggactgagcccgattccgtggagcagcaatttggccctggggcggctcgcgactctcaggccgaacctactcaaccggagcaggcggcagaggccccggccgagggaggcccccagaccaatcaactcgagacaggggcttccagcccagaaagatctaatgaggtcgaaatggactccacagttatcaccgtgagcaactctagcgataagagcgtgctgcagcagccaagtgtcaacacgtcgattggccagccgctgccctcaacacagttatatctgcggcagacagagacactcacgagcaacttgagaatgcccttgacccttacctccaatacccaagtgattggaaccgctgggaatacgtacctaccagctctgttcaccacacagcctgcaggctcagggcctaagccctttctttttagcctgccgcagccactggcaggccaacagactcagttcgtaaccgtgtcacagcccggcctgagcacattcacggctcagctgcccgccccgcagccgcttgcatcttccgcaggccattctaccgctagtggccagggggaaaagaagccatacgaatgtacgctttgtaataagaccttcaccgccaagcagaactacgttaaacacatgttcgtccacactggcgagaaaccgcaccaatgctcaatttgttggaggtccttcagcctgaaggactatttgatcaagcacatggtgacccacaccggcgtgcgggcttatcagtgttcgatctgtaataaaaggtttacccagaagtccagtctcaacgtccatatgcgtctgcaccgtggggagaagtcttacgaatgctacatttgcaaaaaaaagttctctcacaaaacccttctggagcgccacgtagctttgcactcagcctccaacggcacgcccccagctgggacaccaccaggggctagagccgggccgccgggagtggtagcatgcacggagggaaccacttacgtttgctccgtttgccccgctaagttcgatcagattgagcagtttaacgatcatatgcgaatgcatgtgagcgacgggtag

SEQ ID NO: 62756 - DNA, 2007 bp, Artificial Sequence
  derived and/or modified sequence
atgaccgagcggatccacagcatcaacctgcacaacttcagcaactctgtgctggaaactctaaatgagcaacgaaacagaggtcacttttgcgacgtaactgtgcgcatccacgggtcaatgttgcgtgcccatcgttgcgtgctggcagcagggagcccttttttccaggataagctgctcctggggtattccgatattgagataccaagcgtcgtttccgtgcaatctgtacaaaagttgatcgatttcatgtactccggcgtgctgcgagtgtcgcagtctgaggcactgcaaatcctgacggccgctagcatccttcagataaagaccgtcattgacgagtgcacaaggatcgtgtcccaaaatgtaggtgacgtgttccctgggatccaggattcaggccaggatacccctcggggcacccccgaaagcggcacttcggggcagtcttccgatacagagagtggctatctgcagagtcacccacagcatagcgtggataggatttactcagcgctgtacgcctgctccatgcagaacggctcaggtgaaaggagcttttattccggagcagtcgttagccaccacgaaaccgctctagggctgccccgggatcaccacatggaggatcccagctggatcacacgtatccatgagaggtctcaacagatggagcgttatttgagtaccacccccgagaccacacactgtcggaaacagcccagacctgtacgaatacagacactggtggggaacatccacatcaagcaagagatggaggatgactatgattattacgggcagcagcgtgtacagatacttgaaagaaatgagtctgaagagtgcaccgaggacactgaccaagccgagggtacagaatcagaacctaagggagaaagctttgatagtggtgttagttcttcgataggcaccgaaccggattccgtggagcagcagtttggacccggcgccgcccgggacagccaggcggagcctacgcaaccagaacaagccgctgaggcgcccgccgagggcgggcctcagactaatcagctcgagactggcgcctcaagccctgaaagatccaacgaggtggagatggacagcaccgtaatcaccgtttcgaactctagtgataagagcgtgttacagcagcccagtgtcaatacctcaattggacagcctttgcctagcacccaactctatttgcgccagactgaaacactaaccagtaatcttaggatgccactcaccctcacctctaacacacaagtgatcggaaccgcagggaacacctatctgccagcccttttcaccacccaaccagcaggtagcgggccaaaaccgttcctgtttagcctgccgcagcctctggcaggccagcaaacacagtttgtcaccgtcagccagccggggctttccacttttaccgctcagctgcctgcccctcagcctcttgcctcctctgccgggcattccactgcttctggtcagggcgaaaagaagccatacgaatgtaccctctgtaacaaaacctttaccgccaaacaaaattatgtgaagcacatgtttgttcacactggcgagaagccacatcagtgcagcatatgttggcgatcctttagtcttaaggactatctaataaagcatatggtcacccataccggcgtgcgcgcctatcagtgctccatttgtaacaagagatttactcagaaatccagcctgaatgttcacatgaggctacaccgcggggagaagagctacgaatgttatatttgcaagaagaaattcagccacaaaactctccttgaaaggcacgtcgctcttcacagcgcttccaacggtacaccacctgccggaacccccccaggagcgcgcgcgggccccccaggggtcgtggcgtgcaccgagggcaccacctacgtctgcagcgtctgtcccgctaagtttgaccagatagaacagtttaatgaccacatgcgcatgcatgtgagcgacggatag

SEQ ID NO: 62757 - DNA, 2007 bp, Artificial Sequence
  derived and/or modified sequence
atgaccgagcggatccacagcatcaacctgcacaacttcagcaacagcgtgctggagacacttaacgaacagcggaaccgcggccatttctgtgatgttacggtaagaatacacggttcaatgctgcgggcgcaccgctgcgtgctggctgccggcagtccctttttccaagacaaactcctgctcggctactctgatatcgaaattccttcagtggtgagcgtgcaaagcgtgcaaaagttgattgattttatgtatagcggggtgttgagggtctctcagagcgaggctctgcaaatcctgactgccgccagcatcctccagattaaaaccgtaatcgacgaatgtaccaggatcgtctctcaaaacgttggtgacgtgtttcctggaatccaggattctggccaggacactccacgtggcacacccgaatcaggcacctccggccaatccagtgacacagaatctgggtatctgcaaagtcatcctcagcactctgtggaccgcatctattccgccctttatgcatgcagcatgcagaacggatctggcgagcggagtttttactctggggcggtcgttagccatcacgagaccgctctcggcttgccaagagatcaccatatggaggacccctcatggatcaccagaattcatgagcggtctcagcagatggagcggtacctgtctactacgccggagaccacgcactgcaggaaacagcctcgtcctgtccgtatccagactcttgtgggcaacatccacataaaacaagagatggaggatgactacgactactatgggcagcaaagagtgcaaattctggaacgaaatgagtctgaggaatgcaccgaggacaccgatcaagcagagggcactgaaagtgaacccaagggtgagagtttcgatagcggagtgtctagcagtatcgggaccgaaccggatagtgtagagcagcagttcggccctggggccgcgcgggactcgcaggccgaacctactcagccagagcaagcggccgaggctcccgccgagggaggtcctcagaccaatcagttagagactggggcatcctctcccgagcggtctaacgaggtggagatggactcaacagttatcaccgttagcaattcttccgataaaagtgtcctgcagcagccatccgtcaatactagcatcgggcaaccgttacctagtacccaactatacctgcgccagactgagacactcacaagcaacctcaggatgccgttgacgctgacgagcaacacacaggtgatcggaaccgcaggcaatacctatttgcccgctctgtttactacacagcctgcaggaagtggccccaagccatttttgttttctctgcctcagccgctggcgggccagcagactcagttcgtgacagtgagccagccaggcctgtcgacctttactgcccagctaccagcaccccaacccttagcctctagcgccggtcatagcactgcaagtggccagggagagaagaagccgtacgaatgtacactgtgcaacaaaacttttacagcaaaacagaattatgttaagcacatgtttgtgcataccggagagaaaccccaccagtgttctatttgttggagatcattttctctgaaagattaccttattaagcatatggtaacgcacaccggcgttcgcgcataccagtgttcaatctgcaacaagcgtttcacacagaagtcgtctctgaacgtccatatgcgacttcaccgtggcgagaagtcctacgaatgttatatttgcaagaaaaaattttcccataagaccctacttgaacgtcatgttgccctgcacagtgcctcgaacggcaccccaccagcaggcaccccacccggcgcaagggcaggtcctcccggcgtggtggcctgtaccgaaggcactacgtatgtgtgcagcgtgtgcccagcaaagttcgatcaaatcgagcagttcaacgaccatatgcgaatgcacgtcagcgacgggtag

SEQ ID NO: 62758 - DNA, 2007 bp, Artificial Sequence
  derived and/or modified sequence
atgaccgagcggatccacagcatcaacctgcacaacttcagcaacagcgtgttagaaaccctcaacgagcagcggaacaggggccacttctgcgatgttactgtaaggattcatggctctatgctgagagcccaccggtgtgtattggctgccggctcccccttttttcaggacaagctcctgctggggtattccgatatcgagataccaagtgtcgtttctgtccaaagtgtacagaaactgatcgatttcatgtactctggcgtgcttagggtatctcagagcgaggcacttcagattttgacagcagcctcaatcctgcagataaaaacagtgatagatgagtgcacccggatcgtatcgcaaaacgtcggcgacgtgttccccggcatccaagatagcggccaggataccccacggggaacccccgaatctgggacatccggccaaagtagtgatacagaaagcgggtacctgcagagtcatccacaacattcagtggaccgaatctactcagcactgtatgcctgcagcatgcaaaacgggagtggggaacggtcgttctacagcggggccgtggtctcccatcacgaaacagctctcggactcccgagggaccaccatatggaggaccccagctggatcacacgcatccatgaaagaagccagcagatggagcgctatctgagtactactcctgagaccacacattgtcggaagcagccccgaccagtccggatccagacattggtgggcaacatacacatcaaacaggaaatggaggatgattacgactattatggtcaacagagagttcaaatcctcgaacgtaacgagtccgaagagtgcaccgaggacactgaccaagcagaagggactgaatctgaacccaagggcgaaagcttcgactctggcgtcagttccagcataggcaccgaacccgacagtgtggagcaacaattcggcccaggcgcagcacgcgattcccaagcggagcccacacagcctgagcaggccgcagaagctcccgctgagggcggcccccagaccaaccagttggaaacaggtgcatcctctccagaaagatccaatgaggtagaaatggactctactgtgattacagtaagcaattcttctgacaaatcggttctgcagcagccaagcgtgaataccagtatcggacaacctctgcctagtacgcagttatatctgagacagactgagacgttgacatcaaatctgcgaatgccccttacactgactagcaatactcaggtcattgggactgctgggaacacatacttgccagcactattcacaacccagccggctggcagcggccccaaacctttcttgttttccttgccacaaccactggcaggccagcaaactcaattcgtgacagtcagtcagcctgggctcagcactttcacggcacagttgccggccccccagccgctggcttcttccgcagggcactctaccgcatcggggcagggcgagaagaaaccctatgagtgcaccctatgcaacaagacgttcacagccaaacagaactacgtcaagcatatgtttgtgcacacgggtgaaaagccccatcaatgctcaatctgttggaggagctttagcctgaaggattacctgatcaagcatatggtaacccatactggcgtgcgggcttaccaatgcagcatttgcaacaaacgtttcacccagaagagctctctgaatgtccatatgcgtctccaccgaggggaaaagagctatgagtgttacatctgcaagaagaaattcagccataaaacgctcctagaacgccacgtagcgcttcatagcgccagcaatgggacccctccagctggcactccccccggcgcacgggccggcccacccggagtggtggcatgtactgaagggaccacttacgtgtgttcagtctgtcctgccaaatttgaccagattgagcaattcaacgaccacatgcggatgcacgtgtccgacggctag

SEQ ID NO: 62759 - DNA, 174 bp, Artificial Sequence
  derived and/or modified sequence
atgaccgagcggatccacagcatcaacctgcacaacttcagcaactctgtactggaaaccctcaatgagcaacgcaatcggggacatttttgcgacgtgacggtaaggatacacggttccatgttgcgcgcacaccgctgtgtgttagcagcaggttcccccttttttcaatag

SEQ ID NO: 62760 - DNA, 2007 bp, Artificial Sequence
  derived and/or modified sequence
atgaccgagcggatccacagcatcaacctgcacaacttcagcaactctgtgctggagacactcaatgagcaaagaaaccggggtcacttctgtgacgtgaccgtgcgaattcacggctcgatgttgcgggctcaccgttgcgtgttggctgccgggagcccattcttccaagacaagctgctgcttgggtactccgacatagagattccctcagtcgtgtctgtgcagtctgtccagaagttaatcgacttcatgtactccggggttctgcgagtcagtcagagcgaagcgcttcagatcctgaccgcagcatctatccttcagatcaaaacggtaatcgatgagtgtacccgtattgtttcccaaaatgtcggagacgtattccctggcatccaggactctggccaagatacaccacgcggcactccagaatctgggacctccggtcagagcagcgatacagaatccgggtacctccagtcccacccacagcattctgtggaccgaatttactccgccttgtatgcctgcagtatgcagaatgggtcaggcgagcgcagcttctatagtggagcagtggtatcacaccatgaaaccgcgctgggtttgccaagggaccatcacatggaagacccctcttggataacacggattcacgagcgaagccagcaaatggagaggtacctttctaccaccccggagaccacacattgtcgtaagcagccaaggcccgtgagaattcagacactggtgggcaacatccatatcaagcaggaaatggaagatgactacgactattacgggcagcagcgcgtgcagattctggagcgcaacgaatcagaggagtgcaccgaggacacagaccaggctgaaggtactgaatctgaacccaaaggtgaaagctttgactccggagtatccagcagcatagggaccgagccagattctgtcgagcaacaatttggtccaggggcagctagagattcacaggcggaaccaactcagccagagcaggccgccgaagccccagccgagggggggccccagacaaatcagctggagacaggcgcaagttctcccgaacgatcaaatgaagtggaaatggacagtaccgtgataacagtgtctaattcaagtgataaatcagtcctgcagcagccgagtgttaataccagcatcgggcagcccctgccatccacccagctctacttgaggcagacagaaactctgacatccaatctccggatgcccctgacactgacctccaacacccaggtgattggcactgcgggaaatacatatctccctgccttgttcactacacagcctgcaggatccgggcccaagccatttttgttctcgttgccgcagcctttggccggtcagcagacgcagttcgtgacggtgtcccagccaggcctttcaacattcactgcacaactgcctgccccccagcccctggcctccagcgccggacacagcacagcatccggccagggggagaaaaagccgtacgagtgtacattgtgcaacaaaacatttacagccaagcagaactacgtgaaacacatgttcgtccacaccggagaaaaaccacaccagtgcagtatttgctggaggagctttagcctgaaagattatctgattaagcacatggtgacacataccggcgtgagggcttaccagtgctcgatatgcaacaagcggtttacccaaaaatcatccttgaacgtgcacatgcgacttcaccgcggggagaaatcctatgagtgttacatttgtaagaaaaagttttcacacaagacgctgctagagcgccacgttgcactgcatagtgcaagcaacgggacacctcctgctggcactccgcctggcgcaagggcagggcctccaggagtggtagcttgtacggaaggcactacttatgtgtgctccgtctgtccggcgaagtttgaccagatcgagcagtttaacgaccacatgcggatgcacgtaagcgacgggtag

SEQ ID NO: 62761 - DNA, 2007 bp, Artificial Sequence
  derived and/or modified sequence
atgaccgagcggatccacagcatcaacctgcacaacttcagcaactctgttctggagaccttgaatgaacagagaaaccgtggacacttctgtgacgtaactgtcagaatccatgggagcatgttgagagcccaccgatgtgttctcgccgccgggtcccccttctttcaagacaagctgttgctaggctatagcgacattgagattcccagcgtggtgagtgtccagtccgtgcagaagttgattgacttcatgtactctggggttttgcgcgttagtcaatccgaagccctgcagatattgacagccgcctcgatactgcagattaagacggtgatcgatgaatgcacacgcatcgtgagccagaacgtcggagatgtcttcccagggatccaggactcaggtcaggacactccgcgcgggacacctgaaagcggaaccagcggccagagctccgacacggaatccggttacctccagtcgcacccccagcactctgtcgatcgcatctactctgccctgtacgcgtgttctatgcagaatggatcgggagagaggtccttctacagtggtgccgtggtgagccaccacgagaccgctctcgggctaccacgggatcaccacatggaggatccctcatggatcactagaattcacgagagatcccaacagatggagagatatctatctacaactcccgagaccactcactgtaggaaacagccccgcccggtgcgcattcaaaccctggtcggcaatatacacattaagcaggagatggaagatgattacgactactatggtcagcaacgcgtccagatccttgaaagaaacgagtcggaggagtgtactgaggatacggaccaggcagagggcaccgagagcgaaccaaagggtgagagtttcgacagtggcgtgagtagtagcattggaacggagccagacagcgtggagcagcagttcggtcccggcgcagctcgggacagccaggccgagcctacccagcccgaacaggccgccgaagcaccggcagaggggggcccacaaaccaatcagctggaaacaggcgcatcttctcctgaaagaagcaatgaagttgagatggacagtaccgtgataaccgtgtccaattcatcagataaaagtgtactgcagcagccatccgtgaacacctctattggtcaaccacttccgagtacccaattgtacctcagacagactgagaccctgacctccaatctgcgaatgcctcttactctgacgagtaacacacaagtgatagggacagctggcaatacctatctaccagccctgtttacaacccagcctgcaggaagcggccctaaaccctttctgttcagcctgccgcagcccctggctggccaacaaacccagttcgtcacagtgtcccagcctggccttagcaccttcacggctcagctccccgcgccccaacctttagcatcttctgcaggacactccacagcgtcaggacaaggcgagaagaagccgtacgagtgcacactgtgcaataagacttttactgccaaacaaaactatgtaaagcacatgtttgtgcataccggggagaagccacaccagtgttccatctgttggagatctttttctctgaaggattacctgattaaacacatggttacccatacgggagttcgcgcgtaccagtgttccatttgcaataaacggtttacccagaagagctcgctaaacgttcatatgcgtcttcaccggggcgagaagtcatatgagtgctacatctgtaaaaaaaagttttcccataaaaccctcctggagagacacgtcgctctccactcagcttccaacggaacaccacctgcgggtaccccaccaggcgctcgcgccggcccacccggcgttgtggcatgtactgagggtactacctatgtttgttcggtgtgtcccgctaagttcgatcagatcgagcaatttaatgatcatatgcggatgcacgtctcggacggctag

SEQ ID NO: 62762 - DNA, 2007 bp, Artificial Sequence
  derived and/or modified sequence
atgaccgaaagaattcacagtatcaacctccacaactttagcaattcagttctcgaaactctcaacgaacagaggaacagaggccacttctgtgatgtgaccgtccgtatccacgggtctatgctgcgagcccacagatgtgtgctggcagccggatctccattttttcaggataaactgctcctgggatacagtgacattgaaattccttcagtagtctccgtgcagtctgtgcagaagctgatcgatttcatgtattccggggtgcttagagtctctcaaagtgaagccctgcagattctgacagccgcaagcatcctgcagatcaaaaccgtgatcgatgaatgtacccggatcgtcagccaaaatgtaggcgacgtgttccccggaatccaggatagcgggcaggacacccctcgcggtactcccgagtctggcaccagcgggcaatcgagtgatactgaaagtgggtatctgcagagccatcctcagcatagtgtagatcgcatctacagtgcactgtatgcttgcagcatgcagaacgggagcggtgagcgatctttttactccggtgcagtggtctcccaccacgagactgccctgggcctacctcgagaccaccatatggaggatccgagctggattactcgtatccacgaaaggtcacaacaaatggaacgttatttaagcacaacccctgaaactactcattgccgcaaacaaccaagacccgttcgtattcaaactctcgttggcaacatacacattaagcaggagatggaagacgactatgactactacggacagcagcgggtgcaaatactggagaggaatgaaagtgaagagtgcactgaggacactgatcaggccgaagggactgagtctgagcccaaaggagagagttttgatagcggcgtgagttcttctataggtacagagcccgacagtgtcgagcagcagttcggcccaggcgctgctagggactcacaagcagagcctacacaacctgaacaagctgcagaagctcctgctgaggggggtccccaaacgaaccagcttgagactggggcttccagtccagagaggtccaacgaagtggaaatggattctacggtgataacagtaagcaactcttccgataaatccgtgctccaacagccttccgttaatacctccatcggtcagccactgccgtctacccagctttacctccgacagacagaaacactcacgagtaatttgcggatgcctttgaccctcacctccaacacacaggtgattggcaccgccggtaacacatatctgcctgctcttttcacgacccagcccgcagggtctgggccaaaaccattcctgttttctctgcctcagcctcttgcaggacagcagacccagttcgtgactgtgtcacagcctggactgagtacatttacagcgcagctgccggctcctcagcccctcgcatcctccgccggtcactctactgctagtggacaaggcgaaaagaagccttacgaatgtacactctgtaacaagacattcacagcaaagcaaaactatgtgaaacacatgtttgttcataccggtgagaaacctcaccagtgcagcatctgctggaggagtttctcattaaaagattacctgattaaacatatggtgacccacacgggcgttagggcctaccagtgttctatctgtaataaacgctttactcaaaagagcagtttaaacgtacatatgcgcctgcatagaggtgagaagtcatatgaatgttatatctgcaaaaaaaagttctctcacaagactctccttgagcgtcatgttgcgttgcactccgccagcaacgggacgccccctgccggtacccctcccggagcgagggctggacctccaggggtcgttgcttgtacagaaggcaccacttacgtctgtagcgtctgcccggcaaagtttgaccagatcgagcagtttaacgaccacatgaggatgcatgtgagtgacggatag

SEQ ID NO: 62763 - DNA, 2007 bp, Artificial Sequence
  derived and/or modified sequence
atgacggagagaatccattccatcaatctgcacaattttagcaatagcgtgctggagacactcaatgagcagaggaaccgcggacatttttgcgatgtaacggtgcgtatccacggctcaatgctgcgggctcaccggtgcgtcctggctgctggaagccctttcttccaggataaactcctgttgggctattccgatatcgaaataccctccgtagtcagcgtccagtcagtgcagaagctaatcgacttcatgtactcaggcgtcctgcgcgtgtcacagagtgaagcgctgcaaatccttactgctgcatcaattctccagatcaaaaccgtgattgatgagtgtacccggatagtgtctcagaatgtgggggatgtattccccggtatccaggactccggccaggacactcctaggggcaccccagagagcggtacctccggccagtctagcgataccgaaagcgggtatctgcaatcacacccacagcacagtgtcgatcggatttattctgcactgtacgcttgcagtatgcaaaatggcagcggtgagcgctctttctatagcggcgctgtggtctctcatcatgaaactgctctaggcctgcctagggatcaccacatggaggacccctcctggattacgcgcatccacgagcgctcccaacaaatggagcgataccttagtactaccccggaaacgacgcactgtaggaagcaaccaagacctgttagaatccagacactagtgggaaacatccatatcaaacaggaaatggaagacgactacgattactatggacagcagagagtacagattttggaacgcaatgaatccgaagaatgtactgaagatacagatcaggcggaaggcacggaatcagaacccaaaggggaaagtttcgactcaggagttagctcttccatcggcacagaacccgatagcgtggagcagcagttcggacccggtgcggctcgcgacagtcaggctgagccgacccagccagagcaggcggctgaggcacctgctgaggggggtccccaaactaaccagctagagacgggtgctagtagccctgaacgttccaacgaagtcgaaatggactctacagtgatcaccgtatccaactcttcagacaaaagcgtactgcagcagccctccgtgaacaccagtattggacagccacttccaagtacgcaattatatctgaggcagacagagactctcacctctaacctgcggatgccactgaccctgaccagtaatacccaagttattggaaccgctggcaatacttatcttcctgcactcttcaccactcagccagcgggaagtggcccaaagcctttcctgttttccctaccacaacccctagcagggcagcagacacagttcgtaacagtatcacaaccaggattgtcaacgttcactgcacagttacctgctccccagccattggcctcttcagccggtcacagcaccgccagcgggcagggcgaaaagaagccgtacgaatgtacactctgcaacaagaccttcacagcaaaacaaaactacgtgaaacacatgtttgtccacaccggtgagaagcctcaccagtgttccatttgttggagatccttctccctaaaagactatctcatcaagcacatggtgacccataccggggtgcgggcatatcaatgcagcatttgcaataagcggttcacgcaaaaatctagcctgaatgtccacatgaggctgcacagaggtgaaaaatcttacgagtgttacatttgtaaaaaaaaattcagtcacaaaaccctactcgagaggcatgtcgccctgcatagcgcatccaatggaacacctcccgcaggtactccacccggagcacgggcaggcccacctggcgttgtggcttgcaccgaaggcaccacttatgtgtgttccgtctgtcctgccaagtttgaccagatagagcaattcaatgatcacatgaggatgcatgtctctgatggctag

SEQ ID NO: 62764 - DNA, 2007 bp, Artificial Sequence
  derived and/or modified sequence
atgacagagaggatccactccattaatttgcacaatttctccaactctgtcctggaaaccctgaacgaacagaggaataggggccacttctgcgacgtaaccgttaggatccacggtagcatgttgagagcccataggtgcgtgctggcagcaggcagtcctttttttcaggataaactgctgttgggttactctgacattgaaatcccgtctgtagtttccgtccagagcgtgcagaaactgatcgacttcatgtatagcggcgtgttgagggtgtcccagagtgaggccctccagatccttaccgccgcttccatccttcagattaagacagtaattgatgagtgtacgaggatcgtgtctcagaatgttggcgacgtctttccgggaatccaggactccggacaagacacccctcggggaacccccgaatccggaacaagcgggcaaagcagcgatactgagtctggctacttgcagagccaccctcagcactcagtggaccggatctattcagccctgtatgcctgttctatgcagaacggctctggggaacggtcattctactcaggtgccgtcgtaagtcatcacgaaaccgcgttggggttaccaagagatcatcacatggaagatccaagttggattacgaggatacatgaaagatcccagcagatggagagatatttgtcaacaacaccggagacaacgcattgtcgtaagcagcctagacccgtccgtattcagacactcgtggggaacatccacatcaagcaagaaatggaagatgactatgattattacgggcagcagagggtccaaattctcgaacgtaatgagtcagaagaatgcactgaggatacagatcaggcggaaggcaccgagtccgagccgaagggagaatcctttgactcaggtgtctcctctagcatcgggactgaaccagattctgtcgagcagcagtttggccctggggctgcacgggacagccaggctgaaccaacacagcctgaacaggccgctgaggccccagccgaaggcggaccccagaccaaccagctggagacgggggcttctagtcccgaacgtagcaacgaggtagaaatggattcaaccgtcattacagtctctaacagttcagacaaaagtgtcctgcagcagccgtcggtgaacaccagtattggtcaacccctaccctcaactcaactgtacctgcgtcaaaccgaaaccctgactagtaacttaagaatgcctctcacccttacttccaatacacaggtcatcgggacggctggcaacacgtatctgcccgcactgtttactacacagcccgcaggctcaggacctaaaccctttctgtttagcttacctcagcccctggcgggacaacagacccagtttgtcactgtcagccagccaggcctctccacgtttacagcacagctgccagctcctcaacctctagcttcatcggcaggccattcaactgcctcaggtcaaggagagaaaaaaccttatgagtgcacactatgcaacaagacgtttacggctaagcagaattatgtcaaacacatgtttgttcatacaggcgagaagccccatcagtgctctatctgctggcgatccttctccctgaaagactatcttatcaaacatatggttacccatactggcgtgcgcgcataccagtgctcaatctgtaacaaaaggtttactcaaaagtccagcctcaacgttcatatgcggttacaccgcggtgagaagtcttacgagtgctatatatgcaaaaaaaagttcagtcacaaaaccttgctcgaaagacacgttgctctccactccgcctctaatggaacacctcccgcaggtactcccccaggggctcgcgcaggacccccaggagtggtcgcttgtactgaaggtaccacatacgtgtgtagtgtgtgccctgccaaattcgaccagattgagcaatttaatgaccacatgcgcatgcatgtgagcgacggctag

SEQ ID NO: 62765 - DNA, 2007 bp, Artificial Sequence
  derived and/or modified sequence
atgacggagcgcatccactctataaatctccacaacttctcaaactcagtgctagagacactaaatgaacagaggaaccgtgggcacttttgcgatgtgaccgtaaggatccatggctctatgctgagggcacatagatgcgtgctggctgccggtagcccttttttccaggataagttgctgctggggtattctgatatcgagatcccatctgttgtgtcagttcagtctgtacagaaactgattgatttcatgtactctggggttcttcgtgtctctcagtctgaagcacttcaaatactcacggctgcaagcatactgcagattaaaactgtgattgacgagtgtaccagaatcgtgtctcaaaatgtgggcgacgtatttccgggaattcaggattctggacaggacaccccccgtggtacacccgagtcaggcacttcaggtcagtcttccgacaccgagagcggctatctgcagtcgcatccgcagcactccgtggatcgcatttactccgccttatatgcctgctctatgcagaacgggtcgggcgagagatcgttctactctggagcagtggtcagccaccacgaaacagctcttggcttaccccgtgaccaccacatggaggatccgtcctggattacaaggatccacgaaaggagccagcagatggagcgttacctctcaaccaccccggagaccacacattgccgcaagcaaccgcgaccagtgcgcatccagacactcgtcggaaatatacatattaagcaagagatggaagatgactatgattactatggccagcagcgggttcaaatcctggagcgaaacgagagcgaggagtgtaccgaagatacagaccaggcagaaggcacagagtctgagcccaagggggagagttttgattctggggtgtcatcaagcattgggacagagcccgatagcgtcgagcaacagttcggacctggcgctgccagggactctcaggccgaacccactcagcctgaacaggctgccgaggctcctgctgaaggcggaccccagaccaatcagctcgagactggagccagttcacccgaacggagcaacgaggtcgagatggacagcactgttatcaccgtctcaaactccagtgacaaaagcgtgttgcagcaaccctctgttaatacttccatcggacagcccctgccctccacacagctgtacctacgacagacagagaccctaacgagtaaccttcgtatgcccctcacactgacctctaacactcaggtgattgggacagccggtaacacttatctgccggcattgttcactacacagcctgctggcagtggtcccaaacccttcctcttttccctcccacagcctctagctgggcaacaaacacagtttgtcaccgtaagtcagcccggattgtccaccttcaccgcccagttgcctgctccacagcccctggctagctccgccggacacagcacggcgtcgggccagggagagaagaagccttacgagtgtaccctgtgcaacaaaacattcacagctaaacagaattatgtgaagcatatgtttgtccacacaggtgagaagcctcaccagtgttccatttgctggagatcttttagcctcaaggactatctgattaaacatatggtaacacacactggggtaagagcatatcagtgtagcatttgtaacaaaaggttcacccagaaatctagcttaaatgtgcacatgagactccaccggggagaaaagtcctatgagtgctatatctgcaaaaagaagttttcccacaagactctcctcgaaaggcacgttgcgctccattcagctagtaacggcaccccacccgctggaactcccccaggggctagggccggacctccgggagtggtggcctgcacagaagggactacatacgtgtgcagtgtgtgtcctgctaagtttgaccagatcgaacagtttaacgaccacatgcggatgcacgtgtccgacggatag

SEQ ID NO: 62766 - DNA, 174 bp, Artificial Sequence
  derived and/or modified sequence
atgactgaacggattcattccattaacctacacaacttctctaattccgttttggagactttaaacgaacagcgtaatcgagggcacttctgcgacgtgactgtgagaatccatggctcaatgctgagggctcaccgttgtgtgctcgctgccggttcacctttcttccagtag

SEQ ID NO: 62767 - DNA, 2007 bp, Artificial Sequence
  derived and/or modified sequence
atgactgaaagaatccactcaatcaacctgcataacttcagtaacagcgttttagaaactctcaatgagcagagaaatcgcggacatttttgcgacgtgacagtgcgcattcacgggagcatgcttagagctcatagatgcgtcctcgcagctggcagcccctttttccaggataaactgctgctgggttactcggatattgagataccctcagtggtaagcgtacaaagcgtccagaagctgatcgacttcatgtactcgggggttttgagagtgagccaatctgaagctttgcagatcctcactgcagcgtcaattctacagattaaaacagtgattgacgaatgtacgcgcatcgtgtcccaaaatgtgggcgatgtcttccccggaatccaggacagcggccaggacacaccgagggggacacccgagtctggaacatcaggtcagtcatcagatacggagtcaggctacctccagtcacatcctcaacacagtgtagatcggatttatagcgccctttatgcatgctcgatgcagaatggttccggagaaaggagtttctattccggcgctgtcgtgtcacatcacgaaactgcactaggtctgcctagagaccatcacatggaagatcctagttggattacccgcatccacgagagatctcagcagatggagcggtacttgagtactacgcccgaaacaacccactgcaggaagcagcctaggcccgtcaggatccagaccttggtgggcaacattcacattaagcaggaaatggaggatgactatgattattacgggcaacagcgcgtccagatcctggaacggaatgaatccgaggagtgcacagaggataccgatcaagccgaagggaccgagtccgagcctaagggtgagtcttttgacagcggcgtttcctcatcgatcggcacggaaccggacagcgtggagcagcagtttgggccaggggctgctcgagacagccaagctgaaccgacacagcctgagcaagctgccgaggcccctgccgagggtgggccacaaaccaaccaactggagaccggcgctagtagtcccgagcggtctaacgaggtggagatggattctaccgtaattaccgtaagtaacagttccgacaagtcagtgctgcagcaaccttcagtcaacacaagcataggccagccgctcccctccactcagttgtacctccggcagaccgaaactctgacatcaaacttacgaatgcccctgaccctgactagtaacacacaggtcatcgggacggccggaaacacctacctgcctgcattgtttaccacacagcctgctggctcgggcccaaagccatttctattttctttgccccagccactggccggtcagcaaacccagtttgtgaccgtgagtcagccaggcttatctacattcaccgcacagctgccagcccctcagcctctcgcaagctcagctggacatagtaccgcaagcggacagggggaaaagaaaccatatgagtgtaccctgtgtaacaagactttcacagccaaacagaattatgtaaagcacatgttcgtgcataccggggaaaaaccccatcagtgctccatatgctggcggagtttttctttgaaagactatctgattaaacatatggtgacccatacaggtgtgcgggcttaccagtgttcaatctgtaataaaagatttactcagaagagctccctcaacgttcacatgaggctccatagaggcgaaaagtcctacgaatgttatatctgcaaaaagaaattctcccataaaaccctactggagaggcatgtggccctgcacagcgccagtaatggtacgccacccgcaggaacacctcctggagctcgagccggaccccctggcgtcgtagcctgtacagaagggaccacttacgtctgctccgtatgtcctgccaagttcgatcagattgaacagtttaatgatcacatgcgtatgcatgttagcgatggctag

SEQ ID NO: 62768 - DNA, 2007 bp, Artificial Sequence
  derived and/or modified sequence
atgactgaaagaatacattctataaacttgcataactttagtaattccgtgttagaaaccctgaacgagcagagaaacagagggcatttctgcgacgtcaccgtgaggatccacggctcaatgctccgggctcaccgctgcgtgctagcagctgggagccctttcttccaggacaaactcctgttgggttactcagatatagagattccatcggtggtcagcgttcagagcgttcaaaagctcatcgatttcatgtacagtggagtgctccgggtatcgcagtccgaggcactgcagattctcacagccgcatcaattctccaaatcaagactgtgatcgatgaatgcactcgtattgtctcccagaacgtgggagatgtgtttccaggaatccaggacagcgggcaggacacgccaaggggcactccagaatccgggacatccgggcaatcctccgatactgagagcggctatctccagtcacaccctcagcattcagttgaccgaatatatagcgccctgtatgcttgctcgatgcaaaatggcagcggggaacgctccttctatagtggggcagtggtttcccatcatgaaaccgccctggggctacccagagaccaccacatggaagatccctcttggatcactagaattcacgaacgctcacagcagatggaacgttacctgagcacgacccctgaaaccacccactgcagaaaacaacccagaccggtgcgaatccaaacgctggtgggaaacattcacataaagcaggaaatggaggatgactacgactactatggacagcagagggtgcagatcctcgagcgcaacgagtctgaggagtgcaccgaggataccgaccaagccgagggcacagagtctgaacctaagggagagagcttcgacagtggtgtgtctagctcaattggcaccgagccagattcagtagagcagcagttcggtcctggggctgcccgtgattctcaggccgagccgacacagcccgagcaggctgccgaagccccagccgaaggtggcccacaaacgaatcaactggagacaggcgcttcaagccccgaaaggagcaatgaagttgaaatggattccaccgtgatcaccgttagcaactcttcagataaaagtgtactgcaacaaccctccgtgaacacctcaatcgggcagcctctcccaagcacacagctgtatcttcgtcagactgagacccttacgagtaatctgaggatgcccctgacactgacctccaatacacaagtgataggtacagccggaaacacctacttgcctgctctattcacaactcagcccgcaggcagtggcccaaagcctttcctgtttagtctgccacagccgttagcaggccagcagacccagtttgtcacagtgagccaaccaggtctctccaccttcactgcacaactgcctgctccacagccgctggcatcttctgctggccactctacggcttctggccagggcgaaaagaagccctatgaatgtactctttgtaataaaacttttacagccaaacagaactacgtgaaacatatgttcgtccacaccggagagaagccacaccagtgctctatctgttggaggagttttagcctcaaggactacctcatcaaacatatggttacccacacaggagtccgcgcataccagtgctccatttgtaacaagagatttacacagaagtccagtttgaatgtgcatatgaggctccaccgtggggagaaaagctatgagtgctacatctgcaagaagaagttttcacataagactttgttagaacgccacgtggcactccacagcgcgtcaaatggcacccctccggcaggcacccctcccggagcacgggctggaccgccaggggttgttgcatgcaccgaaggtaccacttacgtgtgcagcgtttgtccagccaagttcgaccaaatcgaacagtttaatgaccacatgcggatgcacgtgtctgatgggtag

SEQ ID NO: 62769 - protein, 570 aa, Artificial Sequence
  derived and/or modified sequence
MANPKEKTAMCLVNELARFNRVQPQYKLLNERGPAHSKMFSVQLSLGEQTWESEGSSIKKAQQAVANKALTESTLPKPVQKPPKSNVNNNPGSITPTVELNGLAMKRGEPAIYRPLDPKPFPNYRANYNFRGMYNQRYHCPVPKIFYVQLTVGNNEFFGEGKTRQAARHNAAMKALQALQNEPIPERSPQNGESGKDVDDDKDANKSEISLVFEIALKRNMPVSFEVIKESGPPHMKSFVTRVSVGEFSAEGEGNSKKLSKKRAATTVLQELKKLPPLPVVEKPKLFFKKRPKTIVKAGPEYGQGMNPISRLAQIQQAKKEKEPDYVLLSERGMPRRREFVMQVKVGNEVATGTGPNKKIAKKNAAEAMLLQLGYKASTNLQDQLEKTGENKGWSGPKPGFPEPTNNTPKGILHLSPDVYQEMEASRHKVISGTTLGYLSPKDMNQPSSSFFSISPTSNSSATIARELLMNGTSSTAEAIGLKGSSPTPPCSPVQPSKQLEYLARIQGFQAALSALKQFSEQGLDPIDGAMNIEKGSLEKQAKHLREKADNNQAPPGSIAQDCKKSNSAV

SEQ ID NO: 62770 - DNA, 3065 bp, Artificial Sequence
  derived and/or modified sequence
agggcgcggcgggagcgccggggaggcgggcggaggcgggcggaggcggggggcggggagcccgaggggtggaagccggcggcggccgagcggggtcagttctctgtagtgtttgccaatgttggagccgtctgcaaagtgtccccggcaagaagaggctgcctaccacaaggactttagcttactttttaaagattgaagaaaaaaaagaagacagaaaaagaagaactcaaagatacacaaagtaatttgaaccaaggctcagaagtttttggagccgtgagggatacagcagtttggtcaatattgtcttaacatgcttcaaataaatcagcttctctccaagataaaatggcaaacccaaaagagaaaactgcaatgtgtctggtaaatgagttagcccgtttcaatagagtccaaccccagtataaacttctgaatgaaagagggcctgctcattcaaagatgttctcagtgcagctgagtcttggtgagcagacatgggaatccgaaggcagcagtataaagaaggctcagcaggctgttgccaataaagctttgactgaatctacgcttcccaaaccagttcagaagccacccaaaagtaatgttaacaataacccaggcagtataactccaactgtggaactgaatgggcttgctatgaaaaggggagagcctgccatctacaggccattagatccaaagccattcccaaattatagagctaattacaactttcggggcatgtacaatcagaggtatcattgcccagtgcctaagatcttttatgttcagctcactgtaggaaataatgaattttttggggaaggaaagactcgacaagctgctagacacaatgctgcaatgaaagccctccaagcactgcagaatgaacctattccagaaagatctcctcagaatggtgaatcaggaaaggatgtggatgatgacaaagatgcaaataagtctgagatcagcttagtgtttgaaattgctctgaagcgaaatatgcctgtcagttttgaggttattaaagaaagtggaccaccacatatgaaaagctttgttactcgagtgtcagtaggagagttctctgcagaaggagaaggaaatagcaaaaaactctccaagaagcgcgctgcgaccaccgtcttacaggagcttaaaaaacttccacctcttcctgtggtggaaaagccaaaactattttttaaaaaacgccctaaaacaatagtaaaggccggaccagaatatggccaagggatgaaccctattagccgcctggcgcaaattcaacaggccaaaaaggaaaaggagccggattatgttttgctttcagaaagaggaatgcctcgacgtcgagaatttgtgatgcaggtgaaggtaggcaatgaagttgctacaggaacaggacctaataaaaagatagccaaaaaaaatgctgcagaagcaatgctgttacaacttggttataaagcatccactaatcttcaggatcaacttgagaagacaggggaaaacaaaggatggagtggtccaaagcctgggtttcctgaaccaacaaataatactccaaaaggaattcttcatttgtctcctgatgtttatcaagagatggaagccagccgccacaaagtaatctctggcactactctaggctatttgtcacccaaagatatgaaccaaccttcaagctctttcttcagtatatctcccacatcgaatagttcagctacaattgccagggaactccttatgaatggaacatcttctacagctgaagccataggtttaaaaggaagttctcctactcccccttgttctccagtacaaccttcaaaacaactggaatatttagcaaggattcaaggctttcaggcagccttaagtgccttgaaacaattttctgaacaaggactggatccaatcgatggagcaatgaatatcgaaaaaggttctcttgaaaaacaagccaagcatctgagagagaaagcggacaataaccaggcacccccgggctccatcgctcaggactgcaagaaatcaaactcggccgtctagcagctcccagaacccgcggctgccaccgcatccttataaacctgtcagcacgcatgagggtgtctgtgttcagggaaatgaatgactaataccattatttgagtcttatgtgaagacaacactattctaacacgagagataatatacatggtactgtttattcaactggggaaaaataaaactttgagcatttcccttggaactcgagatcagatcataactcatttgcctagaggcagcagaaatctgatcctgctactggagcttaaaataacaagtaaagaaaagtgttagaaacaaagctaaaattttaacatgattaataatagagaagttgggtttggttctgttgttatgattgttttgtcgtggtgcttgtgttcagttatattctctctctctctcatttcaaatactgcttgacaattcgaaaatgaaccaatgatgtgctgtggaatgtgatggttgtcttcatatagagtcacatggtttctctttttatgcagatatttataatcttcatcctatatcagtaggaataactataaggtgcactacaaaaagatgtatgcaaacaaacatgttttaaatcaggtcagatatctgatgaaaaatacgaactaatgttaagagcaagtagtttcaacatactccaggaactgagaaacaaaacaaagcaattgtgggttttgagctccatatactcttagcaagtaagggggcgtcttgcccctatatatcatcttcccggattccactccctgttgtgggaatcgcgcccacccccatccgtgtgttgtagccactcacggtttgcatcaagagtgttttttgtaactgcctctggacttgggacagtgagtaggatcaaaaataaataatgtacatgacggggaagggaaaaacctgttggagttgcttccagccagccacgctccgggccagcatgttggaatccagcgtggagcagatgcagtaaaaatgtggttggtttctgtgtg

SEQ ID NO: 62771 - DNA, 1713 bp, Artificial Sequence
  derived and/or modified sequence
atggccaaccccaaggagaagaccgccatgtgcctggtgaacgagctggccagattcaacagagtgcagccccagtacaagctgctgaacgagagaggccccgcccacagcaagatgttcagcgtgcagctgagcctgggcgagcagacctgggagagcgagggcagcagcatcaagaaggcccagcaggccgtggccaacaaggccctgaccgagagcaccctgcccaagcccgtgcagaagccccccaagagcaacgtgaacaacaaccccggcagcatcacccccaccgtggagctgaacggcctggccatgaagagaggcgagcccgccatctacagacccctggaccccaagcccttccccaactacagagccaactacaacttcagaggcatgtacaaccagagataccactgccccgtgcccaagatcttctacgtgcagctgaccgtgggcaacaacgagttcttcggcgagggcaagaccagacaggccgccagacacaacgccgccatgaaggccctgcaggccctgcagaacgagcccatccccgagagaagcccccagaacggcgagagcggcaaggacgtggacgacgacaaggacgccaacaagagcgagatcagcctggtgttcgagatcgccctgaagagaaacatgcccgtgagcttcgaggtgatcaaggagagcggccccccccacatgaagagcttcgtgaccagagtgagcgtgggcgagttcagcgccgagggcgagggcaacagcaagaagctgagcaagaagagagccgccaccaccgtgctgcaggagctgaagaagctgccccccctgcccgtggtggagaagcccaagctgttcttcaagaagagacccaagaccatcgtgaaggccggccccgagtacggccagggcatgaaccccatcagcagactggcccagatccagcaggccaagaaggagaaggagcccgactacgtgctgctgagcgagagaggcatgcccagaagaagagagttcgtgatgcaggtgaaggtgggcaacgaggtggccaccggcaccggccccaacaagaagatcgccaagaagaacgccgccgaggccatgctgctgcagctgggctacaaggccagcaccaacctgcaggaccagctggagaagaccggcgagaacaagggctggagcggccccaagcccggcttccccgagcccaccaacaacacccccaagggcatcctgcacctgagccccgacgtgtaccaggagatggaggccagcagacacaaggtgatcagcggcaccaccctgggctacctgagccccaaggacatgaaccagcccagcagcagcttcttcagcatcagccccaccagcaacagcagcgccaccatcgccagagagctgctgatgaacggcaccagcagcaccgccgaggccatcggcctgaagggcagcagccccacccccccctgcagccccgtgcagcccagcaagcagctggagtacctggccagaatccagggcttccaggccgccctgagcgccctgaagcagttcagcgagcagggcctggaccccatcgacggcgccatgaacatcgagaagggcagcctggagaagcaggccaagcacctgagagagaaggccgacaacaaccaggccccccccggcagcatcgcccaggactgcaagaagagcaacagcgccgtgtag

SEQ ID NO: 62772 - DNA, 1713 bp, Artificial Sequence
  derived and/or modified sequence
atggccaacccgaaggagaagacggctatgtgtctagttaacgaacttgctagattcaatcgagttcagccacaatacaaactcttgaatgaacgcggccccgctcatagtaaaatgttctccgttcagctctcgctcggcgaacaaacatgggaatctgagggctccagcatcaaaaaagcccagcaggcagtggcaaacaaggccctcacagagagtactctacctaagcccgtgcagaaaccaccaaaatcaaacgtgaataacaaccccgggagcatcactccgaccgtagagctcaatggcctggctatgaagcggggcgaaccggctatctacaggccactggaccctaagccatttcctaactaccgtgcgaattacaacttcaggggaatgtacaatcaacgctaccattgccctgttcctaaaatcttctatgtgcaactgactgtgggaaacaatgaattttttggagaaggaaaaacccggcaggcagctaggcacaatgcggccatgaaggcattgcaggctctgcagaatgagcccatccccgaaaggtccccgcagaatggagagtctggaaaggatgtcgacgatgataaggatgcaaacaagagcgagatcagcctcgttttcgaaattgcactcaagagaaacatgccagtcagcttcgaagtcatcaaggagagcgggcctcctcatatgaagagctttgtgacccgcgtttcagtgggcgaattctccgccgagggagaggggaactccaaaaaactttccaaaaaaagggcggctactactgttttgcaggagctaaaaaagttacccccacttcccgttgtggaaaaaccgaaattattcttcaagaagaggccgaaaacgattgtgaaggctgggccagagtacggacagggcatgaatcccatcagtcgactcgcccagatccagcaggccaagaaggagaaggagcccgattatgtcctcctctccgagaggggcatgcctcgaagacgagaatttgtgatgcaggtcaaagttgggaatgaagtggcgaccgggactggtccaaataaaaagattgctaaaaaaaacgccgccgaagcgatgctactgcagctaggttataaggcaagcacgaatctgcaagaccagctcgagaaaactggagagaataagggttggtctggtcctaagccgggtttccccgaacctaccaacaacacccccaaaggcatcttacacctctcacctgacgtatatcaggaaatggaggcgtctaggcataaggtcatctcagggaccacactcggctatctgagcccaaaagatatgaaccaaccctcgagttccttcttctcaattagtcccactagcaatagcagcgcgaccattgctcgagagttgcttatgaatggcacctcttctactgccgaggcaattggactaaagggcagttctcctacgccaccctgctctcctgttcagcccagcaagcagctcgagtatttggctaggattcaaggctttcaggctgccctttctgccctgaaacagttctcagagcagggcctggatccaatagatggtgccatgaacatagagaaagggagcctggagaagcaagcaaagcacctaagggagaaagcagacaacaatcaggcccctcctggatccatcgcccaggactgcaagaagtccaactcagctgtgtag

SEQ ID NO: 62773 - DNA, 1713 bp, Artificial Sequence
  derived and/or modified sequence
atggccaaccccaaggagaagacagccatgtgcctggtgaatgagctggcccgcttcaacagagtgcagccccagtacaagctgctgaatgaaagaggccctgcccacagcaagatgttttctgtgcagctgagcctgggggagcagacctgggagagcgagggcagcagcatcaagaaggcccagcaggccgtggccaacaaggccctgacagagagcaccctgcccaagcctgtgcagaagccacccaagagcaatgtgaacaacaaccctggcagcatcacccccaccgtggagctgaatggcctggccatgaagagaggagagcccgccatctaccggcccctggaccccaagcccttccccaactaccgggccaactacaacttccggggcatgtacaaccagcgctaccactgccctgtgcccaagatcttctacgtgcagctgactgtgggcaacaatgagttcttcggggagggcaagacccggcaggccgcccggcacaatgctgccatgaaggccctgcaggccctgcagaatgagcccatccctgagaggagcccccagaatggagagagcggcaaggatgtggatgatgacaaggatgccaacaagtctgagatcagcctggtgtttgaaattgccctgaagaggaacatgcctgtgtcctttgaagtcatcaaggagagcggccccccccacatgaagagctttgtgaccagggtgtctgtgggggagttctctgctgagggggagggcaacagcaagaagctgagcaagaagagagctgccaccaccgtgctgcaggagctgaagaagctgccccccctgcctgtggtggagaagcccaagctgttcttcaagaagaggcccaagaccatcgtgaaggccggcccagaatatggccagggcatgaaccccatcagccggctggcccagatccagcaggccaagaaggagaaggagccagactatgtgctgctgtctgagcggggcatgcccaggagaagagaatttgtgatgcaggtgaaggtgggcaatgaggtggccaccggcaccggccccaacaagaagatcgccaagaagaatgctgctgaggccatgctgctgcagctgggctacaaggccagcaccaacctgcaggaccagctggagaagacaggagagaacaagggctggagcggccccaagccaggcttccctgagcccaccaacaacacccccaagggcatcctgcacctgagcccagatgtgtaccaggagatggaggccagccgccacaaggtgatcagcggcaccaccctgggctacctgagccccaaggacatgaaccagcccagcagcagcttcttcagcatcagccccaccagcaacagcagcgccaccatcgcccgggagctgctgatgaatggcaccagcagcacagctgaggccatcggcctgaagggcagcagccccaccccaccctgcagccctgtgcagcccagcaagcagctggagtacctggcccgcatccagggcttccaggccgccctgagcgccctgaagcagttcagcgagcagggcctggaccccattgatggagccatgaacatcgagaagggcagcctggagaagcaggccaagcacctgcgggagaaggctgacaacaaccaggcccctcctggcagcatcgcccaggactgcaagaagagcaacagcgctgtgtag

SEQ ID NO: 62774 - DNA, 1713 bp, Artificial Sequence
  derived and/or modified sequence
atggccaaccccaaggagaagaccgccatgtgcctggtgaacgagcttgcacgttttaatagggtgcaaccccagtacaaactgctcaatgaaaggggtcctgctcactccaaaatgttctcagtccaactgtctctgggggaacaaacttgggagtcagaaggctcatcaattaagaaggcacagcaggctgttgcaaacaaggctctcactgaaagcacactgcctaagccagtgcagaagccgcctaagagcaatgttaataacaaccctggatctattacgccaaccgtcgaactgaacgggctcgctatgaagaggggcgagcctgccatctatagacctctggacccgaaaccatttcccaactaccgtgcgaattacaattttagaggaatgtacaaccagaggtaccattgtcccgtgcccaaaattttctacgtccagctaaccgtgggtaataacgaattcttcggcgaaggaaagactcgccaagcggcacgccataacgctgcaatgaaagcacttcaggcactgcaaaacgagcccattcccgagcggtcaccccagaatggggagtcaggtaaggacgtggatgatgacaaagatgccaataaaagtgagatcagcttagtcttcgagatcgctcttaaaaggaatatgcccgtaagcttcgaagtgatcaaggaatccggccctccacatatgaaatcttttgtgacccgtgtctccgtcggcgagttcagcgccgagggagaaggtaattcaaaaaaattatcaaaaaaaagagccgctacaactgtcttgcaagagctcaagaagttgcccccactgcccgtcgtcgaaaaaccgaagctcttctttaaaaagaggcctaagaccattgtgaaagccgggcctgaatacgggcagggcatgaatcccatcagtcggctggcacaaatacaacaagctaagaaagagaaggaaccagattatgtgctgctttccgagcgaggtatgccccgaagacgggaattcgtgatgcaagtaaaagtaggaaacgaagtggctaccggaacaggccccaataaaaagatcgcaaagaaaaatgctgcagaggctatgctgctccagctgggctacaaagcctccacgaatctacaggatcagctggaaaagactggagaaaataaaggttggtccggaccgaagccgggctttcccgaaccaaccaacaatacgcctaaaggcatcctccatctttcccctgacgtctaccaggaaatggaggcttctaggcacaaggtgatctccggaactacacttgggtaccttagcccaaaggatatgaatcaaccaagcagcagctttttcagtatcagtccaacctcgaactcctctgccacaatagctcgagagctgttaatgaacggaacctcatctacggctgaggcgatcggactgaagggctcctcgcctacccccccttgctcccctgtgcagccatctaaacagttggaataccttgctcgcattcaagggttccaagcagctctgtccgctctaaaacagttcagcgagcagggcctagacccgatcgacggcgccatgaacatcgagaaggggtcacttgagaagcaggcaaaacacttgagagagaaggccgataacaatcaggccccaccgggcagcatagcccaggattgcaaaaagtcaaatagtgctgtgtag

SEQ ID NO: 62775 - DNA, 1713 bp, Artificial Sequence
  derived and/or modified sequence
atggccaatcccaaggagaagacagccatgtgcctggtcaatgagctagcacggttcaacagagtgcagcctcagtacaaattgctgaacgagcgcggtcccgcacacagcaaaatgttctctgtgcaacttagccttggcgaacagacttgggagtctgaggggtcctcaattaagaaagctcaacaggccgttgcaaacaaagcactgacggaaagcacacttcccaaacccgtgcaaaaaccgcctaagtctaacgtcaataataatcctggctctattactcctaccgtcgagctgaacggattggccatgaagcgcggtgaacctgccatctacagaccgttggaccccaaaccctttcccaactaccgggcaaattacaattttagaggtatgtacaaccaacgctatcactgccccgtaccaaagattttttatgtgcagctcacagtcggaaacaacgaatttttcggtgaaggtaagacaaggcaggcagctagacataacgcagctatgaaggcgctccaggcactgcagaacgaacctattcctgaaaggagcccacagaatggcgagagcgggaaagacgtcgatgatgataaggacgcaaacaagtcggaaatcagtctggtgttcgaaatcgccctcaagaggaatatgccagtctcattcgaggtaattaaggagtctggccctcctcacatgaagagctttgtcactcgtgttagtgtcggagagttctctgcagagggggaaggcaactccaagaagttgtccaagaaacgtgctgctacgaccgtgctgcaggagctgaagaagttgcctcctctacccgtggtggagaagcccaagctgtttttcaagaagcggcctaaaactatcgtgaaggccggacccgagtacggccagggtatgaatcccattagccggctggctcagatacagcaggctaagaaggaaaaagaacctgattacgttctgctgagtgagagagggatgccccgacggagagaattcgtaatgcaggtaaaagtcggcaatgaggttgccacagggacaggtccaaacaagaagatcgccaagaaaaacgccgctgaggccatgctgctgcagcttggatataaggcgtccaccaacctgcaagatcagcttgagaagacaggagagaacaaggggtggagcggcccaaaacctggcttccctgaaccaaccaataataccccaaagggaatcctacatctgtcacccgatgtttatcaggagatggaagcttcgcggcacaaagtgatttccggtacaaccctgggctacttgtctcccaaagacatgaaccagcccagctcctcattcttctctatctcacctactagtaattccagcgctaccatagcaagagaactcttaatgaacggaacaagcagtacggcagaagccattggtcttaaaggttctagtccgacgccaccatgcagccctgtccaacctagcaaacagctggagtacttggccaggatccagggcttccaggccgctctctcggccctgaaacaattcagcgaacagggacttgaccctatcgatggcgcaatgaatattgaaaagggaagtctggagaaacaggctaagcatttacgagaaaaggcggataataatcaggcccctcctggaagtatagcacaggactgcaagaagagtaactcagcggtttag

SEQ ID NO: 62776 - protein, 479 aa, Artificial Sequence
  derived and/or modified sequence
MLQINQMFSVQLSLGEQTWESEGSSIKKAQQAVANKALTESTLPKPVQKPPKSNVNNNPGSITPTVELNGLAMKRGEPAIYRPLDPKPFPNYRANYNFRGMYNQRYHCPVPKIFYVQLTVGNNEFFGEGKTRQAARHNAAMKALQALQNEPIPERSPQNGESGKDVDDDKDANKSEISLVFEIALKRNMPVSFEVIKESGPPHMKSFVTRVSVGEFSAEGEGNSKKLSKKRAATTVLQELKKLPPLPVVEKPKLFFKKRPKTIVKAGPEYGQGMNPISRLAQIQQAKKEKEPDYVLLSERGMPRRREFVMQVKVGNEVATGTGPNKKIAKKNAAEAMLLQLGYKASTNLQDQLEKTGENKGWSGPKPGFPEPTNNTPKGILHLSPDVYQEMEASRHKVISGTTLGYLSPKDMNQPSSSFFSISPTSNSSATIARELLMNGTSSTAEAIGLKGSSPTPPCSPVQPSKQLEYLARIQGFQV

SEQ ID NO: 62777 - protein, 105 aa, Artificial Sequence
  derived and/or modified sequence
MLQINQMFSVQLSLGEQTWESEGSSIKKAQQAVANKALTESTLPKPVQKPPKSNVNNNPGSITPTVELNGLAMKRGEPAIYRPLDPKPFPNYRANYNFRGMYNQR

SEQ ID NO: 62778 - protein, 538 aa, Artificial Sequence
  derived and/or modified sequence
MLQINQMFSVQLSLGEQTWESEGSSIKKAQQAVANKALTESTLPKPVQKPPKSNVNNNPGSITPTVELNGLAMKRGEPAIYRPLDPKPFPNYRANYNFRGMYNQRYHCPVPKIFYVQLTVGNNEFFGEGKTRQAARHNAAMKALQALQNEPIPERSPQNGESGKDVDDDKDANKSEISLVFEIALKRNMPVSFEVIKESGPPHMKSFVTRVSVGEFSAEGEGNSKKLSKKRAATTVLQELKKLPPLPVVEKPKLFFKKRPKTIVKAGPEYGQGMNPISRLAQIQQAKKEKEPDYVLLSERGMPRRREFVMQVKVGNEVATGTGPNKKIAKKNAAEAMLLQLGYKASTNLQDQLEKTGENKGWSGPKPGFPEPTNNTPKGILHLSPDVYQEMEASRHKVISGTTLGYLSPKDMNQPSSSFFSISPTSNSSATIARELLMNGTSSTAEAIGLKGSSPTPPCSPVQPSKQLEYLARIQGFQAALSALKQFSEQGLDPIDGAMNIEKGSLEKQAKHLREKADNNQAPPGSIAQDCKKSNSAV

SEQ ID NO: 62779 - protein, 64 aa, Artificial Sequence
  derived and/or modified sequence
MLQINQMFSVQLSLGEQTWESEGSSIKKAQQAVANKALTESTLPKPVQKPPKSNVNNNPGSITP

SEQ ID NO: 62780 - protein, 204 aa, Artificial Sequence
  derived and/or modified sequence
MLQINQMFSVQLSLGEQTWESEGSSIKKAQQAVANKALTESTLPKPVQKPPKSNVNNNPGSITPTVELNGLAMKRGEPAIYRPLDPKPFPNYRANYNFRGMYNQRYHCPVPKIFYVQLTVGNNEFFGEGKTRQAARHNAAMKALQALQNEPIPERSPQNGESGKDVDDDKDANKSEISLVFEIALKRNMPVSFEVIKESGPPHM

SEQ ID NO: 62781 - DNA, 2646 bp, Artificial Sequence
  derived and/or modified sequence
agcagtttggtcaatattgtcttaacatgcttcaaataaatcagatgttctcagtgcagctgagtcttggtgagcagacatgggaatccgaaggcagcagtataaagaaggctcagcaggctgttgccaataaagctttgactgaatctacgcttcccaaaccagttcagaagccacccaaaagtaatgttaacaataacccaggcagtataactccaactgtggaactgaatgggcttgctatgaaaaggggagagcctgccatctacaggccattagatccaaagccattcccaaattatagagctaattacaactttcggggcatgtacaatcagaggtatcattgcccagtgcctaagatcttttatgttcagctcactgtaggaaataatgaattttttggggaaggaaagactcgacaagctgctagacacaatgctgcaatgaaagccctccaagcactgcagaatgaacctattccagaaagatctcctcagaatggtgaatcaggaaaggatgtggatgatgacaaagatgcaaataagtctgagatcagcttagtgtttgaaattgctctgaagcgaaatatgcctgtcagttttgaggttattaaagaaagtggaccaccacatatgaaaagctttgttactcgagtgtcagtaggagagttctctgcagaaggagaaggaaatagcaaaaaactctccaagaagcgcgctgcgaccaccgtcttacaggagcttaaaaaacttccacctcttcctgtggtggaaaagccaaaactattttttaaaaaacgccctaaaacaatagtaaaggccggaccagaatatggccaagggatgaaccctattagccgcctggcgcaaattcaacaggccaaaaaggaaaaggagccggattatgttttgctttcagaaagaggaatgcctcgacgtcgagaatttgtgatgcaggtgaaggtaggcaatgaagttgctacaggaacaggacctaataaaaagatagccaaaaaaaatgctgcagaagcaatgctgttacaacttggttataaagcatccactaatcttcaggatcaacttgagaagacaggggaaaacaaaggatggagtggtccaaagcctgggtttcctgaaccaacaaataatactccaaaaggaattcttcatttgtctcctgatgtttatcaagagatggaagccagccgccacaaagtaatctctggcactactctaggctatttgtcacccaaagatatgaaccaaccttcaagctctttcttcagtatatctcccacatcgaatagttcagctacaattgccagggaactccttatgaatggaacatcttctacagctgaagccataggtttaaaaggaagttctcctactcccccttgttctccagtacaaccttcaaaacaactggaatatttagcaaggattcaaggctttcaggcagccttaagtgccttgaaacaattttctgaacaaggactggatccaatcgatggagcaatgaatatcgaaaaaggttctcttgaaaaacaagccaagcatctgagagagaaagcggacaataaccaggcacccccgggctccatcgctcaggactgcaagaaatcaaactcggccgtctagcagctcccagaacccgcggctgccaccgcatccttataaacctgtcagcacgcatgagggtgtctgtgttcagggaaatgaatgactaataccattatttgagtcttatgtgaagacaacactattctaacacgagagataatatacatggtactgtttattcaactggggaaaaataaaactttgagcatttcccttggaactcgagatcagatcataactcatttgcctagaggcagcagaaatctgatcctgctactggagcttaaaataacaagtaaagaaaagtgttagaaacaaagctaaaattttaacatgattaataatagagaagttgggtttggttctgttgttatgattgttttgtcgtggtgcttgtgttcagttatattctctctctctctcatttcaaatactgcttgacaattcgaaaatgaaccaatgatgtgctgtggaatgtgatggttgtcttcatatagagtcacatggtttctctttttatgcagatatttataatcttcatcctatatcagtaggaataactataaggtgcactacaaaaagatgtatgcaaacaaacatgttttaaatcaggtcagatatctgatgaaaaatacgaactaatgttaagagcaagtagtttcaacatactccaggaactgagaaacaaaacaaagcaattgtgggttttgagctccatatactcttagcaagtaagggggcgtcttgcccctatatatcatcttcccggattccactccctgttgtgggaatcgcgcccacccccatccgtgtgttgtagccactcacggtttgcatcaagagtgttttttgtaactgcctctggacttgggacagtgagtaggatcaaaaataaataatgtacatgacggggaagggaaaaacctgttggagttgcttccagccagccacgctccgggccagcatgttggaatccagcgtggagcagatgcagtaaaaatgtggttggtttctgtgtgaa

SEQ ID NO: 62782 - DNA, 1617 bp, Artificial Sequence
  derived and/or modified sequence
atgctgcagatcaaccagatgttcagcgtgcagctgagcctgggcgagcagacctgggagagcgagggcagcagcatcaagaaggcccagcaggccgtggccaacaaggccctgaccgagagcaccctgcccaagcccgtgcagaagccccccaagagcaacgtgaacaacaaccccggcagcatcacccccaccgtggagctgaacggcctggccatgaagagaggcgagcccgccatctacagacccctggaccccaagcccttccccaactacagagccaactacaacttcagaggcatgtacaaccagagataccactgccccgtgcccaagatcttctacgtgcagctgaccgtgggcaacaacgagttcttcggcgagggcaagaccagacaggccgccagacacaacgccgccatgaaggccctgcaggccctgcagaacgagcccatccccgagagaagcccccagaacggcgagagcggcaaggacgtggacgacgacaaggacgccaacaagagcgagatcagcctggtgttcgagatcgccctgaagagaaacatgcccgtgagcttcgaggtgatcaaggagagcggccccccccacatgaagagcttcgtgaccagagtgagcgtgggcgagttcagcgccgagggcgagggcaacagcaagaagctgagcaagaagagagccgccaccaccgtgctgcaggagctgaagaagctgccccccctgcccgtggtggagaagcccaagctgttcttcaagaagagacccaagaccatcgtgaaggccggccccgagtacggccagggcatgaaccccatcagcagactggcccagatccagcaggccaagaaggagaaggagcccgactacgtgctgctgagcgagagaggcatgcccagaagaagagagttcgtgatgcaggtgaaggtgggcaacgaggtggccaccggcaccggccccaacaagaagatcgccaagaagaacgccgccgaggccatgctgctgcagctgggctacaaggccagcaccaacctgcaggaccagctggagaagaccggcgagaacaagggctggagcggccccaagcccggcttccccgagcccaccaacaacacccccaagggcatcctgcacctgagccccgacgtgtaccaggagatggaggccagcagacacaaggtgatcagcggcaccaccctgggctacctgagccccaaggacatgaaccagcccagcagcagcttcttcagcatcagccccaccagcaacagcagcgccaccatcgccagagagctgctgatgaacggcaccagcagcaccgccgaggccatcggcctgaagggcagcagccccacccccccctgcagccccgtgcagcccagcaagcagctggagtacctggccagaatccagggcttccaggccgccctgagcgccctgaagcagttcagcgagcagggcctggaccccatcgacggcgccatgaacatcgagaagggcagcctggagaagcaggccaagcacctgagagagaaggccgacaacaaccaggccccccccggcagcatcgcccaggactgcaagaagagcaacagcgccgtgtag

SEQ ID NO: 62783 - DNA, 1617 bp, Artificial Sequence
  derived and/or modified sequence
atgttgcagattaaccagatgtttagcgtgcagttaagcttaggcgaacagacctgggagtcggaaggatcctcgattaaaaaggcccaacaggccgtggcgaacaaggcactgacagagtccacccttccaaaaccagtccagaagccccccaagagcaacgttaacaataaccccggatcaatcacaccaactgtggagttgaatggcctggctatgaagcgtggggagcccgcgatctatcggccattggaccctaagcctttcccgaattaccgagctaattataatttcaggggaatgtataatcagcggtatcattgccccgttcctaaaattttctatgtgcagcttacagtaggcaataatgagttctttggcgagggaaagacacgccaggctgcacggcacaatgccgcaatgaaagccctgcaagcactgcagaatgagccaatacccgagagaagcccccagaatggtgagagcggcaaggacgtggatgatgacaaggacgccaacaaatccgaaatcagcctagtgtttgaaatcgccctgaagcggaacatgcctgtgtccttcgaggtaattaaggaaagtggtcctccccatatgaagtcctttgtgacacgagtgtctgtgggagagttcagtgccgagggcgagggaaattcgaaaaaactctccaaaaaaagagctgccaccactgtcttgcaagaattgaagaaactgcctccgctgccggtcgtagagaaacctaagctgttttttaagaaacgtcctaagacaatcgtaaaagcagggccagagtacggacagggtatgaatccaatttcaaggctcgctcagatacagcaggccaagaaagaaaaggagcccgactatgtactgctgagcgaacggggtatgcctcgacgcagggagttcgtaatgcaagtgaaagtcggaaacgaggtagcaacaggcactggccctaataagaagatcgccaagaagaatgcagccgaagccatgctgctgcaattaggctataaagcttccacgaacctccaggatcagctcgaaaagacaggcgaaaacaaggggtggtccggcccaaaacctggcttcccagaacccactaataacacacccaagggaatcctgcacctctctccagatgtctaccaagaaatggaggcctcaaggcataaggtcatttctggcacgacgctgggctacctgagtcccaaggacatgaaccagcctagttcgagttttttttccatctcaccaacctcgaactcaagtgccactatcgctagagagctgctaatgaacggaacgtcgagcactgccgaagccatcgggttgaagggatccagccccacccccccatgttccccggtgcagccatccaaacagttagaatacttagctcgcatacagggctttcaggctgcactatcagctctgaagcagtttagcgaacagggactggaccctattgacggagcgatgaatatagagaaaggcagtctggagaaacaggctaagcacctgagggaaaaggccgataacaatcaggcgcccccaggctctattgcccaggactgcaagaagtcgaactccgctgtatag

SEQ ID NO: 62784 - DNA, 1617 bp, Artificial Sequence
  derived and/or modified sequence
atgctgcagatcaaccagatgttttctgtgcagctgagcctgggggagcagacctgggagagcgagggcagcagcatcaagaaggcccagcaggccgtggccaacaaggccctgacagagagcaccctgcccaagcctgtgcagaagccacccaagagcaatgtgaacaacaaccctggcagcatcacccccaccgtggagctgaatggcctggccatgaagagaggagagcccgccatctaccggcccctggaccccaagcccttccccaactaccgggccaactacaacttccggggcatgtacaaccagcgctaccactgccctgtgcccaagatcttctacgtgcagctgactgtgggcaacaatgagttcttcggggagggcaagacccggcaggccgcccggcacaatgctgccatgaaggccctgcaggccctgcagaatgagcccatccctgagaggagcccccagaatggagagagcggcaaggatgtggatgatgacaaggatgccaacaagtctgagatcagcctggtgtttgaaattgccctgaagaggaacatgcctgtgtcctttgaagtcatcaaggagagcggccccccccacatgaagagctttgtgaccagggtgtctgtgggggagttctctgctgagggggagggcaacagcaagaagctgagcaagaagagagctgccaccaccgtgctgcaggagctgaagaagctgccccccctgcctgtggtggagaagcccaagctgttcttcaagaagaggcccaagaccatcgtgaaggccggcccagaatatggccagggcatgaaccccatcagccggctggcccagatccagcaggccaagaaggagaaggagccagactatgtgctgctgtctgagcggggcatgcccaggagaagagaatttgtgatgcaggtgaaggtgggcaatgaggtggccaccggcaccggccccaacaagaagatcgccaagaagaatgctgctgaggccatgctgctgcagctgggctacaaggccagcaccaacctgcaggaccagctggagaagacaggagagaacaagggctggagcggccccaagccaggcttccctgagcccaccaacaacacccccaagggcatcctgcacctgagcccagatgtgtaccaggagatggaggccagccgccacaaggtgatcagcggcaccaccctgggctacctgagccccaaggacatgaaccagcccagcagcagcttcttcagcatcagccccaccagcaacagcagcgccaccatcgcccgggagctgctgatgaatggcaccagcagcacagctgaggccatcggcctgaagggcagcagccccaccccaccctgcagccctgtgcagcccagcaagcagctggagtacctggcccgcatccagggcttccaggccgccctgagcgccctgaagcagttcagcgagcagggcctggaccccattgatggagccatgaacatcgagaagggcagcctggagaagcaggccaagcacctgcgggagaaggctgacaacaaccaggcccctcctggcagcatcgcccaggactgcaagaagagcaacagcgctgtgtag

SEQ ID NO: 62785 - DNA, 1617 bp, Artificial Sequence
  derived and/or modified sequence
atgctgcagatcaaccagatgttcagcgtgcagctgagcctgggcgagcagacctgggaaagtgagggaagctctatcaagaaggcccagcaggccgtggcaaacaaggctttaaccgaaagcacattgccaaaacctgtgcaaaaaccccccaagtctaacgttaacaataatcccgggagcattactcctaccgtcgaacttaacgggctcgcaatgaagcggggggaacctgctatctaccgcccactggacccgaagccctttccaaactacagagcaaactataattttcgaggcatgtataatcagaggtaccactgcccagtccctaagatattttacgttcagctgaccgtgggtaacaacgaattctttggggaggggaagacgagacaggcggccagacacaacgccgccatgaaggcactccaagccctccagaacgaaccaattccagagcgctctccacaaaacggggagagcgggaaagatgtggatgatgataaagacgccaataagtctgaaatctccttagtgtttgaaatcgccttgaagaggaacatgccggtgagctttgaggtgatcaaggagtctggaccaccccacatgaaaagcttcgtaacccgcgtctctgtgggtgaattttccgcagagggtgaaggcaactccaaaaaactctctaagaagagggccgccactacagtcctccaggagctgaagaagctgcctcctctgccggtcgtggaaaagcccaaacttttcttcaaaaaacgacctaagaccatcgtgaaggccggacccgagtacggacagggaatgaatcccatttccagactggcccagatccagcaagccaaaaaggaaaaagagccagactatgtcctgctgtcagagcgcggcatgcccagacgtagagagttcgtgatgcaggtgaaggtggggaacgaggtcgccacaggcaccggacccaacaaaaagattgctaaaaagaatgcagcagaggccatgctgttgcagctgggctataaggcctcgactaatctccaggaccagctggaaaaaactggagaaaacaagggttggagcgggccgaaaccaggcttcccagaaccaacaaacaatactcccaaaggcatcctgcacctgagcccagatgtttaccaagagatggaggcaagccgccataaggtaattagcgggactaccctcggatatctctcacccaaagacatgaaccagccctccagttcctttttttccatttcccctacttcaaactccagcgccacaattgccagggagttgctgatgaacggcaccagtagcaccgcagaagccatcggtttgaaggggagctctcccactccaccgtgcagccctgtgcagccaagtaagcaactcgagtacctggcaagaattcaggggtttcaagccgccctctcagccctcaaacaattctccgaacagggactggatcctatcgatggagccatgaatatcgaaaaaggatccctcgagaaacaggcgaagcatctgcgggagaaagcggataacaatcaggccccgcccggatccattgctcaggactgcaaaaagtccaacagcgcggtctag

SEQ ID NO: 62786 - DNA, 1617 bp, Artificial Sequence
  derived and/or modified sequence
atgctgcagatcaaccaaatgttttcagtgcagctgtcactcggagagcagacttgggagagtgaagggtcatctatcaaaaaggcccagcaagccgtggcaaataaggccctcacagagagcacattgcctaagccagtgcagaagccccctaaaagcaatgtgaacaataaccccggaagcatcacacccacggtcgagcttaatgggctcgccatgaaaaggggcgagcccgcaatctaccgacccctggaccccaagccctttcctaactatagagccaattacaacttccgcggaatgtacaatcagcgctaccattgtcctgttccgaaaatcttttacgttcagttgactgtcgggaataacgagttcttcggagagggtaaaacacgtcaggcagctcgtcacaatgcggcaatgaaagccttacaggcccttcagaatgagccaattccagaacgctctccacaaaacggagagagtggcaaagatgtcgacgacgataaggatgcaaataaatcggaaatctctctagtgtttgaaatcgccttgaagcggaatatgcctgtttcattcgaagtgattaaggagagtgggccaccccacatgaaatcatttgttaccagggtgagtgttggggaatttagtgccgagggagagggaaattccaagaagctctctaagaagagagccgctaccacggtgctgcaggaacttaaaaagctgccccctcttccagttgtggaaaagcctaaacttttcttcaagaaaagaccaaagacgattgtaaaagcaggccctgagtacggccagggtatgaaccccatatctaggctggcccagatccagcaggctaagaaagaaaaggaacccgactatgtcctgttatccgagcggggtatgccccgaaggagagagttcgtcatgcaagttaaggtgggcaatgaagtcgcgaccggaaccggccctaacaaaaagatagccaagaagaacgccgctgaggcgatgctgttgcagctcgggtacaaagccagcactaatctgcaggatcagctggagaaaaccggcgagaacaaaggctggagcggtcccaagcctggatttcccgaacccactaacaacaccccgaagggtatcctgcacctctcacctgacgtttatcaagagatggaagcctcccgtcacaaagtaatttctggaactaccttaggttatctgagcccaaaagatatgaaccagccatcgtcctcctttttcagcatctccccgacctccaacagcagtgccaccattgccagagagctcctgatgaacggtacaagcagcacagccgaagccatcggactaaagggctcatcacccactcctccgtgttcccccgttcaaccttctaaacagttggagtatctcgcacgaatccagggcttccaagccgctctcagcgccctgaaacagttctcagagcagggacttgaccctatagacggggcaatgaacattgagaagggaagccttgagaaacaggccaagcatctgcgcgaaaaagctgacaacaatcaggccccacctggctctatcgcccaggattgtaagaaaagtaattccgctgtgtag

SEQ ID NO: 62787 - DNA, 1603 bp, Artificial Sequence
  derived and/or modified sequence
agttctctgtagtgtttgccaatgttggagccgtctgcaaagtgtccccggcaagaaggtatcattgcccagtgcctaagatcttttatgttcagctcactgtaggaaataatgaattttttggggaaggaaagactcgacaagctgctagacacaatgctgcaatgaaagccctccaagcactgcagaatgaacctattccagaaagatctcctcagaatggtgaatcaggaaaggatgtggatgatgacaaagatgcaaataagtctgagatcagcttagtgtttgaaattgctctgaagcgaaatatgcctgtcagttttgaggttattaaagaaagtggaccaccacatatgaaaagctttgttactcgagtgtcagtaggagagttctctgcagaaggagaaggaaatagcaaaaaactctccaagaagcgcgctgcgaccaccgtcttacaggagcttaaaaaacttccacctcttcctgtggtggaaaagccaaaactattttttaaaaaacgccctaaaacaatagtaaaggccggaccagaatatggccaagggatgaaccctattagccgcctggcgcaaattcaacaggccaaaaaggaaaaggagccggattatgttttgctttcagaaagaggaatgcctcgacgtcgagaatttgtgatgcaggtgaaggtaggcaatgaagttgctacaggaacaggacctaataaaaagatagccaaaaaaaatgctgcagaagcaatgctgttacaacttggttataaagcatccactaatcttcaggatcaacttgagaagacaggggaaaacaaaggatggagtggtccaaagcctgggtttcctgaaccaacaaataatactccaaaaggaattcttcatttgtctcctgatgtttatcaagagatggaagccagccgccacaaagtaatctctggcactactctaggctatttgtcacccaaagatatgaaccaaccttcaagctctttcttcagtatatctcccacatcgaatagttcagctacaattgccagggaactccttatgaatggaacatcttctacagctgaagccataggtttaaaaggaagttctcctactcccccttgttctccagtacaaccttcaaaacaactggaatatttagcaaggattcaaggctttcaggcagccttaagtgccttgaaacaattttctgaacaaggactggatccaatcgatggagcaatgaatatcgaaaaaggttctcttgaaaaacaagccaagcatctgagagagaaagcggacaataaccaggcacccccgggctccatcgctcaggactgcaagaaatcaaactcggccgtctagcagctcccagaacccgcggctgccaccgcatccttataaacctgtcagcacgcatgagggtgtctgtgttcagggaaatgaatgactaataccattatttgagtcttatgtgaagacaacactattctaacacgagagataatatacatggtactgtttattcaactggggaaaaataaaactttgagcatttcccttggaactcgagatcagatcataactcatttgcctagaggcagcag

SEQ ID NO: 62788 - protein, 504 aa, Artificial Sequence
  derived and/or modified sequence
MKRGEPAIYRPLDPKPFPNYRANYNFRGMYNQRYHCPVPKIFYVQLTVGNNEFFGEGKTRQAARHNAAMKALQALQNEPIPERSPQNGESGKDVDDDKDANKSEISLVFEIALKRNMPVSFEVIKESGPPHMKSFVTRVSVGEFSAEGEGNSKKLSKKRAATTVLQELKKLPPLPVVEKPKLFFKKRPKTIVKAGPEYGQGMNPISRLAQIQQAKKEKEPDYVLLSERGMPRRREFVMQVKVGNEVATGTGPNKKIAKKNAAEAMLLQLGYKASTNLQDQLEKTGENKGWSGPKPGFPEPTNNTPKGILHLSPDVYQEMEASRHKVISGTTLGYLSPKDMNQPSSSFFSISPTSNSSATIARELLMNGTSSTAEAIGLKGSSPTPPCSPVQPSKQLEYLARIQGFQVHYCDRQSGKECVTCLTLAPVQMTFHAIGSSIEASHDQAALSALKQFSEQGLDPIDGAMNIEKGSLEKQAKHLREKADNNQAPPGSIAQDCKKSNSAV

SEQ ID NO: 62789 - DNA, 1515 bp, Artificial Sequence
  derived and/or modified sequence
atgaagagaggcgagcccgccatctacagacccctggaccccaagcccttccccaactacagagccaactacaacttcagaggcatgtacaaccagagataccactgccccgtgcccaagatcttctacgtgcagctgaccgtgggcaacaacgagttcttcggcgagggcaagaccagacaggccgccagacacaacgccgccatgaaggccctgcaggccctgcagaacgagcccatccccgagagaagcccccagaacggcgagagcggcaaggacgtggacgacgacaaggacgccaacaagagcgagatcagcctggtgttcgagatcgccctgaagagaaacatgcccgtgagcttcgaggtgatcaaggagagcggccccccccacatgaagagcttcgtgaccagagtgagcgtgggcgagttcagcgccgagggcgagggcaacagcaagaagctgagcaagaagagagccgccaccaccgtgctgcaggagctgaagaagctgccccccctgcccgtggtggagaagcccaagctgttcttcaagaagagacccaagaccatcgtgaaggccggccccgagtacggccagggcatgaaccccatcagcagactggcccagatccagcaggccaagaaggagaaggagcccgactacgtgctgctgagcgagagaggcatgcccagaagaagagagttcgtgatgcaggtgaaggtgggcaacgaggtggccaccggcaccggccccaacaagaagatcgccaagaagaacgccgccgaggccatgctgctgcagctgggctacaaggccagcaccaacctgcaggaccagctggagaagaccggcgagaacaagggctggagcggccccaagcccggcttccccgagcccaccaacaacacccccaagggcatcctgcacctgagccccgacgtgtaccaggagatggaggccagcagacacaaggtgatcagcggcaccaccctgggctacctgagccccaaggacatgaaccagcccagcagcagcttcttcagcatcagccccaccagcaacagcagcgccaccatcgccagagagctgctgatgaacggcaccagcagcaccgccgaggccatcggcctgaagggcagcagccccacccccccctgcagccccgtgcagcccagcaagcagctggagtacctggccagaatccagggcttccaggtgcactactgcgacagacagagcggcaaggagtgcgtgacctgcctgaccctggcccccgtgcagatgaccttccacgccatcggcagcagcatcgaggccagccacgaccaggccgccctgagcgccctgaagcagttcagcgagcagggcctggaccccatcgacggcgccatgaacatcgagaagggcagcctggagaagcaggccaagcacctgagagagaaggccgacaacaaccaggccccccccggcagcatcgcccaggactgcaagaagagcaacagcgccgtgtag

SEQ ID NO: 62790 - DNA, 1515 bp, Artificial Sequence
  derived and/or modified sequence
atgaaacggggtgagcctgccatttaccgccctctggacccaaagccattcccaaactatagagcaaactacaacttccgcggaatgtataaccaaaggtatcactgccccgtacccaaaatattctacgtgcagctgacagtgggaaacaacgaattcttcggggagggcaagaccaggcaggcggcgagacataacgctgccatgaaggctcttcaagcgctgcagaatgagccaatccctgagcgaagcccacagaacggcgaatccggtaaggatgtcgatgatgataaagatgctaataagagcgagatctcactcgtattcgaaattgctctcaagagaaatatgcctgtgtcctttgaggtgataaaggaatccggccccccccacatgaagtccttcgtgaccagagtctcagtcggggaattctctgccgagggagaaggcaactctaaaaagctctccaagaagagggctgccaccactgtgctgcaggagctcaagaaactgccccccctcccggtggtagaaaaacccaagctatttttcaagaaacggcctaagactatagtgaaagccggcccggaatacggccaagggatgaatcctatttcaagactggcgcaaattcagcaggccaagaaagagaaggaaccagactatgtcctcctctctgagcgtggcatgcctcgccgcagagaattcgtcatgcaagtcaaggttggtaacgaggtcgcaacagggacaggtcctaataaaaagattgcaaaaaagaatgccgctgaggcaatgctactgcagctcggatataaggcctccacaaaccttcaggaccaattggaaaaaacaggggaaaataagggttggtctggtccaaaacctgggtttcctgaaccgaccaacaatacaccaaaaggcatattgcaccttagtccagatgtgtaccaggagatggaagcaagccgccacaaggtgatttctgggactaccctggggtatttgtctccgaaggacatgaaccagccctcgtcatcatttttctccatcagcccaacatccaactcttcagctactattgcccgggagttactgatgaatgggacatcttcaacggccgaggccattggccttaagggctctagccctactccaccatgctcccctgtgcagccatcaaagcagctcgagtacctcgccagaattcaggggttccaggttcattattgtgatagacagtccggcaaggagtgcgtcacttgtctaacgttggcccccgtgcagatgacattccacgccattggctccagcatcgaggctagccatgaccaggcagcactgtcagcccttaaacagttcagcgaacaggggctggaccccatcgatggcgccatgaatatcgagaagggtagccttgaaaagcaggcgaagcacttgcgggagaaggctgacaataaccaggccccacctggcagtatagctcaagattgcaaaaaaagtaactctgccgtctag

SEQ ID NO: 62791 - DNA, 1515 bp, Artificial Sequence
  derived and/or modified sequence
atgaagagaggagagcccgccatctaccggcccctggaccccaagcccttccccaactaccgggccaactacaacttccggggcatgtacaaccagcgctaccactgccctgtgcccaagatcttctacgtgcagctgactgtgggcaacaatgagttcttcggggagggcaagacccggcaggccgcccggcacaatgctgccatgaaggccctgcaggccctgcagaatgagcccatccctgagaggagcccccagaatggagagagcggcaaggatgtggatgatgacaaggatgccaacaagtctgagatcagcctggtgtttgaaattgccctgaagaggaacatgcctgtgtcctttgaagtcatcaaggagagcggccccccccacatgaagagctttgtgaccagggtgtctgtgggggagttctctgctgagggggagggcaacagcaagaagctgagcaagaagagagctgccaccaccgtgctgcaggagctgaagaagctgccccccctgcctgtggtggagaagcccaagctgttcttcaagaagaggcccaagaccatcgtgaaggccggcccagaatatggccagggcatgaaccccatcagccggctggcccagatccagcaggccaagaaggagaaggagccagactatgtgctgctgtctgagcggggcatgcccaggagaagagaatttgtgatgcaggtgaaggtgggcaatgaggtggccaccggcaccggccccaacaagaagatcgccaagaagaatgctgctgaggccatgctgctgcagctgggctacaaggccagcaccaacctgcaggaccagctggagaagacaggagagaacaagggctggagcggccccaagccaggcttccctgagcccaccaacaacacccccaagggcatcctgcacctgagcccagatgtgtaccaggagatggaggccagccgccacaaggtgatcagcggcaccaccctgggctacctgagccccaaggacatgaaccagcccagcagcagcttcttcagcatcagccccaccagcaacagcagcgccaccatcgcccgggagctgctgatgaatggcaccagcagcacagctgaggccatcggcctgaagggcagcagccccaccccaccctgcagccctgtgcagcccagcaagcagctggagtacctggcccgcatccagggcttccaggtgcactactgtgaccggcagagcggcaaggaatgtgtgacctgcctgaccctggcccctgtgcagatgaccttccacgccatcggcagcagcattgaggccagccatgaccaggccgccctgagcgccctgaagcagttcagcgagcagggcctggaccccattgatggagccatgaacatcgagaagggcagcctggagaagcaggccaagcacctgcgggagaaggctgacaacaaccaggcccctcctggcagcatcgcccaggactgcaagaagagcaacagcgctgtgtag

SEQ ID NO: 62792 - DNA, 1515 bp, Artificial Sequence
  derived and/or modified sequence
atgaagcggggcgagcccgccatctaccggcccctggaccccaagcccttcccaaactatcgcgctaattataattttcgaggaatgtacaaccagaggtaccactgtcccgtgcctaaaattttttacgttcaacttactgtggggaacaatgagttcttcggcgagggcaaaacccgccaagctgctcggcataatgccgccatgaaagcattacaagccctacaaaacgaacctatccctgagcgctccccacagaacggcgagtccggcaaggatgtcgacgatgataaagacgcaaacaagtccgaaataagtcttgtgttcgagatcgccctgaagcgaaatatgccagtcagttttgaggtgataaaagaatccggtccccctcacatgaaatcattcgtgaccagagtctctgtgggagagtttagcgcagaaggtgaaggcaacagcaagaaactgtccaagaagagggctgccacaacggtgctccaggagctgaaaaagctcccccccctgccagtagtagagaagcccaagctgtttttcaagaaaagaccaaaaaccatcgttaaagccggtccagagtatgggcagggtatgaaccctataagtcgcctagcccagattcagcaggctaaaaaggaaaaggagccagattacgtgttgctgagcgagagaggtatgcctcgccggcgcgaatttgtgatgcaagttaaggtaggtaacgaggtggcaaccggcacaggccctaataaaaagattgcaaagaaaaatgccgcggaagcaatgctgctgcaactcggatataaggcatcaacaaaccttcaggatcaattagagaaaacaggggaaaataaaggctggagcggccccaaacccggattccccgagcctactaacaacaccccgaaaggaatcctgcatctcagtcccgatgtttatcaagagatggaggctagccgccacaaggttatctccggcaccacactgggatacttgtctccaaaagatatgaaccaaccttctagtagtttcttttccattagccccacgagcaacagcagcgcaacaattgctagagagctgctgatgaatgggacatcgtccaccgccgaagcgatcggtctgaaagggtccagccctacaccaccctgctcgcctgtccaacctagcaaacagttggagtacctcgcccggatccaaggatttcaggtccattattgcgatcgccagtccggtaaggaatgtgtgacctgcctgactctcgctccagttcagatgaccttccacgctataggcagctccattgaggccagccatgaccaggcggctttgtcggcgctcaagcagttctctgagcaggggctggaccccattgacggggccatgaatatcgagaagggatccctggagaaacaggccaagcacctacgcgaaaaagccgataacaatcaggcccctcctggctctatcgctcaggattgcaagaaaagcaactctgctgtgtag

SEQ ID NO: 62793 - DNA, 1515 bp, Artificial Sequence
  derived and/or modified sequence
atgaaaagaggagagccagctatttatcggccactggaccccaagccatttccaaattatagagccaattataacttcaggggtatgtacaatcagagataccattgccctgtaccgaaaattttttacgtccagttaacggtgggtaacaatgagttttttggtgaaggtaaaacacggcaggcggcaagacataatgccgctatgaaagcgctccaggcgttgcaaaatgagccaatccctgagcggtctccccaaaatggggagagtggaaaggacgtagacgacgataaagatgccaataagtccgaaatcagcctagtatttgagatcgccctgaagaggaatatgcctgtctcctttgaagtgatcaaagagagcggaccaccacatatgaaaagctttgtgacaagggtctccgtaggggaattcagcgccgaaggggagggcaacagcaagaaactcagcaagaagcgcgctgctactaccgtgttacaggagctcaaaaagctgccgcctttacccgtagtcgaaaagccgaaactttttttcaaaaagagacctaaaacaatcgtgaaggcaggccctgaatacggacaagggatgaatcccatcagccgattggcccagatccagcaggccaagaaggaaaaggaaccggactacgtgctgctctccgagcgcggtatgcctcggaggagggagtttgtgatgcaggtcaaggttgggaatgaagtggccaccggcaccggacccaataagaagatagcaaaaaagaacgcagctgaggcaatgctcctgcagttgggatacaaagcaagcaccaatcttcaggaccagctggaaaagactggtgaaaacaaaggctggagcgggccaaagcctggatttccagagccgacaaacaacactcccaaagggattcttcatcttagccctgacgtttatcaggagatggaagccagtagacacaaggtcatctccggtactactctgggttacctctctccgaaggatatgaaccaaccatcatcaagcttttttagtatctcgccaacttctaactccagcgccacaattgcacgggagctcttgatgaacgggacatcctccacggcggaggctattggtctgaaagggtccagtccgaccccaccttgttctcccgtgcagccttcaaagcagttggagtatctggcccgtatccaggggttccaggtgcactattgcgacaggcaaagtggtaaagagtgcgtgacctgcctgacattggctccagtccaaatgacattccatgctatcgggtcaagtatcgaagcttcccacgaccaagccgcactatcagcactgaagcagttcagcgagcagggactggatccgatagatggagcgatgaacatcgaaaaaggctcactggagaaacaggcgaaacacctgcgcgagaaggctgataataaccaagcccctccaggaagcattgcacaggactgcaagaagagcaactccgccgtatag

SEQ ID NO: 62794 - DNA, 1950 bp, Artificial Sequence
  derived and/or modified sequence
agttctctgtagtgtttgccaatgttggagccgtctgcaaagtgtccccggcaagaagaggctgcctaccacaaggactttagcttactttttaaagattgaagaaaaaaaagaagacagaaaaagaagaactcaaagatacacaaagtaatttgaaccaaggctcagaagtttttggagccgtgagggatacagcagtttggtcaatattgtcttaacatgcttcaaataaatcaggcagtataactccaactgtggaactgaatgggcttgctatgaaaaggggagagcctgccatctacaggccattagatccaaagccattcccaaattatagagctaattacaactttcggggcatgtacaatcagaggtatcattgcccagtgcctaagatcttttatgttcagctcactgtaggaaataatgaattttttggggaaggaaagactcgacaagctgctagacacaatgctgcaatgaaagccctccaagcactgcagaatgaacctattccagaaagatctcctcagaatggtgaatcaggaaaggatgtggatgatgacaaagatgcaaataagtctgagatcagcttagtgtttgaaattgctctgaagcgaaatatgcctgtcagttttgaggttattaaagaaagtggaccaccacatatgaaaagctttgttactcgagtgtcagtaggagagttctctgcagaaggagaaggaaatagcaaaaaactctccaagaagcgcgctgcgaccaccgtcttacaggagcttaaaaaacttccacctcttcctgtggtggaaaagccaaaactattttttaaaaaacgccctaaaacaatagtaaaggccggaccagaatatggccaagggatgaaccctattagccgcctggcgcaaattcaacaggccaaaaaggaaaaggagccggattatgttttgctttcagaaagaggaatgcctcgacgtcgagaatttgtgatgcaggtgaaggtaggcaatgaagttgctacaggaacaggacctaataaaaagatagccaaaaaaaatgctgcagaagcaatgctgttacaacttggttataaagcatccactaatcttcaggatcaacttgagaagacaggggaaaacaaaggatggagtggtccaaagcctgggtttcctgaaccaacaaataatactccaaaaggaattcttcatttgtctcctgatgtttatcaagagatggaagccagccgccacaaagtaatctctggcactactctaggctatttgtcacccaaagatatgaaccaaccttcaagctctttcttcagtatatctcccacatcgaatagttcagctacaattgccagggaactccttatgaatggaacatcttctacagctgaagccataggtttaaaaggaagttctcctactcccccttgttctccagtacaaccttcaaaacaactggaatatttagcaaggattcaaggctttcaggttcactactgtgatagacaaagtggcaaagagtgtgtgacctgtctgacattagcccctgtgcagatgactttccatgctattggaagctccattgaagccagccatgatcaggcagccttaagtgccttgaaacaattttctgaacaaggactggatccaatcgatggagcaatgaatatcgaaaaaggttctcttgaaaaacaagccaagcatctgagagagaaagcggacaataaccaggcacccccgggctccatcgctcaggactgcaagaaatcaaactcggccgtctagcagctcccagaacccgcggctgccaccgcatccttataaacctgtcagcacgcatgagggtgtctgtgttcagggaaatgaatgactaataccattatttgagtcttatgtgaagacaacactattctaacacgagagataatatacatggtactgttta

SEQ ID NO: 62795 - protein, 398 aa, Artificial Sequence
  derived and/or modified sequence
MKALQALQNEPIPERSPQNGESGKDVDDDKDANKSEISLVFEIALKRNMPVSFEVIKESGPPHMKSFVTRVSVGEFSAEGEGNSKKLSKKRAATTVLQELKKLPPLPVVEKPKLFFKKRPKTIVKAGPEYGQGMNPISRLAQIQQAKKEKEPDYVLLSERGMPRRREFVMQVKVGNEVATGTGPNKKIAKKNAAEAMLLQLGYKASTNLQDQLEKTGENKGWSGPKPGFPEPTNNTPKGILHLSPDVYQEMEASRHKVISGTTLGYLSPKDMNQPSSSFFSISPTSNSSATIARELLMNGTSSTAEAIGLKGSSPTPPCSPVQPSKQLEYLARIQGFQAALSALKQFSEQGLDPIDGAMNIEKGSLEKQAKHLREKADNNQAPPGSIAQDCKKSNSAV

SEQ ID NO: 62796 - DNA, 1197 bp, Artificial Sequence
  derived and/or modified sequence
atgaaggccctgcaggccctgcagaacgagcccatccccgagagaagcccccagaacggcgagagcggcaaggacgtggacgacgacaaggacgccaacaagagcgagatcagcctggtgttcgagatcgccctgaagagaaacatgcccgtgagcttcgaggtgatcaaggagagcggccccccccacatgaagagcttcgtgaccagagtgagcgtgggcgagttcagcgccgagggcgagggcaacagcaagaagctgagcaagaagagagccgccaccaccgtgctgcaggagctgaagaagctgccccccctgcccgtggtggagaagcccaagctgttcttcaagaagagacccaagaccatcgtgaaggccggccccgagtacggccagggcatgaaccccatcagcagactggcccagatccagcaggccaagaaggagaaggagcccgactacgtgctgctgagcgagagaggcatgcccagaagaagagagttcgtgatgcaggtgaaggtgggcaacgaggtggccaccggcaccggccccaacaagaagatcgccaagaagaacgccgccgaggccatgctgctgcagctgggctacaaggccagcaccaacctgcaggaccagctggagaagaccggcgagaacaagggctggagcggccccaagcccggcttccccgagcccaccaacaacacccccaagggcatcctgcacctgagccccgacgtgtaccaggagatggaggccagcagacacaaggtgatcagcggcaccaccctgggctacctgagccccaaggacatgaaccagcccagcagcagcttcttcagcatcagccccaccagcaacagcagcgccaccatcgccagagagctgctgatgaacggcaccagcagcaccgccgaggccatcggcctgaagggcagcagccccacccccccctgcagccccgtgcagcccagcaagcagctggagtacctggccagaatccagggcttccaggccgccctgagcgccctgaagcagttcagcgagcagggcctggaccccatcgacggcgccatgaacatcgagaagggcagcctggagaagcaggccaagcacctgagagagaaggccgacaacaaccaggccccccccggcagcatcgcccaggactgcaagaagagcaacagcgccgtgtag

SEQ ID NO: 62797 - DNA, 1197 bp, Artificial Sequence
  derived and/or modified sequence
atgaaggccctgcaggctctgcagaacgaacctattcccgaaaggtcaccccagaatggcgaaagtggaaaggatgtggatgacgataaggatgcaaacaaatcagagatatcgctggtgttcgaaattgccttgaaacggaacatgcctgtgagcttcgaggtcatcaaagagtctggacctccacatatgaagagctttgttacacgggtaagcgttggggaattcagtgccgagggagaagggaacagcaagaaattaagcaaaaagcgcgcggcaaccactgttctccaggagctgaagaagcttcccccattgcctgtggttgagaagcccaaactctttttcaagaaaaggcccaagacaatagtaaaagccgggccagaatatgggcaagggatgaatcctatctctcggctggctcaaattcagcaagccaagaaggagaaggaacccgactacgtgctcctgtctgaaagagggatgcctcggagacgggaattcgtgatgcaggttaaggtgggcaacgaggttgctactggcactggcccgaataagaagatcgcaaagaagaatgctgctgaggcaatgctgctccaactgggctacaaggccagcactaatctacaggaccagctggaaaagaccggagagaacaagggatggtccgggcccaagccaggcttccctgagccaaccaataacacgccaaaaggcatactgcacctgagtccggacgtctatcaggagatggaggcaagtcggcataaagtcattagtggcaccacactggggtacctgtcccccaaagacatgaatcagccctcatcttccttcttctcaattagcccaactagtaattcaagtgccaccatcgctagagaattgttaatgaatgggacaagttcaacagccgaggctatagggttgaagggaagcagcccaactcctccctgctccccagttcagccctcaaaacaattagaatacttggctaggattcagggctttcaggctgctctctccgctctgaaacaattctcggaacagggacttgatccgattgacggggcaatgaacatcgagaagggatcccttgagaaacaggccaagcatctgagggaaaaggccgacaacaaccaggccccccccgggtctatcgctcaggattgcaagaagtctaatagtgctgtatag

SEQ ID NO: 62798 - DNA, 1197 bp, Artificial Sequence
  derived and/or modified sequence
atgaaggccctgcaggccctgcagaatgagcccatccctgagaggagcccccagaatggagagagcggcaaggatgtggatgatgacaaggatgccaacaagtctgagatcagcctggtgtttgaaattgccctgaagaggaacatgcctgtgtcctttgaagtcatcaaggagagcggccccccccacatgaagagctttgtgaccagggtgtctgtgggggagttctctgctgagggggagggcaacagcaagaagctgagcaagaagagagctgccaccaccgtgctgcaggagctgaagaagctgccccccctgcctgtggtggagaagcccaagctgttcttcaagaagaggcccaagaccatcgtgaaggccggcccagaatatggccagggcatgaaccccatcagccggctggcccagatccagcaggccaagaaggagaaggagccagactatgtgctgctgtctgagcggggcatgcccaggagaagagaatttgtgatgcaggtgaaggtgggcaatgaggtggccaccggcaccggccccaacaagaagatcgccaagaagaatgctgctgaggccatgctgctgcagctgggctacaaggccagcaccaacctgcaggaccagctggagaagacaggagagaacaagggctggagcggccccaagccaggcttccctgagcccaccaacaacacccccaagggcatcctgcacctgagcccagatgtgtaccaggagatggaggccagccgccacaaggtgatcagcggcaccaccctgggctacctgagccccaaggacatgaaccagcccagcagcagcttcttcagcatcagccccaccagcaacagcagcgccaccatcgcccgggagctgctgatgaatggcaccagcagcacagctgaggccatcggcctgaagggcagcagccccaccccaccctgcagccctgtgcagcccagcaagcagctggagtacctggcccgcatccagggcttccaggccgccctgagcgccctgaagcagttcagcgagcagggcctggaccccattgatggagccatgaacatcgagaagggcagcctggagaagcaggccaagcacctgcgggagaaggctgacaacaaccaggcccctcctggcagcatcgcccaggactgcaagaagagcaacagcgctgtgtag

SEQ ID NO: 62799 - DNA, 1197 bp, Artificial Sequence
  derived and/or modified sequence
atgaaggccctgcaggccctgcagaacgagcccatccccgagcggtctcctcagaatggggaatcaggaaaggatgtcgacgacgataaagacgcgaacaaatcggaaatatctttagtgttcgaaatcgccttgaagcgcaacatgccggtatcctttgaggtgatcaaggagtctggcccaccccacatgaagagttttgtcaccagagtgtcagtgggggaatttagtgccgagggggagggtaattcaaagaaactgagtaagaaacgtgctgctaccacggtgcttcaggagctgaaaaagctcccaccgttgccagtcgtggagaaaccaaagctattcttcaaaaaacggccgaagacgattgtaaaggcaggtcctgaatacggccagggtatgaatccgattagtcgattggctcaaatccagcaggctaagaaggaaaaagagccagattacgtgctgttatcagaaaggggtatgcctcgccgccgcgaattcgtgatgcaggtgaaggtgggaaatgaagtggccacaggcacagggcccaataaaaagatcgctaagaaaaacgccgccgaagctatgctgcttcagttgggttataaagcatctaccaatctgcaggatcaactggaaaaaacaggagaaaacaaaggttggtccggtccgaagcccggctttcccgagccaacaaataacaccccaaaaggaatcctgcacctgtcccccgacgtataccaagaaatggaagcctctcggcataaggtcatttctggaactacattgggttatctaagtccgaaagacatgaaccagccaagttcgtctttcttcagtatctcacccacttcgaattcaagtgccaccatcgccagagaacttctgatgaatggaacaagtagcactgccgaggcaatcggactcaagggctcaagcccaacacccccctgcagcccggtgcaaccctccaagcaacttgaatatcttgcacgaattcagggattccaggcggctttgagcgcacttaagcagttctctgaacaggggctggaccctatagatggtgccatgaacatagagaaaggttccctggagaaacaggccaagcacctgagggaaaaagcggataacaatcaggccccccctggcagcattgcacaagattgtaagaaaagcaattcggccgtttag

SEQ ID NO: 62800 - DNA, 1197 bp, Artificial Sequence
  derived and/or modified sequence
atgaaggctcttcaagctctccagaacgaacccatcccggagaggagcccacaaaacggagagtcaggaaaggatgtcgacgatgataaagacgctaataaaagcgagatctccctagtgttcgaaatcgccctgaagagaaacatgcctgtgtcctttgaggttatcaaagagagtggtccccctcacatgaagagtttcgtgacacgcgttagcgtgggcgaattttccgccgagggggaaggtaactccaaaaaactgtctaagaaacgcgctgctacaaccgtgctccaggaactgaaaaaactgccgccattgcccgttgtggagaaacctaagctgtttttcaagaaaaggccaaaaacgatcgtgaaagccggacctgaatacggtcagggcatgaatcctatcagcagactcgctcagattcagcaggcaaaaaaagagaaagaacctgactatgtgctgctctctgaaaggggaatgccacggagacgcgagttcgtgatgcaagtgaaagttggcaacgaggtagccaccggcaccgggcctaataagaaaattgccaaaaagaacgcagccgaggctatgctccttcagctgggatataaagcatctactaacctccaagatcagctggaaaagactggcgagaataaggggtggtctgggcctaagcccggatttccagagccaaccaataacacgccaaaggggattctccacctatccccagatgtatatcaggagatggaggcttccaggcacaaggtgatatctggaactacactcggatacctgtctcctaaagacatgaaccagcctagtagctctttcttctcaatctcacccacgagcaactccagcgcaaccattgcgcgagagcttctcatgaacggtacatcttccacagccgaggccattggcctgaaagggagtagccctaccccaccctgctctcccgttcagccttcaaagcaattggagtacctggctcggatccagggttttcaggccgctcttagcgccctgaagcagttctcagagcaaggcttagacccaatcgatggcgctatgaacatagaaaagggtagtctggagaagcaagccaaacatctgcgggagaaggccgacaacaatcaggcccctccgggaagtatagcgcaggattgtaagaagagtaactctgcagtttag

SEQ ID NO: 62801 - DNA, 4061 bp, Artificial Sequence
  derived and/or modified sequence
agttctctgtagtgtttgccaatgttggagccgtctgcaaagtgtccccggcaagaagaggctgcctaccacaaggactttagcttactttttaaagattgaagaaaaaaaagaagacagaaaaagaagaactcaaagatacacaaagtaatttgaaccaaggctcagaagtttttggagccgtgagggatacagcagtttggtcaatattgtcttaacatgcttcaaataaatcagatgttctcagtgcagctgagtcttggtgagcagacatgggaatccgaaggcagcagtataaagaaggctcagcaggctgttgccaataaagctttgactgaatctacgcttcccaaaccagttcagaagccacccaaaagtaatgttaacaataacccaggcagtataactccaactgtggaactgaatgggcttgctatgaaaaggggagagcctgccatctacaggccattagatccaaagccattcccaaattatagagctaattacaactttcggggcatgtacaatcagaggtatcattgcccagtgcctaagatcttttatgttcagctcactgtaggaaataatgaattttttggggaaggaaagactcgacaagctgctagacacaatgctgcaatgaaagccctccaagcactgcagaatgaacctattccagaaagatctcctcagaatggtgaatcaggaaaggatgtggatgatgacaaagatgcaaataagtctgagatcagcttagtgtttgaaattgctctgaagcgaaatatgcctgtcagttttgaggttattaaagaaagtggaccaccacatatgaaaagctttgttactcgagtgtcagtaggagagttctctgcagaaggagaaggaaatagcaaaaaactctccaagaagcgcgctgcgaccaccgtcttacaggagcttaaaaaacttccacctcttcctgtggtggaaaagccaaaactattttttaaaaaacgccctaaaacaatagtaaaggccggaccagaatatggccaagggatgaaccctattagccgcctggcgcaaattcaacaggccaaaaaggaaaaggagccggattatgttttgctttcagaaagaggaatgcctcgacgtcgagaatttgtgatgcaggtgaaggtaggcaatgaagttgctacaggaacaggacctaataaaaagatagccaaaaaaaatgctgcagaagcaatgctgttacaacttggttataaagcatccactaatcttcaggatcaacttgagaagacaggggaaaacaaaggatggagtggtccaaagcctgggtttcctgaaccaacaaataatactccaaaaggaattcttcatttgtctcctgatgtttatcaagagatggaagccagccgccacaaagtaatctctggcactactctaggctatttgtcacccaaagatatgaaccaaccttcaagctctttcttcagtatatctcccacatcgaatagttcagctacaattgccagggaactccttatgaatggaacatcttctacagctgaagccataggtttaaaaggaagttctcctactcccccttgttctccagtacaaccttcaaaacaactggaatatttagcaaggattcaaggctttcaggtatgaattaaaagcaaaaacaaaaaacaaaacaattcattagcctcagattcttcatctgtatacatcacaaggctcattcttgcctgctagtatggcctacatgccacttacgttttaagttatttaggaacacaaaggacagacaaaaaagccatatgcacatgcctcattttctcttatttttgatctatctagtaattcttttgctgcctgtctcttctccattttccttcttcttttttaagcatttttcatattcttcactgtcttctatttggtcttgattaggtgcatctatctcttcgctctgtcttccacaaacaaaaattctgccttcagacatttggtgttagtatttcacactcagttctccctttttttacataaggattgagtttctttttatgatgattttacctttatagcaattttgaattttgcattctattgctagtattgattcaggtacaccattaagatacaacattctagaagtctattaccttaggagttaattaaacatgatatttgaagaataatgaaatgctttatagttgtttgaggcataacaatgtgtatttgttttactggatcatgttttgaactgactagggagggtagcacctgcctcagatagtaccaacaattctgtttcactgggtagtctaaaactagcttatagtttaacttaacttgttgtgtatgtgaatttagggatggaaactttttttcccctatttattctttgtttccttctgggaaaaaaccccacaaaaatcagcactcctttatggatacattggagcttttgaaagaattgtaaactctaggaaggggaaatatctgtgtcttgatttcttagttgccttgaaaatcatgtactgaactgtaaccgctaacttgactggatgaactagtttgcttgtgtgtagagagtgtattgcttcctcagatttcactgttttcatctccttttccatcttagtctttattccttaagaccaaaaactgtaatatcctttagaaatgctctagaagatctgtattgtgtagaatgatcatgtatttataaatattttacaagtttagattataaaatgaaaaagaaggtcatgtgttttggggggtattttgcatgttcggatttttttttcacttcaccgaacccttctgattctttcaaactattgccaggtagttgttagtgtttctaattggactcttaatatgaacttcaagaagctgttaccagttatcggctctgtcatctgaaattttaaccacttaatttaaagttacaattttagaatttgtttttgttgttttaccttaagaaacacaataaatcactgtttaaaaaagatctcaatttatataaagtactggaaaaaagctaagtaatttttagttctatctataatctccgtaggatgaattagaaataaattgtgatgaaaagaaattaactgcttatttatgaatctaatcatttagaaatgtctgagagtaacactgcattcttatagaaacaaagcacaaattgcattcaagctctgaattgattttttgcttggagctgttgttacagtagctgtaattttgctaccagaatgtcttaattttttaaatttgtttttatttctaagctcttggcaatgacaataattataattttaacatatcttcactgtagtcaacatgtagagtctgcttccctcattattgcattgctaaggcctttttaaaaagcttatgcttacataatatactcttttttatggacacgttatatgtttccaaatctgtgtattgtgatttttacatactaatgaatataaacaggtgattttaaaatattactgtgcttctttggttgaatgagctggtattgatgtaaaatactctgtcattgatggaccactacctgcagctaagcagtgagcagaatctccgggaaatgacttagtctggccacatgcatagcccatcttcataatgtcgcagcagaaggttctttgtggttaaaagttttaaagcctatttctttataggtaaccctctcaggtatatttacctggtagaaaaacatgtagattgtttctattacttaaatgttttaattggactgtagtttagaaattacaggaccagcttgttacagattatacactattctgttacttttatttctgaaacttaaaaacaataaattctttttctgtgtttctaggttagaacttttttattttattgcacactgaacagatactgttgcttattgaatattgtgtaaacccttctttggctttccttgcccattgcaatttgatttaagcctactagagccattgtatgtgacagctatattgtattacaaagtaaaaatatatgagtgtattgaaaac

SEQ ID NO: 62802 - DNA, 2173 bp, Artificial Sequence
  derived and/or modified sequence
agttctctgtagtgtttgccaatgttggagccgtctgcaaagtgtccccggcaagaagaggctgcctaccacaaggactttagcttactttttaaagattgaagaaaaaaaagaagacagaaaaagaagaactcaaagatacacaaagtaatttgaaccaaggctcagaagtttttggagccgtgagggatacagcagtttggtcaatattgtcttaacatgcttcaaataaatcagatgttctcagtgcagctgagtcttggtgagcagacatgggaatccgaaggcagcagtataaagaaggctcagcaggctgttgccaataaagctttgactgaatctacgcttcccaaaccagttcagaagccacccaaaagtaatgttaacaataacccaggcagtataactccaactgtggaactgaatgggcttgctatgaaaaggggagagcctgccatctacaggccattagatccaaagccattcccaaattatagagctaattacaactttcggggcatgtacaatcagagatgaagagttacctaagtcagtgttataagatgttccatggtaaaagggatttgaagacaaattttggaaatgctgcatactgtatctctcttgaagactcctaaaggtgtcatgaagaaaactgtttacctaagtggttcctaacactgactgaacatcaggctttcctgggcagctttaaaaattctgatgcccagactttatgtggactaattaaatcagaatttctggttgcagagcttgaaccgcactgttttttaaaacttccccaagtaattctatgtccagtcatttaaatactggtccccacaacccaaaacacattaccctctattaacatcaaagattatgagatggtttgaatagtcatagaacttttgaaagaagtaaagaagaagggaagaattacagttaaccacactccttaaggataattgttctggacagctagcttccccacattgctgagggttcacttttttttggaacctaaaactttacttagttcagtaattttggatagaaatatttctaaaagttatggcatatattttttatatccttaaatagaaaatgccacaattcttagcatgaagaatccttgctgttgactcattatcaaccttataaacaataagtattacaagcctcatgagatatgtacatggtttgtccttataccagataatcctagacatctgtttctagagtacccaagtgtgcttttagttactttccaaatcattgttgtcagtcagattgtcatcttatttcttgtttttgtcagtgcacctttgcatattgcttgctcctttctttgatgcttttcaattgctattatcttgaaaaccgatattattgtttgaatttggggcaaagtaagagtagcagggctttaattacgccctaagatgtccccttaactgtggaaaacatcgagttttatctagttggtgaatttttttacttcagaatttatttttttctgtcataaattttgctaaggatctgcattttgagtagaatgaagtggccagatagttgaataatggtttggtgaatatctatatgtatatatgtatgtgtatgtgtgttacacatacatatttaatgacatgaagtactttggttgcttggaattggacagaaataacagtttttttttttttttgggacagagtcttgctctgtcacctaggctggagtgcaatggcgcgatctctgctcactgcaacttccacctcccaggttcaagtgattctcctgccgcagcctcccgagtagctgggattgcaggcgcctgccagcatgcccgccagcacgcctggctaatttttttttttgtatttttagtagagatggggtttcactatgttggccaggctggtcttggaactcctgatctcgtgatctgtgtgccttggcctcccaaagtgctgggattacaggcgtgagccaccgcgcctggccagaaataacagttttaataaatttcatgaaatcactttcttgtatgttaaaggaaacagaaagggttcatttgtgcatggtttagtctttcttttgaatgtggaagtttttcttcttatttgtgtgtctaaaaaaattaaaaagtgaaacattttccaaaatgagaaga

SEQ ID NO: 62803 - DNA, 2173 bp, Artificial Sequence
  derived and/or modified sequence
actcttgcctcataaatctaggattcagggcattgttttcaatggttctcatttttggctccaaggattctttttcatgtgactaatattttcggtagaagaggaggtctggccacgccgcgggtcttggcgagcaggtgatcacggatccctggtgtttgctgggcgagacggtgaagcaacctcctccccgccccctcccccgtctagaaaggtgcaagatccgctaaaccgtgcgttgcacagcggcggccggagcagacgcgggatggtcgcgcgtcccctgcacagcacagaggggcagccggagagcctgggaaagtttttggagccgtgagggatacagcagtttggtcaatattgtcttaacatgcttcaaataaatcagatgttctcagtgcagctgagtcttggtgagcagacatgggaatccgaaggcagcagtataaagaaggctcagcaggctgttgccaataaagctttgactgaatctacgcttcccaaaccagttcagaagccacccaaaagtaatgttaacaataacccaggcagtataactccaactgtggaactgaatgggcttgctatgaaaaggggagagcctgccatctacaggccattagatccaaagccattcccaaattatagagctaattacaactttcggggcatgtacaatcagaggtatcattgcccagtgcctaagatcttttatgttcagctcactgtaggaaataatgaattttttggggaaggaaagactcgacaagctgctagacacaatgctgcaatgaaagccctccaagcactgcagaatgaacctattccagaaagatctcctcagaatggtgaatcaggaaaggatgtggatgatgacaaagatgcaaataagtctgagatcagcttagtgtttgaaattgctctgaagcgaaatatgcctgtcagttttgaggttattaaagaaagtggaccaccacatatgaaaagctttgttactcgagtgtcagtaggagagttctctgcagaaggagaaggaaatagcaaaaaactctccaagaagcgcgctgcgaccaccgtcttacaggagcttaaaaaacttccacctcttcctgtggtggaaaagccaaaactattttttaaaaaacgccctaaaacaatagtaaaggccggaccagaatatggccaagggatgaaccctattagccgcctggcgcaaattcaacaggccaaaaaggaaaaggagccggattatgttttgctttcagaaagaggaatgcctcgacgtcgagaatttgtgatgcaggtgaaggtaggcaatgaagttgctacaggaacaggacctaataaaaagatagccaaaaaaaatgctgcagaagcaatgctgttacaacttggttataaagcatccactaatcttcaggatcaacttgagaagacaggggaaaacaaaggatggagtggtccaaagcctgggtttcctgaaccaacaaataatactccaaaaggaattcttcatttgtctcctgatgtttatcaagagatggaagccagccgccacaaagtaatctctggcactactctaggctatttgtcacccaaagatatgaaccaaccttcaagctctttcttcagtatatctcccacatcgaatagttcagctacaattgccagggaactccttatgaatggaacatcttctacagctgaagccataggtttaaaaggaagttctcctactcccccttgttctccagtacaaccttcaaaacaactggaatatttagcaaggattcaaggctttcaggtatgaattaaaagcaaaaacaaaaaacaaaacaattcattagcctcagattcttcatctgtatacatcacaaggctcattcttgcctgctagtatggcctacatgccacttacgttttaagttatttaggaacacaaaggacagacaaaaaagccatatgcacatgcctcattttctcttatttttgatctatctagtaattcttttgctgcctgtctcttctccattttccttcttcttttttaagcatttttcatattcttcactgtcttctatttggtcttgattaggtgcatctatctcttcgctctgtcttccacaaacaaaaattctgccttcagacatttggtgttagtatttcacactca

SEQ ID NO: 62804 - DNA, 550 bp, Artificial Sequence
  derived and/or modified sequence
agttctctgtagtgtttgccaatgttggagccgtctgcaaagtgtccccggcaagaagagacgattttgccgtgttcgccaggctagtctcgaactcctgacctcaggtgatccgtccgcctcagactccaaaagtgctgggattacaggcgtgagccaccacacccagctgaggaggtggattttatgaaaccaaagaggctgcctaccacaaggactttagcttactttttaaagattgaagaaaaaaaagaagacagaaaaagaagaactcaaagatacacaaagtaatttgaaccaaggctcagaagtttttggagccgtgagggatacagcagtttggtcaatattgtcttaacatgcttcaaataaatcagatgttctcagtgcagctgagtcttggtgagcagacatgggaatccgaaggcagcagtataaagaaggctcagcaggctgttgccaataaagctttgactgaatctacgcttcccaaaccagttcagaagccacccaaaagtaatgttaacaataacccaggcagtataactcc

SEQ ID NO: 62805 - DNA, 727 bp, Artificial Sequence
  derived and/or modified sequence
agcggggtcagttctctgtagtgtttgccaatgttggagccgtctgcaaagtgtccccggcaagaagtttttggagccgtgagggatacagcagtttggtcaatattgtcttaacatgcttcaaataaatcagatgttctcagtgcagctgagtcttggtgagcagacatgggaatccgaaggcagcagtataaagaaggctcagcaggctgttgccaataaagctttgactgaatctacgcttcccaaaccagttcagaagccacccaaaagtaatgttaacaataacccaggcagtataactccaactgtggaactgaatgggcttgctatgaaaaggggagagcctgccatctacaggccattagatccaaagccattcccaaattatagagctaattacaactttcggggcatgtacaatcagaggtatcattgcccagtgcctaagatcttttatgttcagctcactgtaggaaataatgaattttttggggaaggaaagactcgacaagctgctagacacaatgctgcaatgaaagccctccaagcactgcagaatgaacctattccagaaagatctcctcagaatggtgaatcaggaaaggatgtggatgatgacaaagatgcaaataagtctgagatcagcttagtgtttgaaattgctctgaagcgaaatatgcctgtcagttttgaggttattaaagaaagtggaccaccacatatg

SEQ ID NO: 62806 - DNA, 1440 bp, Artificial Sequence
  derived and/or modified sequence
atgctgcagatcaaccagatgttcagcgtgcagctgagcctgggcgagcagacctgggagagcgagggcagcagcatcaagaaggcccagcaggccgtggccaacaaggccctgaccgagagcaccctgcccaagcccgtgcagaagccccccaagagcaacgtgaacaacaaccccggcagcatcacccccaccgtggagctgaacggcctggccatgaagagaggcgagcccgccatctacagacccctggaccccaagcccttccccaactacagagccaactacaacttcagaggcatgtacaaccagagataccactgccccgtgcccaagatcttctacgtgcagctgaccgtgggcaacaacgagttcttcggcgagggcaagaccagacaggccgccagacacaacgccgccatgaaggccctgcaggccctgcagaacgagcccatccccgagagaagcccccagaacggcgagagcggcaaggacgtggacgacgacaaggacgccaacaagagcgagatcagcctggtgttcgagatcgccctgaagagaaacatgcccgtgagcttcgaggtgatcaaggagagcggccccccccacatgaagagcttcgtgaccagagtgagcgtgggcgagttcagcgccgagggcgagggcaacagcaagaagctgagcaagaagagagccgccaccaccgtgctgcaggagctgaagaagctgccccccctgcccgtggtggagaagcccaagctgttcttcaagaagagacccaagaccatcgtgaaggccggccccgagtacggccagggcatgaaccccatcagcagactggcccagatccagcaggccaagaaggagaaggagcccgactacgtgctgctgagcgagagaggcatgcccagaagaagagagttcgtgatgcaggtgaaggtgggcaacgaggtggccaccggcaccggccccaacaagaagatcgccaagaagaacgccgccgaggccatgctgctgcagctgggctacaaggccagcaccaacctgcaggaccagctggagaagaccggcgagaacaagggctggagcggccccaagcccggcttccccgagcccaccaacaacacccccaagggcatcctgcacctgagccccgacgtgtaccaggagatggaggccagcagacacaaggtgatcagcggcaccaccctgggctacctgagccccaaggacatgaaccagcccagcagcagcttcttcagcatcagccccaccagcaacagcagcgccaccatcgccagagagctgctgatgaacggcaccagcagcaccgccgaggccatcggcctgaagggcagcagccccacccccccctgcagccccgtgcagcccagcaagcagctggagtacctggccagaatccagggcttccaggtgtag

SEQ ID NO: 62807 - DNA, 615 bp, Artificial Sequence
  derived and/or modified sequence
atgctgcagatcaaccagatgttcagcgtgcagctgagcctgggcgagcagacctgggagagcgagggcagcagcatcaagaaggcccagcaggccgtggccaacaaggccctgaccgagagcaccctgcccaagcccgtgcagaagccccccaagagcaacgtgaacaacaaccccggcagcatcacccccaccgtggagctgaacggcctggccatgaagagaggcgagcccgccatctacagacccctggaccccaagcccttccccaactacagagccaactacaacttcagaggcatgtacaaccagagataccactgccccgtgcccaagatcttctacgtgcagctgaccgtgggcaacaacgagttcttcggcgagggcaagaccagacaggccgccagacacaacgccgccatgaaggccctgcaggccctgcagaacgagcccatccccgagagaagcccccagaacggcgagagcggcaaggacgtggacgacgacaaggacgccaacaagagcgagatcagcctggtgttcgagatcgccctgaagagaaacatgcccgtgagcttcgaggtgatcaaggagagcggccccccccacatgtag

SEQ ID NO: 62808 - DNA, 195 bp, Artificial Sequence
  derived and/or modified sequence
atgctgcagatcaaccagatgttcagcgtgcagctgagcctgggcgagcagacctgggagagcgagggcagcagcatcaagaaggcccagcaggccgtggccaacaaggccctgaccgagagcaccctgcccaagcccgtgcagaagccccccaagagcaacgtgaacaacaaccccggcagcatcaccccctag

SEQ ID NO: 62809 - DNA, 318 bp, Artificial Sequence
  derived and/or modified sequence
atgctgcagatcaaccagatgttcagcgtgcagctgagcctgggcgagcagacctgggagagcgagggcagcagcatcaagaaggcccagcaggccgtggccaacaaggccctgaccgagagcaccctgcccaagcccgtgcagaagccccccaagagcaacgtgaacaacaaccccggcagcatcacccccaccgtggagctgaacggcctggccatgaagagaggcgagcccgccatctacagacccctggaccccaagcccttccccaactacagagccaactacaacttcagaggcatgtacaaccagagatag

SEQ ID NO: 62810 - DNA, 1440 bp, Artificial Sequence
  derived and/or modified sequence
atgttacagataaaccagatgttctccgtccagttatcactcggagagcaaacttgggagtccgaggggtcatcaattaagaaggcccagcaagctgtcgcaaacaaggcgctgaccgagagcactctcccaaaacctgtgcagaagccacctaaatcaaacgtgaacaataatcccggcagcatcactcccacggtcgagcttaacgggctcgctatgaagagaggagagcctgctatctatcgccccctagacccaaaacctttccctaattatcgcgccaattacaactttcgaggcatgtataaccagaggtaccattgcccagtcccaaagatcttttatgttcaactgacagtcggtaataatgaattcttcggcgagggcaagacaaggcaggccgcgagacacaacgccgccatgaaagccctgcaagccctgcagaatgagcctatccccgaacggagccctcagaatggggagagtgggaaggatgtggatgatgacaaggacgccaataaatctgagatttcattagtcttcgagatcgccctgaaacggaatatgccagtgagcttcgaagttatcaaggagtccggccccccgcacatgaagtccttcgtcactagagttagtgtcggggaattctcagctgaaggcgagggtaacagtaagaagctttctaagaaaagagctgctaccacagttctacaggaactgaagaagttaccccctctccccgtggttgaaaagccaaagctgttttttaaaaaacgccccaaaactattgtgaaagccggccccgagtacgggcaaggcatgaaccctattagcagactcgcccagattcagcaggctaagaaggagaaggagccggactatgtcctactgtctgagagaggaatgcctcgacgaagggaattcgtgatgcaagtgaaagttgggaatgaggtagcaactggtacggggcccaacaaaaaaatagctaaaaagaacgctgctgaagcgatgctcttacagttagggtacaaggcatccaccaatctccaggatcagcttgagaagaccggtgagaataaaggatggtccgggcctaaacctggatttccggaacccactaataatactcccaagggtatccttcacctctcacccgatgtgtaccaggagatggaagccagtcgtcacaaggttatatccggcactacacttggctacctgagcccaaaagatatgaaccagccttcttcttcctttttttcaatatcgcctacatccaactccagcgcgacaatagctcgcgagctcttgatgaacggcactagctctacagctgaagcaataggactgaagggaagcagtccaactcccccttgcagtcccgtccagccatctaagcagttggagtacctggcccgtattcagggctttcaagtgtag

SEQ ID NO: 62811 - DNA, 615 bp, Artificial Sequence
  derived and/or modified sequence
atgctgcaaattaatcagatgttcagtgtccagcttagcttaggggagcagacctgggagtcggagggaagcagcattaaaaaggcacagcaggctgtggccaataaggctttaaccgagtctaccctacccaagcctgtgcagaaaccccctaagtcaaatgtaaacaataatccaggtagcatcactccaactgtagaactgaatggactagccatgaagaggggagagccggccatttataggcccttggaccctaagccattcccgaactatagagccaactataatttccgcgggatgtacaaccagcgataccactgccccgtgcccaagatattctacgtccagctgaccgtggggaacaacgaattttttggagaaggtaaaacccggcaagccgcacggcataatgcggccatgaaggccctccaagcacttcaaaatgagcctatccccgaaaggagtccccaaaatggcgaatccggtaaggatgtagatgacgacaaggatgcaaacaagtctgagatcagcttggtttttgagattgctttaaagaggaatatgccggtgtcctttgaagtcattaaagagtcaggtcctccacatatgtag

SEQ ID NO: 62812 - DNA, 195 bp, Artificial Sequence
  derived and/or modified sequence
atgttgcagataaaccaaatgttcagcgtgcagctaagccttggtgagcagacatgggaatccgaaggctcttctatcaaaaaggcgcaacaggcggtggctaataaggctcttacagagagtacgcttccaaagccagtgcagaagcctcctaaaagcaacgtgaacaataaccccggatcaattaccccctag

SEQ ID NO: 62813 - DNA, 1440 bp, Artificial Sequence
  derived and/or modified sequence
atgctacagatcaatcagatgttctctgtgcaactctccctgggtgagcagacctgggagtctgaggggtctagcatcaaaaaggcccaacaagcagttgccaataaggccctcaccgaaagcaccttgccaaagccagtccaaaagccacccaaaagtaatgtcaataataacccggggagtatcacacctaccgtcgagctcaatggcctagccatgaagcgaggtgagcccgccatctaccgaccattagaccccaagccattcccaaattacagagctaactacaatttcagaggcatgtacaatcagagataccattgtccagtccctaaaatcttctacgtccagctcaccgtcggcaataacgaattcttcggcgagggaaaaactcgccaagctgccagacataatgcggctatgaaggcgctacaggccctccaaaatgagcctattccagagcggagcccccaaaatggtgaatcaggtaaagatgtggatgatgacaaagacgctaacaaatccgagatcagtctggtattcgaaatcgctttgaagaggaatatgcctgtgagctttgaagtaatcaaggaatccgggcctcctcacatgaaaagtttcgtgactagagtgtccgtcggcgagtttagcgccgagggagaggggaattcgaaaaagttgtccaagaaaagagccgcgaccacagtcctgcaggaactcaaaaagctcccaccactacctgtcgtggagaagccgaagctatttttcaagaaacgaccaaaaactattgtcaaagcagggcctgagtatggccagggcatgaacccgatctcccgcctagcacagattcagcaagccaagaaggagaaggaaccagattatgtgctgctgagcgagcgggggatgccgagacgccgagagttcgttatgcaggttaaagtgggcaatgaagtggccactggcacggggccaaataaaaaaatcgcaaaaaaaaatgccgctgaggctatgttgctgcagctggggtataaagcatccaccaatctccaggaccagctggaaaagactggagagaataagggatggtctggtccgaaacctgggttcccggagcctacaaataatacacccaaagggattctgcacctttctcctgacgtttaccaagaaatggaggcctcacgccacaaagtaattagcggaacgactctgggatatcttagccctaaagacatgaaccaaccctcgagttctttctttagcataagccccacttctaattcttccgcaacaattgcccgggagctgctgatgaatggtacatcatccaccgccgaggcaattgggcttaagggctcctcccccaccccgccttgctcaccagtacagccatccaagcagctagaataccttgcccgcatccagggattccaggtgtag

SEQ ID NO: 62814 - DNA, 318 bp, Artificial Sequence
  derived and/or modified sequence
atgctccagattaaccagatgttctccgtccagctgagtcttggggaacagacttgggagtccgaggggagctcgattaaaaaagctcagcaggccgtggctaacaaagcgttaacagagtctactcttcccaaacccgtgcagaagccaccaaagtccaatgtgaataataaccccggtagcattacgccgactgttgaactgaatggactggccatgaaacgcggtgagcccgcaatatatagacctctggatcccaaaccttttcccaattatagggctaactacaacttcaggggcatgtataatcaaagatag

SEQ ID NO: 62815 - DNA, 1440 bp, Artificial Sequence
  derived and/or modified sequence
atgctgcagatcaaccagatgttttctgtgcagctgagcctgggggagcagacctgggagagcgagggcagcagcatcaagaaggcccagcaggccgtggccaacaaggccctgacagagagcaccctgcccaagcctgtgcagaagccacccaagagcaatgtgaacaacaaccctggcagcatcacccccaccgtggagctgaatggcctggccatgaagagaggagagcccgccatctaccggcccctggaccccaagcccttccccaactaccgggccaactacaacttccggggcatgtacaaccagcgctaccactgccctgtgcccaagatcttctacgtgcagctgactgtgggcaacaatgagttcttcggggagggcaagacccggcaggccgcccggcacaatgctgccatgaaggccctgcaggccctgcagaatgagcccatccctgagaggagcccccagaatggagagagcggcaaggatgtggatgatgacaaggatgccaacaagtctgagatcagcctggtgtttgaaattgccctgaagaggaacatgcctgtgtcctttgaagtcatcaaggagagcggccccccccacatgaagagctttgtgaccagggtgtctgtgggggagttctctgctgagggggagggcaacagcaagaagctgagcaagaagagagctgccaccaccgtgctgcaggagctgaagaagctgccccccctgcctgtggtggagaagcccaagctgttcttcaagaagaggcccaagaccatcgtgaaggccggcccagaatatggccagggcatgaaccccatcagccggctggcccagatccagcaggccaagaaggagaaggagccagactatgtgctgctgtctgagcggggcatgcccaggagaagagaatttgtgatgcaggtgaaggtgggcaatgaggtggccaccggcaccggccccaacaagaagatcgccaagaagaatgctgctgaggccatgctgctgcagctgggctacaaggccagcaccaacctgcaggaccagctggagaagacaggagagaacaagggctggagcggccccaagccaggcttccctgagcccaccaacaacacccccaagggcatcctgcacctgagcccagatgtgtaccaggagatggaggccagccgccacaaggtgatcagcggcaccaccctgggctacctgagccccaaggacatgaaccagcccagcagcagcttcttcagcatcagccccaccagcaacagcagcgccaccatcgcccgggagctgctgatgaatggcaccagcagcacagctgaggccatcggcctgaagggcagcagccccaccccaccctgcagccctgtgcagcccagcaagcagctggagtacctggcccgcatccagggcttccaggtgtag

SEQ ID NO: 62816 - DNA, 615 bp, Artificial Sequence
  derived and/or modified sequence
atgctgcagatcaaccagatgttttctgtgcagctgagcctgggggagcagacctgggagagcgagggcagcagcatcaagaaggcccagcaggccgtggccaacaaggccctgacagagagcaccctgcccaagcctgtgcagaagccacccaagagcaatgtgaacaacaaccctggcagcatcacccccaccgtggagctgaatggcctggccatgaagagaggagagcccgccatctaccggcccctggaccccaagcccttccccaactaccgggccaactacaacttccggggcatgtacaaccagcgctaccactgccctgtgcccaagatcttctacgtgcagctgactgtgggcaacaatgagttcttcggggagggcaagacccggcaggccgcccggcacaatgctgccatgaaggccctgcaggccctgcagaatgagcccatccctgagaggagcccccagaatggagagagcggcaaggatgtggatgatgacaaggatgccaacaagtctgagatcagcctggtgtttgaaattgccctgaagaggaacatgcctgtgtcctttgaagtcatcaaggagagcggccccccccacatgtag

SEQ ID NO: 62817 - DNA, 195 bp, Artificial Sequence
  derived and/or modified sequence
atgctgcagatcaaccagatgttttctgtgcagctgagcctgggggagcagacctgggagagcgagggcagcagcatcaagaaggcccagcaggccgtggccaacaaggccctgacagagagcaccctgcccaagcctgtgcagaagccacccaagagcaatgtgaacaacaaccctggcagcatcaccccctag

SEQ ID NO: 62818 - DNA, 318 bp, Artificial Sequence
  derived and/or modified sequence
atgctgcagatcaaccagatgttttctgtgcagctgagcctgggggagcagacctgggagagcgagggcagcagcatcaagaaggcccagcaggccgtggccaacaaggccctgacagagagcaccctgcccaagcctgtgcagaagccacccaagagcaatgtgaacaacaaccctggcagcatcacccccaccgtggagctgaatggcctggccatgaagagaggagagcccgccatctaccggcccctggaccccaagcccttccccaactaccgggccaactacaacttccggggcatgtacaaccagaggtag

SEQ ID NO: 62819 - DNA, 1440 bp, Artificial Sequence
  derived and/or modified sequence
atgctgcagatcaaccagatgttcagcgtgcagctgagcctgggcgagcagacttgggagtctgagggctccagtattaagaaggctcagcaagccgttgctaacaaggcgctgacggaatccacattacccaagcctgtgcagaaacctccaaagtccaacgtgaataataatccaggctctatcactccaactgttgaactgaacggtcttgccatgaaaagaggagaaccagccatctataggcccctggacccgaagcccttccctaattaccgggctaattacaatttcagaggcatgtacaaccaacgataccattgtcccgtaccgaaaattttttacgtccaactcaccgtggggaacaatgaattcttcggagagggaaagaccagacaggcagccaggcataatgccgctatgaaggccctccaagcgctccagaatgagccaatccctgagcggagtccccagaacggagagtctggcaaggacgttgacgatgacaaggatgcaaataagtcagagatctctctcgtgtttgagattgctcttaaaaggaatatgcctgtctccttcgaggtaatcaaagaaagtggcccccctcacatgaaaagcttcgtcaccagagtttctgtgggtgagtttagcgcagagggggaagggaactcaaaaaaattgagcaaaaagagggcagccacaaccgttctgcaggaactgaagaagttaccaccccttccagtcgtcgaaaaaccaaagctgttcttcaagaagagacccaagacaatagtcaaggcaggccccgagtatgggcagggaatgaatcccatttccaggctggctcaaatccaacaagctaagaaagaaaaggagccagattatgtcctcttgtctgagaggggcatgccccgaagaagggaattcgtgatgcaggtcaaagtgggaaatgaggtcgctactggaactggtcctaataagaaaattgccaaaaaaaatgccgccgaagccatgctgctgcagctgggatacaaggcatcaaccaatctgcaagatcagctcgagaagacaggcgaaaacaagggatggtctggacccaagcccggtttcccggagcctaccaataacacgccgaagggaatcctccatctcagtcccgatgtgtatcaggagatggaggcctcacgccacaaggttatctctgggacgactctggggtacctttcaccaaaggatatgaaccagcctagttcctctttcttctcaattagtccaacgagcaactcttcagccacgatagcgagggaactcctaatgaatgggacctcaagtaccgcggaagccatcggattgaaaggatcctcccctactcccccctgctcccctgtccagccatctaagcagctggagtacctggccaggatacagggcttccaggtgtag

SEQ ID NO: 62820 - DNA, 615 bp, Artificial Sequence
  derived and/or modified sequence
atgctgcagatcaaccagatgttcagcgtgcagctgagcctgggcgaacagacttgggaaagcgaaggatccagcataaagaaggcccagcaggccgttgctaacaaagcccttacggagtctaccctgccaaaacccgtgcaaaaaccgcctaagtctaatgtgaacaacaacccaggcagtatcacccctacagtggaattgaacggtctcgcaatgaaacgtggcgagccagctatctatcgtccgttggatcccaagccctttcctaactacagagctaattacaatttcagaggaatgtataaccagcgataccattgtccggttccaaaaatattttatgtccagttgacagtgggaaataacgaattcttcggtgaaggcaagacccgccaggcggcaaggcataatgctgctatgaaagccctgcaggcattgcagaatgagccaattcctgaacgaagccctcagaacggcgaatcagggaaagatgttgacgatgacaaggacgccaacaaatccgaaatctctttggtcttcgaaatcgcacttaaacggaacatgcccgtgtcatttgaagtgataaaggagagcggacccccacacatgtag

SEQ ID NO: 62821 - DNA, 195 bp, Artificial Sequence
  derived and/or modified sequence
atgctgcagatcaaccagatgttcagcgtgcagctgagcctgggcgagcaaacttgggaaagcgaggggtcatctatcaaaaaagcacagcaagccgtagccaataaggccctgaccgagagtactctcccgaagcccgtgcagaagccccccaagagtaacgtgaacaataatccagggtccatcaccccttag

SEQ ID NO: 62822 - DNA, 1440 bp, Artificial Sequence
  derived and/or modified sequence
atgctgcagatcaaccagatgttcagcgtgcagctgagcctgggcgagcaaacatgggagtctgaaggatcaagtatcaagaaagcccaacaggccgtggctaataaggccctgactgaaagcaccctacccaaacctgtacagaaacctccaaagtctaatgtgaataataacccgggctccattacgccaacagtggaactgaatggtctagccatgaaacggggggaacccgcaatctaccgtcccttagatcctaaaccattcccgaactacagggccaactacaatttcaggggcatgtataaccagcgataccattgcccagtgcccaaaatcttttacgtccagcttaccgtgggtaacaacgagttctttggtgagggcaagacccgtcaagctgcccgacacaacgccgcaatgaaggctcttcaggccctgcaaaacgaacccatccccgaaaggtcgccacagaacggtgaatcagggaaagacgtcgacgacgacaaggatgctaataagagtgagattagtctcgtattcgaaatcgctctgaagcgaaatatgcctgtctcatttgaagtcattaaagagagcgggccaccacacatgaagtccttcgtgactcgcgtgagtgtcggagagttcagcgccgagggcgagggcaactccaagaagttgtccaaaaagagagcggcaacaaccgtgctacaggagttgaagaaactcccgcccctgcccgtcgttgaaaagcccaaactctttttcaaaaagaggcccaaaactatcgtaaaggccggccctgaatatggacagggcatgaatccaattagtagactggcgcaaatccagcaggccaaaaaagagaaagaaccagattatgtcctcctcagtgagaggggaatgccccgacgcagagagtttgtgatgcaagtgaaggtaggaaatgaggttgctactgggactggccccaacaaaaaaatcgcaaagaagaatgctgcagaggctatgctgctgcagctggggtacaaggccagtactaatctccaggatcagctggagaaaacaggggagaacaagggatggtcagggccgaagccaggatttcctgaaccgaccaacaatacacccaaggggatcttgcatctctcccccgacgtctatcaggaaatggaggcttctcgacataaagtcatttcagggacaacactgggctatttatcacccaaagacatgaatcaaccttcctccagcttcttttctattagtcctaccagtaactcgagcgccaccattgcaagagaactgctcatgaacggcacttcgtctacagctgaggctattgggcttaaaggcagtagtcctacacccccatgcagtcctgtgcagccatctaagcaactcgagtaccttgctcggatacagggattccaggtgtag

SEQ ID NO: 62823 - DNA, 318 bp, Artificial Sequence
  derived and/or modified sequence
atgctgcagatcaaccagatgttcagcgtgcagctgagcctgggcgaacaaacctgggaaagcgagggtagctccattaagaaggcgcagcaggccgtggccaacaaggccctgacagagagcactctccccaaacccgtgcaaaaaccgcccaaatctaatgtgaacaacaaccctggatctattacccccacggtggaattgaacggtcttgccatgaagaggggagaacctgcaatttaccggccacttgaccctaaacctttcccaaattacagggcgaactacaacttccggggcatgtacaatcaacggtag

SEQ ID NO: 62824 - DNA, 1440 bp, Artificial Sequence
  derived and/or modified sequence
atgctccagatcaaccagatgttcagcgtacagctgtctcttggggaacagacatgggagtctgaggggtctagcatcaagaaggctcagcaggccgtggctaacaaggctcttactgagagtactctgcccaaaccggttcaaaaacccccaaagtcaaacgtcaacaataacccagggtcaatcaccccgaccgtagagctcaatgggctcgcaatgaaacgaggggagcctgcaatttacaggcccttagaccctaagccctttccgaattacagagctaattacaacttccgaggaatgtataaccagcgctatcattgtcctgttcccaaaattttttacgtgcagttaaccgtgggtaacaacgaatttttcggcgaggggaagactcgccaggccgcacggcacaatgccgctatgaaagctctgcaggccctgcagaatgagcccatcccagagcgtagcccgcaaaatggggagtccggaaaggatgtggatgacgataaggacgccaacaagtccgaaatcagcctggtgttcgagatcgctttaaaaaggaatatgccagtcagcttcgaagtgatcaaggagagcgggccaccccacatgaagagttttgtaacccgcgtttctgtgggtgagttctcagccgagggagaaggaaatagcaaaaagctgagcaaaaaacgggcagccactaccgtgttgcaggaacttaagaagttgccccctctccctgtggtagagaaaccgaaattattctttaaaaagcggccaaaaacgattgtgaaagcaggcccagagtatgggcagggaatgaaccccattagccgcctggcacagatccagcaggcgaaaaaagaaaaagagcccgactatgtcctattgtctgaacgtggcatgcctcggagaagagaatttgttatgcaagtaaaagtgggtaacgaggtggcgaccggtacaggcccaaataagaaaatcgccaagaaaaacgcagctgaggccatgttattgcagctcggctataaagcctcaaccaatttgcaggatcagttggagaagaccggcgagaacaaggggtggagtggccctaaaccaggattccccgaaccaactaataatacaccaaaggggatactgcacctatcacccgacgtttaccaagaaatggaagcctcgcgccacaaggtgattagcggcaccaccctgggctacctaagtccaaaagacatgaaccagccaagttccagttttttctccatttccccaactagcaattctagcgctacgatcgccagggaactgttgatgaacggcacctcaagtacagcggaagctattgggttgaaaggtagttctccaacacccccttgttcacccgtccagccctccaagcagttagagtacttggccaggattcaagggtttcaggtgtag

SEQ ID NO: 62825 - DNA, 615 bp, Artificial Sequence
  derived and/or modified sequence
atgttacagattaatcagatgtttagcgttcaactgagcctgggcgagcagacttgggaatctgaggggtcctcaatcaaaaaagcccagcaagcagtggccaacaaggcgcttacagagtctacactccctaaacctgtgcaaaagcctccaaagagcaatgtgaacaataatcctggctccataacccctaccgtggagctgaacggtctcgctatgaagcgtggggagcccgctatttacagaccactagatccaaagccattccctaattaccgcgcaaattacaattttcgaggtatgtataatcaacgctaccactgcccggtgcccaaaatcttttacgtccaactgaccgtggggaataatgagttcttcggggaaggaaagacgcgtcaggctgcacgtcacaacgctgccatgaaagccctgcaggctttacaaaacgaacccattccagagcgctctccacagaatggagaatctggaaaagatgtggatgatgataaggacgcaaataaatccgagatctcactggtgtttgagatcgctctgaagcgtaatatgccagtctcttttgaagtgattaaggaatccggtcctccacatatgtag

SEQ ID NO: 62826 - DNA, 195 bp, Artificial Sequence
  derived and/or modified sequence
atgttgcagattaatcagatgttctcagttcagctgtcacttggagaacagacctgggagtcagaaggcagcagtatcaaaaaggctcagcaggccgtggccaacaaggctctcactgagtccactctacccaagcccgtgcagaaaccccctaaatcgaatgtgaataacaacccagggtctattacaccctag

SEQ ID NO: 62827 - DNA, 1440 bp, Artificial Sequence
  derived and/or modified sequence
atgttgcaaattaaccagatgttctccgtccagttgtcccttggagagcagacatgggaaagtgagggctcctccatcaaaaaggcccagcaagcggtggcaaacaaagcacttacagagtccacactacctaagcccgtccagaagccacctaagtcgaacgtgaacaataaccccggatccattacccctaccgtcgaactgaacggattagccatgaagcggggagaacccgcaatataccgaccactcgatcccaaaccattccctaactacagagcaaactataatttccgcggtatgtacaaccagcgataccactgccctgttcccaaaattttttatgttcaactgacagtcgggaataacgagttttttggcgagggaaaaacgcgacaggcagccaggcacaatgctgccatgaaggcacttcaggccctgcagaatgagcctatcccagagcgctcgcctcagaatggagaatccggcaaagacgtggacgacgataaggatgccaataagtctgagatcagtctcgtgttcgagatcgcgctgaagaggaatatgcctgtcagctttgaggtgatcaaagagtccgggccaccacatatgaagtccttcgttacaagagtcagcgtaggcgagtttagcgctgagggagaagggaattccaagaagctgagcaaaaagcgtgccgctaccactgtgctccaggaactcaaaaaactgcctccactgccagtggttgaaaagccgaagctgtttttcaaaaaaagaccaaagactatcgtgaaggctggtccagaatacggacagggcatgaaccccatcagccgactagctcaaatccaacaagctaagaaagagaaggagccagactacgtgttactttcggagaggggcatgccacgtagacgggagtttgtgatgcaagtgaaagtcggaaacgaggtggccaccggtaccggtccaaataaaaaaattgctaaaaaaaatgcagcagaggccatgctcctccaattaggatataaagcatccaccaatctgcaggaccaactcgagaaaactggcgagaataaaggctggtccgggccaaagccaggatttcccgagcccacaaacaacactccaaaaggaatccttcaccttagtcctgacgtatatcaagagatggaagcttccaggcataaagttatttctggcacaactttgggttatctgagtcccaaagacatgaatcagccttcctcgagtttcttttctattagtccaacttccaattcaagtgcgacaatcgccagagaattgctcatgaacggtaccagcagcactgctgaggctattggcttaaaaggcagttctccaacccctccgtgcagccccgtgcagccgagcaaacagttggaatacctagctcggattcagggatttcaggtatag

SEQ ID NO: 62828 - DNA, 318 bp, Artificial Sequence
  derived and/or modified sequence
atgcttcaaataaatcagatgtttagtgtccagctttcactcggcgaacagacctgggagagtgagggatctagcattaagaaggcccaacaggccgtcgctaataaggctctgactgaaagcacattgcccaagcccgttcaaaagcctccaaaaagcaacgtgaataacaatccaggaagcatcacccctaccgtggaactgaacggactggccatgaagagaggggagcctgcaatttaccgcccactagatcccaagccctttcccaattaccgggctaactacaatttccggggaatgtacaaccagagatag

SEQ ID NO: 62829 - DNA, 1695 bp, Artificial Sequence
  derived and/or modified sequence
agcccgaggggtggaagccggcggcggccgagcggggtcagttctctgtagtgtttgccaatgttggagccgtctgcaaagtgtccccggcaagaagatgttctcagtgcagctgagtcttggtgagcagacatgggaatccgaaggcagcagtataaagaaggctcagcaggctgttgccaataaagctttgactgaatctacgcttcccaaaccagttcagaagccacccaaaagtaatgttaacaataacccaggcagtataactccaactgtggaactgaatgggcttgctatgaaaaggggagagcctgccatctacaggccattagatccaaagccattcccaaattatagagctaattacaactttcggggcatgtacaatcagaggtatcattgcccagtgcctaagatcttttatgttcagctcactgtaggaaataatgaattttttggggaaggaaagactcgacaagctgctagacacaatgctgcaatgaaagccctccaagcactgcagaatgaacctattccagaaagatctcctcagaatggtgaatcaggaaaggatgtggatgatgacaaagatgcaaataagtctgagatcagcttagtgtttgaaattgctctgaagcgaaatatgcctgtcagttttgaggttattaaagaaagtggaccaccacatatgaaaagctttgttactcgagtgtcagtaggagagttctctgcagaaggagaaggaaatagcaaaaaactctccaagaagcgcgctgcgaccaccgtcttacaggagcttaaaaaacttccacctcttcctgtggtggaaaagccaaaactattttttaaaaaacgccctaaaacaatagtaaaggccggaccagaatatggccaagggatgaaccctattagccgcctggcgcaaattcaacaggccaaaaaggaaaaggagccggattatgttttgctttcagaaagaggaatgcctcgacgtcgagaatttgtgatgcaggtgaaggtaggcaatgaagttgctacaggaacaggacctaataaaaagatagccaaaaaaaatgctgcagaagcaatgctgttacaacttggttataaagcatccactaatcttcaggatcaacttgagaagacaggggaaaacaaaggatggagtggtccaaagcctgggtttcctgaaccaacaaataatactccaaaaggaattcttcatttgtctcctgatgtttatcaagagatggaagccagccgccacaaagtaatctctggcactactctaggctatttgtcacccaaagatatgaaccaaccttcaagctctttcttcagtatatctcccacatcgaatagttcagctacaattgccagggaactccttatgaatggaacatcttctacagctgaagccataggtttaaaaggaagttctcctactcccccttgttctccagtacaaccttcaaaacaactggaatatttagcaaggattcaaggctttcaggtatgaattaaaagcaaaaacaaaaaacaaaacaattcattagcctcagattcttcatctgtatacatcacaaggctcattcttgcctgctagtatggcctacatgccacttacgttttaagttatttaggaacacaaaggacagacaaaaaagccatatgcacatgcctcattttctctta

SEQ ID NO: 62830 - protein, 473 aa, Artificial Sequence
  derived and/or modified sequence
MFSVQLSLGEQTWESEGSSIKKAQQAVANKALTESTLPKPVQKPPKSNVNNNPGSITPTVELNGLAMKRGEPAIYRPLDPKPFPNYRANYNFRGMYNQRYHCPVPKIFYVQLTVGNNEFFGEGKTRQAARHNAAMKALQALQNEPIPERSPQNGESGKDVDDDKDANKSEISLVFEIALKRNMPVSFEVIKESGPPHMKSFVTRVSVGEFSAEGEGNSKKLSKKRAATTVLQELKKLPPLPVVEKPKLFFKKRPKTIVKAGPEYGQGMNPISRLAQIQQAKKEKEPDYVLLSERGMPRRREFVMQVKVGNEVATGTGPNKKIAKKNAAEAMLLQLGYKASTNLQDQLEKTGENKGWSGPKPGFPEPTNNTPKGILHLSPDVYQEMEASRHKVISGTTLGYLSPKDMNQPSSSFFSISPTSNSSATIARELLMNGTSSTAEAIGLKGSSPTPPCSPVQPSKQLEYLARIQGFQV

SEQ ID NO: 62831 - DNA, 1422 bp, Artificial Sequence
  derived and/or modified sequence
atgttcagcgtgcagctgagcctgggcgagcagacctgggagagcgagggcagcagcatcaagaaggcccagcaggccgtggccaacaaggccctgaccgagagcaccctgcccaagcccgtgcagaagccccccaagagcaacgtgaacaacaaccccggcagcatcacccccaccgtggagctgaacggcctggccatgaagagaggcgagcccgccatctacagacccctggaccccaagcccttccccaactacagagccaactacaacttcagaggcatgtacaaccagagataccactgccccgtgcccaagatcttctacgtgcagctgaccgtgggcaacaacgagttcttcggcgagggcaagaccagacaggccgccagacacaacgccgccatgaaggccctgcaggccctgcagaacgagcccatccccgagagaagcccccagaacggcgagagcggcaaggacgtggacgacgacaaggacgccaacaagagcgagatcagcctggtgttcgagatcgccctgaagagaaacatgcccgtgagcttcgaggtgatcaaggagagcggccccccccacatgaagagcttcgtgaccagagtgagcgtgggcgagttcagcgccgagggcgagggcaacagcaagaagctgagcaagaagagagccgccaccaccgtgctgcaggagctgaagaagctgccccccctgcccgtggtggagaagcccaagctgttcttcaagaagagacccaagaccatcgtgaaggccggccccgagtacggccagggcatgaaccccatcagcagactggcccagatccagcaggccaagaaggagaaggagcccgactacgtgctgctgagcgagagaggcatgcccagaagaagagagttcgtgatgcaggtgaaggtgggcaacgaggtggccaccggcaccggccccaacaagaagatcgccaagaagaacgccgccgaggccatgctgctgcagctgggctacaaggccagcaccaacctgcaggaccagctggagaagaccggcgagaacaagggctggagcggccccaagcccggcttccccgagcccaccaacaacacccccaagggcatcctgcacctgagccccgacgtgtaccaggagatggaggccagcagacacaaggtgatcagcggcaccaccctgggctacctgagccccaaggacatgaaccagcccagcagcagcttcttcagcatcagccccaccagcaacagcagcgccaccatcgccagagagctgctgatgaacggcaccagcagcaccgccgaggccatcggcctgaagggcagcagccccacccccccctgcagccccgtgcagcccagcaagcagctggagtacctggccagaatccagggcttccaggtgtag

SEQ ID NO: 62832 - DNA, 1422 bp, Artificial Sequence
  derived and/or modified sequence
atgttcagtgtccaattgtctcttggcgaacagacatgggaaagcgaggggtcatcaatcaagaaggcccaacaggcagtcgcgaataaagctcttacagagtcaactctcccaaaacccgtgcagaaaccaccgaaatcaaatgtcaacaataatcccggctcaatcacacccacagtggagctgaacgggctcgctatgaagcgtggtgaacctgccatttatcggcctcttgatcctaagccattccccaactatagggcaaattacaatttcagagggatgtacaaccagcgctaccattgtcccgtccccaaaatcttctacgtgcagctgacagttggcaacaatgaattttttggcgagggaaaaaccaggcaagccgccagacacaatgctgctatgaaggccttgcaggcactgcagaatgaaccaatcccagaaaggagcccgcaaaacggcgagtctggtaaggatgtggatgacgacaaggacgctaacaaatcagagatctccctggtgtttgaaattgccctgaaaaggaatatgccggtgagttttgaagtcatcaaggaatccggccccccccatatgaagagctttgtcacacgcgtcagcgttggtgagtttagtgccgagggggaaggaaacagcaaaaaactctcaaaaaaacgagcagcaactaccgtcctacaggaattgaaaaagctgccccctctgcccgttgtcgaaaaacccaaactttttttcaaaaaaaggcccaaaacaatcgttaaggctgggcctgaatacggccaggggatgaaccctatttcacggttggcccagattcagcaggctaaaaaggaaaaggagcccgactatgtactgctgtcagagcgcggaatgcctcgtcggagggagtttgtcatgcaagttaaggtcgggaatgaagtcgctaccggtaccggaccaaacaaaaagatcgccaaaaagaacgccgccgaggccatgctgctgcagcttgggtataaagcctctacgaacctgcaggatcagcttgagaagactggcgagaataagggatggtcagggcctaaacccggcttccccgagccaacaaacaacacacccaagggaatcctacacttgagccccgatgtatatcaagaaatggaagcgtctagacataaagtgattagcggcacaacactcgggtacttgtctcccaaggacatgaatcagccttccagttcctttttctctattagtcccacttctaattcctccgccaccattgctcgtgagctcttaatgaatggcaccagctcaacggcggaagccatcggccttaaagggagcagcccgactcccccttgctcacccgtccagcctagcaaacaactcgaatatcttgctcgcattcagggctttcaggtttag

SEQ ID NO: 62833 - DNA, 1422 bp, Artificial Sequence
  derived and/or modified sequence
atgttttctgtgcagctgagcctgggggagcagacctgggagagcgagggcagcagcatcaagaaggcccagcaggccgtggccaacaaggccctgacagagagcaccctgcccaagcctgtgcagaagccacccaagagcaatgtgaacaacaaccctggcagcatcacccccaccgtggagctgaatggcctggccatgaagagaggagagcccgccatctaccggcccctggaccccaagcccttccccaactaccgggccaactacaacttccggggcatgtacaaccagcgctaccactgccctgtgcccaagatcttctacgtgcagctgactgtgggcaacaatgagttcttcggggagggcaagacccggcaggccgcccggcacaatgctgccatgaaggccctgcaggccctgcagaatgagcccatccctgagaggagcccccagaatggagagagcggcaaggatgtggatgatgacaaggatgccaacaagtctgagatcagcctggtgtttgaaattgccctgaagaggaacatgcctgtgtcctttgaagtcatcaaggagagcggccccccccacatgaagagctttgtgaccagggtgtctgtgggggagttctctgctgagggggagggcaacagcaagaagctgagcaagaagagagctgccaccaccgtgctgcaggagctgaagaagctgccccccctgcctgtggtggagaagcccaagctgttcttcaagaagaggcccaagaccatcgtgaaggccggcccagaatatggccagggcatgaaccccatcagccggctggcccagatccagcaggccaagaaggagaaggagccagactatgtgctgctgtctgagcggggcatgcccaggagaagagaatttgtgatgcaggtgaaggtgggcaatgaggtggccaccggcaccggccccaacaagaagatcgccaagaagaatgctgctgaggccatgctgctgcagctgggctacaaggccagcaccaacctgcaggaccagctggagaagacaggagagaacaagggctggagcggccccaagccaggcttccctgagcccaccaacaacacccccaagggcatcctgcacctgagcccagatgtgtaccaggagatggaggccagccgccacaaggtgatcagcggcaccaccctgggctacctgagccccaaggacatgaaccagcccagcagcagcttcttcagcatcagccccaccagcaacagcagcgccaccatcgcccgggagctgctgatgaatggcaccagcagcacagctgaggccatcggcctgaagggcagcagccccaccccaccctgcagccctgtgcagcccagcaagcagctggagtacctggcccgcatccagggcttccaggtgtag

SEQ ID NO: 62834 - DNA, 1422 bp, Artificial Sequence
  derived and/or modified sequence
atgttcagcgtgcagctgagcctgggcgagcagacctgggagagcgaaggctcatcaatcaagaaggctcagcaggctgttgcaaacaaggccctcacggagagcactttgcctaaaccagtccagaagcctcctaagtcaaacgtgaataacaatccaggcagcatcacgcctacagtagagctgaacggcttggcaatgaagagaggagagccagccatctatcgccccctggatccaaaaccatttcccaactatcgtgcgaattataacttcagggggatgtacaaccagcggtaccactgtcccgtaccaaaaatcttttacgtgcaactaactgtgggcaacaatgagttctttggagagggcaagacgaggcaagccgctagacacaatgccgctatgaaagctcttcaagctctgcagaacgaacctatacccgagaggtcgccacagaatggtgagtcaggaaaagacgtggatgacgacaaagatgcaaacaagtcagagatcagtcttgtgtttgaaattgcgctgaagagaaatatgcccgtttcctttgaggtcatcaaggagagcggacccccccatatgaaatccttcgtgaccagagtttcagttggagaattcagcgcggaaggagagggaaactcaaagaaactcagtaaaaagcgtgccgccaccacggtgcttcaggaactgaagaagctgcctcctctgcccgttgtcgagaaacctaaactgtttttcaaaaaaagaccaaagactatcgtgaaggctggaccagagtacggccagggcatgaaccctatttcccggctcgctcagatacagcaagccaagaaggaaaaagaacccgattatgttctgttatcagagcgcggcatgccacgccgtcgagagttcgtcatgcaggtgaaagtgggcaacgaggttgcaactggaaccgggcctaacaagaagattgccaaaaaaaatgccgctgaggcaatgttgctgcagctgggctacaaggccagtacgaacctccaggaccagctggagaagacaggagagaacaagggctggagtggtccaaagcccggctttcccgagccaaccaacaacacccccaagggcatcctccatctctccccagatgtgtaccaggaaatggaggcaagcagacacaaagtaatcagcggtaccactttgggatatctgtcgcccaaggatatgaaccagcccagctctagcttcttctcaatcagcccgacaagtaattcatccgccactattgcccgggaactgcttatgaacggtacatccagcactgccgaagcaatcggcctgaaggggagcagcccaacaccgccttgcagccccgtgcaaccatcgaagcagctagagtacctcgcaagaattcaaggattccaggtttag

SEQ ID NO: 62835 - DNA, 1422 bp, Artificial Sequence
  derived and/or modified sequence
atgttctcagtacagctgtctctgggggagcagacatgggagtctgaggggtcatcaatcaagaaagcccagcaggcagtggcaaataaggccctaactgagtccactctacccaagcctgttcaaaaaccaccgaagtccaatgttaataacaaccccggttctatcacgccaacagtggagttaaacggactcgcaatgaagaggggggagcccgcaatctaccgccctctggatccgaaaccctttccaaattatcgggcaaactacaacttccggggaatgtataatcaacgctaccactgtccagtgccaaagattttttacgttcagttaaccgtgggcaataacgaattcttcggcgaaggcaaaactcggcaagccgcacgccataatgcagcaatgaaggccttacaagccttacagaatgagcctatccctgagaggtccccccagaatggcgagagtgggaaggacgtagacgatgacaaggatgcaaacaaaagcgagatttcactggtttttgagattgccctgaaacgaaacatgccagtgagcttcgaagtgataaaggagtctggacccccacacatgaagtcctttgttacacgggtgtccgtcggagagttctccgccgagggagaaggtaatagcaagaagctgagcaagaagcgagcggctacaactgtgctccaggagctcaaaaagcttcccccacttccagtcgtagagaagcctaaattgttttttaaaaaacgccctaaaaccatcgtgaaagctgggccagaatatgggcaaggaatgaaccccatttctaggctcgcccagatccagcaggcgaagaaagagaaggagcccgactacgttttactgagtgagaggggaatgccacgcagaagggagttcgttatgcaggtgaaagtgggaaatgaagtggccaccggaacgggccctaacaagaaaattgccaaaaagaacgccgctgaagctatgctgctccagctgggatataaagcaagtaccaatcttcaagaccaactggaaaagaccggcgagaacaaaggttggagcgggcctaagcctggatttccggaacctaccaataacacccccaaaggcatactgcacctgtcacccgatgtgtatcaggaaatggaagcctcacgccacaaggtcatcagcggaaccacactagggtatctgagtcccaaagacatgaatcaaccatccagtagcttcttttccattagcccaacatccaatagttccgctaccattgccagagaactgctgatgaacggaaccagcagcactgcagaagcaattggtctcaagggttcgtcccccacaccaccttgtagccctgtgcaaccttctaagcaactggagtatttggccagaattcaaggctttcaagtgtag

SEQ ID NO: 62836 - protein, 828 aa, Artificial Sequence
  derived and/or modified sequence
MALSPWTPGLGAGEKLVQAAAVSTGPSLELCTLPSTLGSSVAVEALEQLFVVEQSLQSDYFKCNEEAKIFLKDIAVAVKKLEEMRKATIDLLEIESMELNKLYYLLETLPNSIKRELEECVRDARRLNLFEINTIKMRITRTENEIELLKKKITDLTKYNEALGEKQEELARKHARFVLSLNQTMEKKATTTVYINETYTKINLKREDIALQKKCIQEAEELMEKERAEYLIRKQELTAQINEFENTREVKRMETYQKKKELDKLQTKMSKIKETVTVSAAVLSDHNLEIARLHESIRYWEQEVSELKKDLAILEAKLCFFTDNKEKLDDISNDEKNEFLNKIKQLVETLHAARMEYKDLREKMKTLARQYKIVLSEEEKAFLQKQKIHDENQKQLTFISQKEYFLSQKRVDIKNMEEGLITLQELQQATKTVYQQQIKILSANLERESQRCVITQWKMACLRKKHARWTAKIKAEIQAITEKIQNAEVRRIELLNETSFRQQEISGFVAQIEKLTTELKEEEKAFVNKEKMLMKELSKYEEIFVKETQINKEKEEELVEYLPQLQVAEQEYKEKRRKLEELSNIITAQRQEEDLLNNHIFLFTRDFSRYISNMEDVKQELQQLRDQESKKNKDHFETLKNLENGFYINDQKADLLLLENKKLKEYILYLKNNIEKYREGQEALMHTSSDLSRQLIAQEAQYKDLWAEFQTTVKILVDNGEETLQDINNLTDKLRERDEKMQHVSTWLRGSLEGLRLLVEQESPMDLLSKQQLRALLVTSKEEKTCQLSDLVIPNYATNIQLNIDTYLGLNTLVVLSNSAFHLREFSR

SEQ ID NO: 62837 - protein, 793 aa, Artificial Sequence
  derived and/or modified sequence
MALSPWTPGLGAGEKLVQAAAVSTGPSLELCTLPSTLGSSVAVEALEQLFVVEQSLQSDYFKCNEEAKIFLKDIAVAVKKLEEMRKATIDLLEIESMELNKLYYLLETLPNSIKRELEECVRDARRLNLFEINTIKMRITRTENEIELLKKKITDLTKYNEALGEKQEELARKHARFVLSLNQTMEKKATTTVYINETYTKINLKREDIALQKKCIQEAEELMEKERAEYLIRKQELTAQINEFENTREVKRMETYQKKKELDKLQTKMSKIKETVTVSAAVLSDHNLEIARLHESIRYWEQEVSELKKDLAILEAKLCFFTDNKEKLDDISNDEKNEFLNKIKQLVETLHAARMEYKDLREKMKTLARQYKIVLSEEEKAFLQKQKIHDENQKQLTFISQKEYFLSQKRVDIKNMEEGLITLQELQQATKTVYQQQIKILSANLERESQRCVITQWKMACLRKKHARWTAKIKAEIQAITEKIQNAEVRRIELLNETSFRQQEISGFVAQIEKLTTELKEEEKAFVNKEKMLMKELSKYEEIFVKETQINKEKEEELVEYLPQLQVAEQEYKEKRRKLEELSNIITAQRQEEDLLNNHIFLFTRDFSRYISNMEDVKQELQQLRDQESKKNKDHFETLKNLENGFYINDQKADLLLLENKKLKEYILYLKNNIEKYREGQEALMHTSSDLSRQLIAQEAQYKDLWAEFQTTVKILVDNGEETLQDINNLTDKLRERDEKMQHVSTWLRGSLEGLRLLVEQESPMDLLKKKKHIRTRVHFPVVKCTEKNTLTK

SEQ ID NO: 62838 - DNA, 2543 bp, Artificial Sequence
  derived and/or modified sequence
gtggcaaccggcaatccttggctctggcttaggaggcgctcaagtagagcggcaaaatggccctgagcccctggaccccagggctgggcgctggcgagaagctggtgcaggcggctgccgtctccactggcccctccctggagttatgcaccttaccctccaccctgggctcctcggtcgcggtcgaggcgctggagcagctgtttgttgtggaacaatcactgcaaagtgactattttaaatgtaatgaagaagctaagatctttcttaaggacattgctgtagctgttaagaaattggaagaaatgagaaaagccacaatcgatcttttggagattgaaagcatggaactcaacaaactatactatctattggaaactcttcccaatagcattaagagggaattggaagaatgtgtccgagacgctcgcagattaaatctttttgagataaatacaataaaaatgagaattacaaggacagagaatgaaatagagcttctgaagaagaaaataactgacctgacaaaatataatgaagctctgggggagaagcaggaagagctagcaaggaagcatgcaaggtttgtcctgtcactcaaccaaactatggagaaaaaagccaccaccactgtttacataaatgagacttataccaaaataaacttgaagagagaagacatagcattgcaaaaaaaatgtattcaagaggcagaggagctaatggaaaaagaaagggcagaatatctaataagaaaacaagagttgactgcacagattaatgaatttgaaaatacccgtgaagtaaagagaatggagacttatcaaaagaagaaagaattggataaattacaaactaaaatgtcaaaaataaaagaaacagttactgtttccgcagcggttcttagtgatcacaatttagagatagcacgactacacgaatcaataaggtattgggaacaagaggtcagtgagctaaagaaagaccttgcaattctggaggcgaaactgtgttttttcacagataacaaagaaaaactagatgatatatctaatgatgaaaaaaatgaattcctgaacaagataaaacagctggttgaaacactgcatgctgctcgtatggaatacaaagacctacgagagaaaatgaaaactcttgccagacaatataagattgttttaagtgaggaagaaaaagcttttttgcaaaaacaaaagattcatgatgaaaatcagaaacagctgacatttatttctcagaaagaatactttctgtcacaaaagagagtagacatcaaaaatatggaagaaggactcatcacactccaggaacttcaacaagcaacaaaaacagtgtatcagcaacaaatcaaaatcctgagtgctaacctggaaagagaaagtcagagatgtgttataactcagtggaaaatggcttgcttgagaaaaaagcatgcacgttggacagccaagataaaagctgaaatacaagctattacagaaaaaattcagaatgcagaagttagacgaattgaattacttaacgagaccagtttcagacaacaggagatcagtggatttgtggcacagattgaaaaacttacaacagaattaaaagaagaggagaaagcatttgttaacaaagaaaaaatgttaatgaaagagttaagcaagtatgaggaaatatttgttaaggaaacacaaattaacaaagaaaaggaagaagaactagttgagtatcttccacaacttcaggtggcagaacaagagtataaagagaaaagaagaaagttagaagagctcagtaatattattacagcacaaagacaggaggaagatttactgaacaatcacatttttctgtttacaagggacttttcaagatacattagcaacatggaagatgtaaaacaagaattacaacaattacgagatcaagaaagcaaaaaaaacaaagatcattttgaaactctaaagaacttagaaaatggattctatataaatgaccaaaaagcagatcttctgctcctggaaaataaaaaattaaaagaatatattttatacttgaagaataacatagagaaatacagagaaggacaagaagccctcatgcacacctcaagcgacttgtctcggcaactaatagctcaggaggcacaatataaggatttgtgggctgaatttcagaccacagttaagatcttggtggacaatggtgaagagaccttgcaagacataaacaatctaacagacaagctgcgtgaaagagatgaaaaaatgcagcatgtcagtacatggctacgagggagtcttgaagggctgcgtttgcttgtggaacaggaatcaccaatggaccttcttagtaagcaacagcttagagctttgctggtaacatcaaaagaagaaaaaacgtgtcaactaagtgacttagttatccccaattatgccacaaacattcaattgaacattgatacttatttggggttgaatactcttgtagtgttatccaattctgcctttcacctaagagaattttctagataa

SEQ ID NO: 62839 - DNA, 2594 bp, Artificial Sequence
  derived and/or modified sequence
gtggcaaccggcaatccttggctctggcttaggaggcgctcaagtagagcggcaaaatggccctgagcccctggaccccagggctgggcgctggcgagaagctggtgcaggcggctgccgtctccactggcccctccctggagttatgcaccttaccctccaccctgggctcctcggtcgcggtcgaggcgctggagcagctgtttgttgtggaacaatcactgcaaagtgactattttaaatgtaatgaagaagctaagatctttcttaaggacattgctgtagctgttaagaaattggaagaaatgagaaaagccacaatcgatcttttggagattgaaagcatggaactcaacaaactatactatctattggaaactcttcccaatagcattaagagggaattggaagaatgtgtccgagacgctcgcagattaaatctttttgagataaatacaataaaaatgagaattacaaggacagagaatgaaatagagcttctgaagaagaaaataactgacctgacaaaatataatgaagctctgggggagaagcaggaagagctagcaaggaagcatgcaaggtttgtcctgtcactcaaccaaactatggagaaaaaagccaccaccactgtttacataaatgagacttataccaaaataaacttgaagagagaagacatagcattgcaaaaaaaatgtattcaagaggcagaggagctaatggaaaaagaaagggcagaatatctaataagaaaacaagagttgactgcacagattaatgaatttgaaaatacccgtgaagtaaagagaatggagacttatcaaaagaagaaagaattggataaattacaaactaaaatgtcaaaaataaaagaaacagttactgtttccgcagcggttcttagtgatcacaatttagagatagcacgactacacgaatcaataaggtattgggaacaagaggtcagtgagctaaagaaagaccttgcaattctggaggcgaaactgtgttttttcacagataacaaagaaaaactagatgatatatctaatgatgaaaaaaatgaattcctgaacaagataaaacagctggttgaaacactgcatgctgctcgtatggaatacaaagacctacgagagaaaatgaaaactcttgccagacaatataagattgttttaagtgaggaagaaaaagcttttttgcaaaaacaaaagattcatgatgaaaatcagaaacagctgacatttatttctcagaaagaatactttctgtcacaaaagagagtagacatcaaaaatatggaagaaggactcatcacactccaggaacttcaacaagcaacaaaaacagtgtatcagcaacaaatcaaaatcctgagtgctaacctggaaagagaaagtcagagatgtgttataactcagtggaaaatggcttgcttgagaaaaaagcatgcacgttggacagccaagataaaagctgaaatacaagctattacagaaaaaattcagaatgcagaagttagacgaattgaattacttaacgagaccagtttcagacaacaggagatcagtggatttgtggcacagattgaaaaacttacaacagaattaaaagaagaggagaaagcatttgttaacaaagaaaaaatgttaatgaaagagttaagcaagtatgaggaaatatttgttaaggaaacacaaattaacaaagaaaaggaagaagaactagttgagtatcttccacaacttcaggtggcagaacaagagtataaagagaaaagaagaaagttagaagagctcagtaatattattacagcacaaagacaggaggaagatttactgaacaatcacatttttctgtttacaagggacttttcaagatacattagcaacatggaagatgtaaaacaagaattacaacaattacgagatcaagaaagcaaaaaaaacaaagatcattttgaaactctaaagaacttagaaaatggattctatataaatgaccaaaaagcagatcttctgctcctggaaaataaaaaattaaaagaatatattttatacttgaagaataacatagagaaatacagagaaggacaagaagccctcatgcacacctcaagcgacttgtctcggcaactaatagctcaggaggcacaatataaggatttgtgggctgaatttcagaccacagttaagatcttggtggacaatggtgaagagaccttgcaagacataaacaatctaacagacaagctgcgtgaaagagatgaaaaaatgcagcatgtcagtacatggctacgagggagtcttgaagggctgcgtttgcttgtggaacaggaatcaccaatggaccttcttaagaagaagaaacacattcgtacaagggttcatttcccagtggttaaatgtactgagaaaaatacattaacaaagtaactcaaggatacaactgctgtgaattcaaaagacagactactacaggaaaagtgagtgcacttactttcatattttgcagctgttaatagaagtcttaaacatttaaaatttaactaattcacacaacctccaccaagtatcagtaaataaacttct

SEQ ID NO: 62840 - DNA, 2487 bp, Artificial Sequence
  derived and/or modified sequence
atggccctgagcccctggacccccggcctgggcgccggcgagaagctggtgcaggccgccgccgtgagcaccggccccagcctggagctgtgcaccctgcccagcaccctgggcagcagcgtggccgtggaggccctggagcagctgttcgtggtggagcagagcctgcagagcgactacttcaagtgcaacgaggaggccaagatcttcctgaaggacatcgccgtggccgtgaagaagctggaggagatgagaaaggccaccatcgacctgctggagatcgagagcatggagctgaacaagctgtactacctgctggagaccctgcccaacagcatcaagagagagctggaggagtgcgtgagagacgccagaagactgaacctgttcgagatcaacaccatcaagatgagaatcaccagaaccgagaacgagatcgagctgctgaagaagaagatcaccgacctgaccaagtacaacgaggccctgggcgagaagcaggaggagctggccagaaagcacgccagattcgtgctgagcctgaaccagaccatggagaagaaggccaccaccaccgtgtacatcaacgagacctacaccaagatcaacctgaagagagaggacatcgccctgcagaagaagtgcatccaggaggccgaggagctgatggagaaggagagagccgagtacctgatcagaaagcaggagctgaccgcccagatcaacgagttcgagaacaccagagaggtgaagagaatggagacctaccagaagaagaaggagctggacaagctgcagaccaagatgagcaagatcaaggagaccgtgaccgtgagcgccgccgtgctgagcgaccacaacctggagatcgccagactgcacgagagcatcagatactgggagcaggaggtgagcgagctgaagaaggacctggccatcctggaggccaagctgtgcttcttcaccgacaacaaggagaagctggacgacatcagcaacgacgagaagaacgagttcctgaacaagatcaagcagctggtggagaccctgcacgccgccagaatggagtacaaggacctgagagagaagatgaagaccctggccagacagtacaagatcgtgctgagcgaggaggagaaggccttcctgcagaagcagaagatccacgacgagaaccagaagcagctgaccttcatcagccagaaggagtacttcctgagccagaagagagtggacatcaagaacatggaggagggcctgatcaccctgcaggagctgcagcaggccaccaagaccgtgtaccagcagcagatcaagatcctgagcgccaacctggagagagagagccagagatgcgtgatcacccagtggaagatggcctgcctgagaaagaagcacgccagatggaccgccaagatcaaggccgagatccaggccatcaccgagaagatccagaacgccgaggtgagaagaatcgagctgctgaacgagaccagcttcagacagcaggagatcagcggcttcgtggcccagatcgagaagctgaccaccgagctgaaggaggaggagaaggccttcgtgaacaaggagaagatgctgatgaaggagctgagcaagtacgaggagatcttcgtgaaggagacccagatcaacaaggagaaggaggaggagctggtggagtacctgccccagctgcaggtggccgagcaggagtacaaggagaagagaagaaagctggaggagctgagcaacatcatcaccgcccagagacaggaggaggacctgctgaacaaccacatcttcctgttcaccagagacttcagcagatacatcagcaacatggaggacgtgaagcaggagctgcagcagctgagagaccaggagagcaagaagaacaaggaccacttcgagaccctgaagaacctggagaacggcttctacatcaacgaccagaaggccgacctgctgctgctggagaacaagaagctgaaggagtacatcctgtacctgaagaacaacatcgagaagtacagagagggccaggaggccctgatgcacaccagcagcgacctgagcagacagctgatcgcccaggaggcccagtacaaggacctgtgggccgagttccagaccaccgtgaagatcctggtggacaacggcgaggagaccctgcaggacatcaacaacctgaccgacaagctgagagagagagacgagaagatgcagcacgtgagcacctggctgagaggcagcctggagggcctgagactgctggtggagcaggagagccccatggacctgctgagcaagcagcagctgagagccctgctggtgaccagcaaggaggagaagacctgccagctgagcgacctggtgatccccaactacgccaccaacatccagctgaacatcgacacctacctgggcctgaacaccctggtggtgctgagcaacagcgccttccacctgagagagttcagcagatag

SEQ ID NO: 62841 - DNA, 2382 bp, Artificial Sequence
  derived and/or modified sequence
atggccctgagcccctggacccccggcctgggcgccggcgagaagctggtgcaggccgccgccgtgagcaccggccccagcctggagctgtgcaccctgcccagcaccctgggcagcagcgtggccgtggaggccctggagcagctgttcgtggtggagcagagcctgcagagcgactacttcaagtgcaacgaggaggccaagatcttcctgaaggacatcgccgtggccgtgaagaagctggaggagatgagaaaggccaccatcgacctgctggagatcgagagcatggagctgaacaagctgtactacctgctggagaccctgcccaacagcatcaagagagagctggaggagtgcgtgagagacgccagaagactgaacctgttcgagatcaacaccatcaagatgagaatcaccagaaccgagaacgagatcgagctgctgaagaagaagatcaccgacctgaccaagtacaacgaggccctgggcgagaagcaggaggagctggccagaaagcacgccagattcgtgctgagcctgaaccagaccatggagaagaaggccaccaccaccgtgtacatcaacgagacctacaccaagatcaacctgaagagagaggacatcgccctgcagaagaagtgcatccaggaggccgaggagctgatggagaaggagagagccgagtacctgatcagaaagcaggagctgaccgcccagatcaacgagttcgagaacaccagagaggtgaagagaatggagacctaccagaagaagaaggagctggacaagctgcagaccaagatgagcaagatcaaggagaccgtgaccgtgagcgccgccgtgctgagcgaccacaacctggagatcgccagactgcacgagagcatcagatactgggagcaggaggtgagcgagctgaagaaggacctggccatcctggaggccaagctgtgcttcttcaccgacaacaaggagaagctggacgacatcagcaacgacgagaagaacgagttcctgaacaagatcaagcagctggtggagaccctgcacgccgccagaatggagtacaaggacctgagagagaagatgaagaccctggccagacagtacaagatcgtgctgagcgaggaggagaaggccttcctgcagaagcagaagatccacgacgagaaccagaagcagctgaccttcatcagccagaaggagtacttcctgagccagaagagagtggacatcaagaacatggaggagggcctgatcaccctgcaggagctgcagcaggccaccaagaccgtgtaccagcagcagatcaagatcctgagcgccaacctggagagagagagccagagatgcgtgatcacccagtggaagatggcctgcctgagaaagaagcacgccagatggaccgccaagatcaaggccgagatccaggccatcaccgagaagatccagaacgccgaggtgagaagaatcgagctgctgaacgagaccagcttcagacagcaggagatcagcggcttcgtggcccagatcgagaagctgaccaccgagctgaaggaggaggagaaggccttcgtgaacaaggagaagatgctgatgaaggagctgagcaagtacgaggagatcttcgtgaaggagacccagatcaacaaggagaaggaggaggagctggtggagtacctgccccagctgcaggtggccgagcaggagtacaaggagaagagaagaaagctggaggagctgagcaacatcatcaccgcccagagacaggaggaggacctgctgaacaaccacatcttcctgttcaccagagacttcagcagatacatcagcaacatggaggacgtgaagcaggagctgcagcagctgagagaccaggagagcaagaagaacaaggaccacttcgagaccctgaagaacctggagaacggcttctacatcaacgaccagaaggccgacctgctgctgctggagaacaagaagctgaaggagtacatcctgtacctgaagaacaacatcgagaagtacagagagggccaggaggccctgatgcacaccagcagcgacctgagcagacagctgatcgcccaggaggcccagtacaaggacctgtgggccgagttccagaccaccgtgaagatcctggtggacaacggcgaggagaccctgcaggacatcaacaacctgaccgacaagctgagagagagagacgagaagatgcagcacgtgagcacctggctgagaggcagcctggagggcctgagactgctggtggagcaggagagccccatggacctgctgaagaagaagaagcacatcagaaccagagtgcacttccccgtggtgaagtgcaccgagaagaacaccctgaccaagtag

SEQ ID NO: 62842 - DNA, 2487 bp, Artificial Sequence
  derived and/or modified sequence
atggcgttgtccccgtggaccccggggctgggagccggcgagaagctggtgcaagccgccgccgtgtcaaccggaccttctttagagttatgtactctgccgtccactctaggatcaagcgtcgcggtggaggccctggaacagctctttgtggtagaacagtctttgcagagtgactactttaagtgtaacgaagaagccaagatcttcctaaaggacatagctgtggctgtcaaaaagctggaagaaatgaggaaggcgacaattgatctccttgagatagagagcatggaactaaataagttgtattatttactggagacactgcctaactcgatcaaacgggaacttgaggagtgcgtccgggacgccagaaggttaaatctgtttgaaattaacacgattaagatgcgaatcaccagaactgagaatgaaattgagctcctgaagaaaaaaatcaccgatctaacaaaatacaatgaagctttaggcgagaagcaggaggagctggcgcggaaacacgcaaggttcgtgttgtctcttaatcagaccatggaaaagaaagccacaacaacggtgtacattaacgagacatacacaaaaattaacctcaaacgcgaagacatcgctttacagaagaagtgtatccaagaggccgaagagctgatggagaaggagagagctgagtacctcatcagaaaacaagaactgaccgctcaaatcaacgagtttgagaacacacgcgaagtgaagaggatggagacatatcagaagaaaaaggaattggataagctgcaaacaaagatgagtaagatcaaagaaactgtcactgtgtccgcagccgtgcttagtgatcataatctggagattgcccggctccacgaatcaatcaggtactgggaacaagaggtcagcgaactcaagaaggacttggccatcctggaagctaaattgtgctttttcaccgacaataaggagaagctggatgacatcagtaacgacgagaagaacgagtttcttaacaagattaagcagcttgtggagacactgcatgcagctcggatggagtataaggacctgagggagaaaatgaaaaccctggccagacagtataagatcgtgctgagcgaggaggagaaagcgttcctgcaaaagcagaagatccacgatgagaatcagaagcagttgacattcatcagccagaaagaatacttcctgtctcagaagcgtgtggatatcaaaaatatggaggagggacttattaccctccaggagctccaacaggccactaaaactgtataccagcagcagattaagattctgtccgcaaatctcgagagagaaagccaaagatgtgtaatcactcagtggaaaatggcctgtctcagaaagaagcatgcacgctggacagctaaaatcaaggccgagatccaagctattaccgaaaagatccagaatgcagaggtacgtcgtatcgaactgctcaacgaaacctccttccggcagcaggaaatttcaggctttgtggcccagattgagaagctgacaacggagctgaaggaggaggaaaaggcattcgtgaacaaagaaaagatgctaatgaaagagctgtcgaaatacgaagaaatcttcgtgaaggaaacccaaatcaataaagagaaagaggaagaactggtcgaatatctccctcaattgcaggtagcggagcaggaatataaggaaaagcgccgcaaattggaggagctgtctaatatcattacagcccagcggcaggaggaggatctcctcaacaatcacattttcctcttcaccagagatttttcccgatatatttctaatatggaagacgtcaaacaggagctacaacagctgagagatcaggaaagcaagaaaaacaaagatcactttgagaccctcaagaatctagaaaacgggttctacatcaacgatcaaaaggccgacttattactcttggaaaataagaagctgaaagagtacattctctatcttaagaataatatcgaaaagtatcgggagggacaagaagcactgatgcatacaagctcagatctgagtaggcagctgattgctcaggaggcccagtataaggatctgtgggccgaattccagaccaccgtgaagatcctggttgacaatggcgaagagaccctgcaggatattaataatctgacagataaactccgcgagagggacgaaaagatgcagcacgtgtcaacatggctccgcggtagcctggaaggtttaaggctcctggttgagcaggaatcaccgatggatctcctcagcaagcagcagttgagggctttactagttacgtctaaggaagagaaaacctgccaactgtcagacctggtgatccctaattacgccaccaatattcaactcaatatagacacatacttgggactcaacaccctggtggtactgtccaatagcgcattccacctgagagagttttcccgatag

SEQ ID NO: 62843 - DNA, 2382 bp, Artificial Sequence
  derived and/or modified sequence
atggccttgagcccctggacgcctgggttaggtgccggggagaagctggttcaagcagcagccgtctccacaggcccctcactcgagttgtgtactctcccatctaccttaggttcttcagtcgcggtggaagcattagagcagttgttcgtcgtggaacaatcgctgcagtctgactatttcaaatgcaatgaagaggctaagatcttcttaaaggatatcgctgttgccgttaaaaaattagaagaaatgagaaaggcgacaatcgacttgcttgaaatcgaatccatggaattgaacaagctgtattatctgctcgagaccctgcccaactccattaagcgagaactggaagagtgcgtgagagatgcgcgcagactcaacctcttcgaaatcaacaccatcaaaatgagaattacacgtaccgaaaatgaaatcgagttgctgaaaaagaagatcactgacctcacgaaatacaacgaggccctgggcgagaagcaggaagagctggcccgtaagcacgccagattcgtgttatcccttaaccaaacgatggagaagaaagccacaaccacagtatacattaatgagacgtacactaagattaacttgaagagggaggatatagcacttcagaagaagtgtattcaggaggccgaagagcttatggagaaggaaagggcagagtatcttattagaaagcaggaattgacagcccagataaatgagttcgagaatacaagagaggtcaagaggatggagacctaccagaaaaaaaaagagctcgacaaactgcagactaagatgtctaagatcaaggagactgtgaccgtgtcggccgcagtactgagcgaccacaacctggaaattgcacgacttcatgaatccattcgttattgggagcaggaagtgagcgaactcaaaaaggatttggccatccttgaggccaaattatgtttctttaccgataataaggagaagctggacgacattagtaacgatgagaagaatgagtttttgaataagattaaacagctggtggagactctacacgccgctcggatggagtacaaagatttgagagagaagatgaaaaccttggctcggcagtacaaaatcgtgctctctgaggaggaaaaggcattcctccaaaaacagaagattcacgacgaaaaccagaagcagctgaccttcatttcccagaaggagtacttcctcagtcagaagcgggtggacataaaaaatatggaggaaggcctcatcacactgcaggagctccaacaggctaccaagactgtgtatcaacaacaaattaagattttatctgctaatctggaacgagaatcacaacgttgcgtgatcactcagtggaaaatggcttgcttgcggaaaaaacatgcaaggtggacggccaagattaaggccgaaatacaggcaatcaccgagaagattcagaatgccgaggtgcggagaattgaactcttgaacgagacttctttcagacagcaggaaatctcagggttcgtagcccaaatcgagaaactgaccaccgaactgaaggaagaggaaaaggcatttgtcaacaaggagaaaatgttaatgaaggagctcagcaagtatgaggaaatcttcgtcaaggaaacacagatcaacaaggaaaaagaggaagagctggtggagtatctgccccaacttcaggtggctgagcaggagtacaaggaaaagagaaggaaattagaagagctctcaaacatcattaccgcccagagacaagaagaggatcttctgaacaatcacatattcctcttcacgcgagacttcagtaggtatatcagcaatatggaagacgttaagcaggagcttcagcagctccgtgaccaggagtccaagaagaataaggaccatttcgaaaccttgaagaatttagagaacggcttttatattaacgaccagaaagcagatcttcttttacttgagaataagaagctgaaggaatatattctatacctgaagaataacattgaaaagtatcgtgagggacaggaggccctaatgcacacatcgagcgacctttcgcgccagctgatagctcaggaagcacagtataaggacctttgggctgagttccaaaccacagtcaagattctcgtcgataacggcgaagagactctgcaggatatcaacaacctgaccgataagctgagggaacgtgatgaaaaaatgcagcatgtatccacttggctacgtggctctcttgaaggtctgcgtctgcttgttgaacaggagagtcccatggacctgttgaagaagaagaaacacataaggaccagagtacatttcccggttgtgaaatgtacagaaaaaaacacattaactaagtag

SEQ ID NO: 62844 - DNA, 2487 bp, Artificial Sequence
  derived and/or modified sequence
atggccctgagcccctggaccccaggcctgggcgctggggagaagctggtgcaggccgctgctgtgtccacaggccccagcctggagctgtgcaccctgcccagcaccctgggcagctctgtggccgtggaggccctggagcagctgtttgtggtggagcagagcctgcagagcgactacttcaagtgcaatgaggaggccaagatcttcctgaaggacattgctgtggccgtgaagaagctggaggagatgaggaaggccaccatcgacctgctggagattgagagcatggagctgaacaagctgtactacctgctggagaccctgcccaacagcatcaagcgggagctggaggagtgtgtgagagatgcccggcggctgaacctgtttgagatcaacaccatcaagatgaggatcaccaggacagaaaatgaaattgagctgctgaagaagaagatcacagacctgaccaagtacaatgaggccctgggggagaagcaggaggagctggccaggaagcacgccaggtttgtgctgagcctgaaccagaccatggagaagaaggccaccaccaccgtgtacatcaatgagacctacaccaagatcaacctgaagagagaagatattgccctgcagaagaagtgcatccaggaggccgaggagctgatggagaaggagcgggcagagtacctgatcaggaagcaggagctgacagcccagatcaatgaatttgagaacacccgggaggtgaagaggatggagacctaccagaagaagaaggagctggacaagctgcagaccaagatgagcaagatcaaggagaccgtgacagtgtctgctgctgtgctgagtgaccacaacctggagatcgcccggctgcacgagagcatccgctactgggagcaggaggtgtctgagctgaagaaggacctggccatcctggaggccaagctgtgcttcttcacagacaacaaggagaagctggatgacatcagcaatgatgagaagaatgagttcctgaacaagatcaagcagctggtggagaccctgcacgccgccaggatggagtacaaggacctgcgggagaagatgaagaccctggcccggcagtacaagatcgtgctgtctgaggaggagaaggccttcctgcagaagcagaagatccatgatgagaaccagaagcagctgaccttcatcagccagaaggagtacttcctgagccagaagagggtggacatcaagaacatggaggagggcctcatcaccctgcaggagctgcagcaggccaccaagacagtgtaccagcagcagatcaagatcctgagcgccaacctggagcgggagagccagcgctgcgtcatcacccagtggaagatggcctgcctgaggaagaagcacgcccgctggacagccaagatcaaggccgagatccaggccatcacagagaagatccagaatgctgaggtgcggcgcatcgagctgctgaatgagaccagcttccggcagcaggagatcagcggctttgtggcccagatcgagaagctgaccacagagctgaaggaggaggagaaggcctttgtgaacaaggagaagatgctgatgaaggagctgagcaaatatgaggagatctttgtgaaggagacccagatcaacaaggagaaggaggaggagctggtggagtacctgccccagctgcaggtggccgagcaggagtacaaggagaagaggaggaagctggaggagctgagcaacatcatcacagcccagaggcaggaggaggacctgctgaacaaccacatcttcctgttcacccgggacttcagccgctacatcagcaacatggaggatgtgaagcaggagctgcagcagctgcgggaccaggagagcaagaagaacaaggaccactttgagaccctgaagaacctggagaatggcttctacatcaatgaccagaaggctgacctgctgctgctggagaacaagaagctgaaggagtacatcctgtacctgaagaacaacatcgagaagtaccgggagggccaggaggccctgatgcacaccagcagtgacctgagccggcagctgattgcccaggaggcccagtacaaggacctgtgggccgagttccagaccaccgtgaagatcctggtggacaatggagaggagaccctgcaggacatcaacaacctgacagacaagctgcgggagagagatgagaagatgcagcacgtgtccacctggctgcggggcagcctggagggcctgcggctgctggtggagcaggagagccccatggacctgctgagcaagcagcagctgcgggccctgctggtgaccagcaaggaggagaagacctgccagctgagtgacctggtgatccccaactatgccaccaacatccagctgaacatcgacacctacctgggcctgaacaccctggtggtgctgagcaacagcgccttccacctgcgggagttcagcaggtag

SEQ ID NO: 62845 - DNA, 2382 bp, Artificial Sequence
  derived and/or modified sequence
atggccctgagcccctggaccccaggcctgggcgctggggagaagctggtgcaggccgctgctgtgtccacaggccccagcctggagctgtgcaccctgcccagcaccctgggcagctctgtggccgtggaggccctggagcagctgtttgtggtggagcagagcctgcagagcgactacttcaagtgcaatgaggaggccaagatcttcctgaaggacattgctgtggccgtgaagaagctggaggagatgaggaaggccaccatcgacctgctggagattgagagcatggagctgaacaagctgtactacctgctggagaccctgcccaacagcatcaagcgggagctggaggagtgtgtgagagatgcccggcggctgaacctgtttgagatcaacaccatcaagatgaggatcaccaggacagaaaatgaaattgagctgctgaagaagaagatcacagacctgaccaagtacaatgaggccctgggggagaagcaggaggagctggccaggaagcacgccaggtttgtgctgagcctgaaccagaccatggagaagaaggccaccaccaccgtgtacatcaatgagacctacaccaagatcaacctgaagagagaagatattgccctgcagaagaagtgcatccaggaggccgaggagctgatggagaaggagcgggcagagtacctgatcaggaagcaggagctgacagcccagatcaatgaatttgagaacacccgggaggtgaagaggatggagacctaccagaagaagaaggagctggacaagctgcagaccaagatgagcaagatcaaggagaccgtgacagtgtctgctgctgtgctgagtgaccacaacctggagatcgcccggctgcacgagagcatccgctactgggagcaggaggtgtctgagctgaagaaggacctggccatcctggaggccaagctgtgcttcttcacagacaacaaggagaagctggatgacatcagcaatgatgagaagaatgagttcctgaacaagatcaagcagctggtggagaccctgcacgccgccaggatggagtacaaggacctgcgggagaagatgaagaccctggcccggcagtacaagatcgtgctgtctgaggaggagaaggccttcctgcagaagcagaagatccatgatgagaaccagaagcagctgaccttcatcagccagaaggagtacttcctgagccagaagagggtggacatcaagaacatggaggagggcctcatcaccctgcaggagctgcagcaggccaccaagacagtgtaccagcagcagatcaagatcctgagcgccaacctggagcgggagagccagcgctgcgtcatcacccagtggaagatggcctgcctgaggaagaagcacgcccgctggacagccaagatcaaggccgagatccaggccatcacagagaagatccagaatgctgaggtgcggcgcatcgagctgctgaatgagaccagcttccggcagcaggagatcagcggctttgtggcccagatcgagaagctgaccacagagctgaaggaggaggagaaggcctttgtgaacaaggagaagatgctgatgaaggagctgagcaaatatgaggagatctttgtgaaggagacccagatcaacaaggagaaggaggaggagctggtggagtacctgccccagctgcaggtggccgagcaggagtacaaggagaagaggaggaagctggaggagctgagcaacatcatcacagcccagaggcaggaggaggacctgctgaacaaccacatcttcctgttcacccgggacttcagccgctacatcagcaacatggaggatgtgaagcaggagctgcagcagctgcgggaccaggagagcaagaagaacaaggaccactttgagaccctgaagaacctggagaatggcttctacatcaatgaccagaaggctgacctgctgctgctggagaacaagaagctgaaggagtacatcctgtacctgaagaacaacatcgagaagtaccgggagggccaggaggccctgatgcacaccagcagtgacctgagccggcagctgattgcccaggaggcccagtacaaggacctgtgggccgagttccagaccaccgtgaagatcctggtggacaatggagaggagaccctgcaggacatcaacaacctgacagacaagctgcgggagagagatgagaagatgcagcacgtgtccacctggctgcggggcagcctggagggcctgcggctgctggtggagcaggagagccccatggacctgctgaagaagaagaagcacatccgcaccagggtgcacttccctgtggtgaagtgcacagagaagaacaccctgaccaagtag

SEQ ID NO: 62846 - DNA, 2487 bp, Artificial Sequence
  derived and/or modified sequence
atggccctgagcccctggacccccggcctgggcgccggcgagaagctcgtgcaggcagctgcagtatctactggacccagcctggaactctgcaccttgccatctacactagggtcttctgttgcggtggaagcccttgagcagttgtttgtggtcgaacagtccctccagtctgattattttaaatgtaacgaagaagctaaaatattcctgaaggacatcgccgtggcagttaagaaattggaggaaatgagaaaggctaccatcgacctgcttgaaattgagagcatggaattaaacaaactctactatttattggaaaccctccccaattccatcaaacgagagcttgaggagtgcgtccgggatgcccggaggttgaatctgttcgagattaatactatcaagatgcggattacaagaaccgaaaacgaaatcgaactactaaaaaagaaaattactgacctaacaaaatacaatgaagctctgggggagaagcaagaggagttggctaggaagcacgcgcgttttgtgctgtcactgaaccagacaatggaaaagaaagccaccacaaccgtctacatcaacgagacctatacaaagattaatctgaaacgagaagatatcgccctccagaaaaagtgcatccaggaggctgaagaattaatggagaaggagagagccgagtacctcattagaaagcaggagctcaccgcccagattaacgaattcgagaatacacgcgaggtaaagcggatggaaacctatcagaaaaaaaaagagctcgacaagctgcaaactaaaatgagcaaaattaaagaaacggtcaccgtttccgccgctgtgctcagcgatcataacctcgaaattgctcggttacatgagtcaatcagatattgggaacaggaggttagtgaattaaaaaaagacttggccatcctggaagctaagctgtgttttttcaccgataacaaagaaaaacttgatgacatcagcaatgatgagaaaaacgagttcttgaacaagattaagcagttggttgagacactgcacgcagcacgtatggagtataaagatctccgggagaaaatgaaaactcttgctaggcagtataagattgtactgagcgaggaagagaaggcttttctgcagaagcagaaaattcatgacgagaaccagaaacagcttaccttcatctcccaaaaagaatactttctgtctcagaaaagagtagatatcaaaaacatggaagaaggcctgatcaccctccaggagttacagcaggccaccaagaccgtgtaccagcaacaaatcaagattttaagtgccaaccttgagcgggaatctcagcgctgtgtcattactcagtggaaaatggcctgtctgcggaagaaacacgcccggtggacagccaaaattaaggcagaaattcaagcaattactgaaaagattcagaatgctgaggtgagacggattgagctgctcaacgagacctcatttaggcagcaggagatttccggctttgtagcacaaatagaaaaactaactaccgaactgaaggaagaagaaaaggcattcgtgaataaagagaagatgctcatgaaggaactgagcaagtacgaagaaatcttcgtaaaagaaactcaaatcaacaaagagaaagaggaggaactggttgagtacctgccccagctacaggtggccgagcaggaatacaaggagaaaaggagaaaacttgaagaactttccaacataataacagcacagaggcaggaggaggatttacttaacaatcacatctttttgtttaccagggatttctcacggtatatttctaatatggaagatgtaaagcaagagctccagcagcttagggaccaggaatccaaaaagaataaagaccattttgagaccttgaagaatctggagaatggattctacattaatgaccaaaaggctgatctgctgctgctggagaataagaagctgaaggagtatattctgtatctcaaaaacaacatcgaaaaatatagggaaggtcaggaagcactcatgcacacaagctcagacctctccaggcagctgattgcacaagaagcgcagtataaagacttatgggcagaatttcaaaccaccgttaaaattctggtggataatggagaggagactttacaggacatcaataatttgaccgataaactcagggagcgcgatgaaaaaatgcaacacgttagtacctggttgcgcggatctctcgaggggctgcgtctgctcgttgaacaagagagccctatggatcttttgtcaaagcaacagcttagggcccttctggtgacatcgaaggaggaaaagacctgccagctgagcgatcttgtaatccctaactacgctacaaatattcagttgaacatcgatacgtaccttggactcaatacacttgtggtcttatctaactcagctttccacttacgggaattctctcgttag

SEQ ID NO: 62847 - DNA, 2382 bp, Artificial Sequence
  derived and/or modified sequence
atggccctgagcccctggacccccggcctgggcgccggcgagaagctcgtccaggcggccgcagttagtacggggccaagtttagaactctgtactctgcctagcacacttggctcatctgtggctgtagaagcattggaacaactgttcgtggtggagcagagtctgcagtcagattattttaaatgcaatgaagaagccaagatctttctaaaagacattgcagtcgcagtcaaaaagctcgaggagatgcggaaggccaccattgacctgctcgaaatcgaaagtatggagctgaacaagctgtactacttgctggagaccctgccaaacagtataaaacgcgagctggaagaatgtgtgagagacgcgcggagactcaacttgtttgaaattaatacgattaaaatgagaattactcgcacggaaaatgagatcgagctgctgaaaaaaaagatcaccgacctgaccaagtataacgaagcccttggtgaaaagcaggaggagttggcccgaaagcacgcacgctttgtgctttctctcaatcagacgatggaaaaaaaagctacaaccacggtatacatcaacgagacctataccaagatcaatctgaaacgggaagacattgccctgcagaagaagtgtatacaagaagctgaggagctcatggaaaaggaaagagcagaatatcttatccggaagcaggaactgactgcacaaatcaatgagtttgaaaatacacgcgaggttaaacgcatggagacttatcagaagaaaaaagaactagataagctccagactaagatgtcaaagatcaaggaaaccgtaacagtgagcgccgctgtgctcagtgatcacaacctcgagattgcacggttgcatgagagtatccgatattgggagcaggaggtctcagagctgaaaaaagaccttgctattctggaagccaagctctgttttttcaccgacaataaagagaaacttgatgacatttctaacgatgagaaaaatgagtttttgaacaaaattaagcagctggttgagaccctgcacgcagcaagaatggagtataaagacctccgcgagaagatgaaaaccctggccaggcagtacaaaatagtcctgagcgaggaagagaaggccttccttcagaagcagaagatccacgatgagaatcagaagcagctcacatttattagccagaaagaatactttttatcccagaaaagagtcgacattaagaatatggaggagggtctgattacgcttcaggagctgcaacaggcaacaaagacagtatatcagcagcaaatcaagattctctcggcgaatctcgagagggaatctcagagatgcgtgattacccagtggaaaatggcatgtctcaggaagaaacatgctcgttggaccgccaagatcaaggccgagattcaggctataacagagaagattcaaaatgctgaggtgcggcggatcgaactgctgaatgaaacatcgtttaggcagcaagagataagcggcttcgtcgcccagatcgaaaagctgactacggagctgaaggaagaggaaaaagcgtttgtcaacaaggagaaaatgcttatgaaggagttgagcaagtacgaggaaatctttgtgaaggagactcaaatcaataaggagaaggaggaggagctagttgagtatctgccccagctgcaggtggcagagcaagagtacaaagagaagagacggaagctagaagagctcagtaatatcatcactgcacagaggcaggaggaagacctcttgaataatcatatttttctgttcacaagggatttttctagatacatcagcaacatggaggacgtgaagcaggagctgcaacagttacgagaccaagagagcaagaaaaataaagatcattttgaaaccctgaaaaatttagagaacggattttatattaacgaccaaaaggctgatctgctgctgctcgaaaacaagaaattgaaagagtacatcctgtatctaaaaaacaatattgagaagtatagagaaggccaggaagctctaatgcataccagctctgacctttctaggcagttgatcgcacaggaagctcaatataaagacctatgggccgagttccagactacagtaaagattttggtggataatggggaggaaacactgcaggatatcaacaatctgactgataaactgcgggagagggacgagaagatgcagcatgtctccacttggttgagaggatcacttgaaggactgcggttgcttgttgaacaggagagccccatggatctgctaaaaaaaaagaagcacatacgtacacgcgtgcactttcctgtagtcaaatgtaccgagaagaacactctaactaagtag

SEQ ID NO: 62848 - DNA, 2487 bp, Artificial Sequence
  derived and/or modified sequence
atggcactcagcccatggaccccaggcttgggggcaggggagaaactcgtccaggccgcagccgtgtctacaggaccctctcttgagttgtgtaccctccccagtacacttggatcatccgtagctgtagaggccttagagcagctcttcgtggttgagcagtcgctgcagtctgactattttaagtgtaatgaagaagctaagatcttcctcaaagatatcgcagtcgcagtgaaaaaattggaggagatgcgaaaggccacaattgaccttctcgagattgaaagcatggagctgaataagctctattacctgctggagactctgcctaactcgattaagcgcgagctagaggaatgcgtgcgggacgcaagacgcttaaatctgttcgagatcaacacgatcaagatgcggatcactagaactgaaaatgaaattgagctgttgaagaagaaaatcacagatctgacaaagtacaatgaagccttaggagaaaaacaggaagagctagcccgaaaacacgcgcgatttgtgctgagcctgaaccagaccatggaaaagaaggccactactacagtgtatattaacgaaacctacacaaagatcaaccttaaaagggaagacatagccttgcaaaagaaatgtatacaggaggccgaggagttgatggaaaaagagagggccgaatacctgattaggaaacaggaactgactgcccaaattaatgagttcgaaaataccagagaggtcaagcggatggaaacataccagaagaagaaggaactggataaattgcagactaagatgtctaaaatcaaggagaccgttacggtttcagcagccgtgctttccgaccacaatctggagattgccaggctgcacgagtccattaggtactgggaacaggaggtgagcgagctgaagaaggatctggcgatcctggaggctaaactgtgcttctttaccgataacaaagaaaaactggatgatatttctaacgatgaaaagaatgaatttctgaataagattaagcagctggtggagactctgcacgccgcacggatggaatacaaagatctgcgagagaaaatgaagactctggccagacagtacaagatcgttcttagtgaagaagagaaggccttcctacagaagcagaaaatccatgacgaaaatcagaagcagctcaccttcattagtcaaaaggaatacttcttatcccagaagagagtggacatcaagaacatggaggaaggacttataaccctgcaggaattgcagcaggcaaccaagactgtctatcagcaacagattaaaatcctttccgctaatttagagcgagaatctcaaaggtgcgtgatcactcagtggaaaatggcttgtctgaggaaaaagcacgcccgatggaccgcaaagattaaggcggaaattcaggcgataacagagaaaatccagaacgccgaggtgagaagaatcgaattgttgaatgagacatctttccgacagcaagagatctccggtttcgtggcgcagatcgagaaactaaccactgaactaaaagaagaagaaaaagctttcgtgaataaggagaaaatgctgatgaaagagctctcaaaatatgaagagatctttgtaaaagagacacagatcaataaggagaaggaagaagagctggtagaatatcttccccaactgcaggttgctgagcaggagtacaaagaaaagcggcgtaaactggaggaactaagtaacattattaccgctcagaggcaagaagaagaccttctaaataatcacatttttctgttcaccagagacttctcacgctatatatcaaatatggaggatgtcaaacaggagctgcaacagctgcgggaccaagagtccaagaagaacaaagatcatttcgagacattgaaaaacctggagaatggattctatatcaacgatcagaaggctgatctcttactgttagaaaacaagaaactcaaggagtacatcctgtacctcaagaacaacatcgagaagtatcgggagggacaggaggctcttatgcatacaagctccgatctgtctagacagctgattgcacaggaggctcaatataaagatctgtgggccgagttccagaccaccgtcaagatattggtcgataacggtgaggagaccttgcaggacatcaataatcttacagacaaactgcgggagcgtgatgaaaagatgcagcatgtcagcacctggctgcggggatctctggaaggtctgaggcttttggtggaacaggaaagccctatggatctgcttagcaaacaacaactgcgcgctctcctggtcacttcaaaagaagagaaaacctgtcagctgagcgaccttgtgattccaaattacgccaccaacattcagttaaatatcgacacatatctggggctgaatacacttgtggtgctatccaatagcgcttttcacctgagggagttctcccgttag

SEQ ID NO: 62849 - DNA, 2382 bp, Artificial Sequence
  derived and/or modified sequence
atggccctgtccccatggaccccaggattgggcgctggggagaaactcgttcaggccgctgcagtgtctactgggccaagtctcgagctctgtacgctgccatctaccttaggatcatccgttgccgtcgaggcgttggaacaactgtttgtggttgaacagtcgctgcagagcgattacttcaaatgcaacgaagaggccaagattttcctcaaggatattgcagttgccgtgaagaagcttgaagagatgagaaaagccaccatcgaccttcttgagatcgagagcatggagttaaataagttgtactatctcttggaaaccttacctaattcaatcaagagagagttggaggagtgcgtgcgggatgccagacgactgaatcttttcgagatcaacaccatcaagatgcggatcactaggacagagaacgaaattgagctgctgaaaaagaaaataaccgatctcactaagtacaacgaagctctcggtgagaaacaggaagaactggcgagaaagcacgctcgctttgttctatcattgaaccaaacgatggagaaaaaggcaactacgacagtttacattaatgagacgtatacaaagattaacttgaagagggaggacatcgctttgcagaagaaatgcatacaggaggccgaggaactcatggaaaaggaacgcgcagagtacttaatccggaagcaggaattaactgcacagatcaatgaatttgagaatacccgtgaagtcaaacgcatggagacttaccaaaaaaagaaagagttagacaaactccagacgaaaatgtcaaagatcaaggagactgtgacagtgagcgccgctgtcctgtcggaccacaacctagagattgccagactgcatgagtctattagatactgggagcaggaagtgagcgagctaaaaaaagatctggccatcctggaagccaaactgtgttttttcacagataacaaagagaagctggacgacatttccaacgacgagaagaacgagtttttaaataagattaaacaattagtagagactctacacgccgctaggatggagtacaaagatctgagagagaaaatgaagacgctggcaagacagtataaaattgtcctcagtgaggaagaaaaagccttcctgcagaaacagaagatacacgatgagaatcagaaacaactgacattcatctctcagaaggagtatttcctgtcacaaaagcgtgttgacatcaagaatatggaggaaggcctgatcactctccaagagttacagcaggctactaaaaccgtgtaccagcaacagatcaaaatcctaagcgccaacttggagcgggagtcacagaggtgcgtgattactcaatggaagatggcatgtctcagaaaaaagcacgctagatggacagcaaagattaaggctgagatccaggcgatcaccgaaaaaattcaaaatgccgaggtccgaaggattgagttgctaaatgaaacaagcttcagacaacaggagatatcagggtttgtcgctcagatcgagaagctgacgactgagcttaaggaggaggagaaagcttttgtgaacaaagagaaaatgctgatgaaagagttgagtaagtacgaggaaatttttgtcaaggagactcagattaataaagaaaaggaagaggaactggttgaatacctgccacaactgcaggtggccgagcaagagtacaaggaaaaacggcgtaagctggaagaactgtcaaatattataactgcacagcggcaggaggaggacctgctcaacaatcatattttccttttcacccgcgatttctcaaggtacatctcaaatatggaggacgtcaaacaggagttgcagcaactgcgtgaccaggagtcaaaaaaaaataaggatcacttcgaaaccctcaagaatctcgagaacggcttctatatcaatgatcagaaggctgacctactcctcctggagaacaaaaaattaaaagaatacattctttaccttaagaataacatcgaaaaatatcgggagggtcaggaggccctgatgcacacgtcttcagacctttcccggcaactgattgcccaggaggcccagtacaaggatctttgggcggagtttcagaccacagtaaaaatcttagtggacaacggggaagaaacgttgcaagacatcaataatctgacagacaaactgcgggaacgggacgagaaaatgcagcacgtgtccacttggctcaggggctctttagaagggctacggctgctcgtggagcaagagagtcctatggacctactgaaaaaaaaaaagcacataagaaccagggtgcacttcccagtagtgaaatgtacggagaagaatacactgacgaaatag

SEQ ID NO: 62850 - protein, 235 aa, Artificial Sequence
  derived and/or modified sequence
MLRGAPGLGLTARKGAEDSAEDLGGPCPEPGGDSGVLGANGASCSRGEAEEPAGRRRARPVRSKARRMAANVRERKRILDYNEAFNALRRALRHDLGGKRLSKIATLRRAIHRIAALSLVLRASPAPRGPCGHLECHGPAARGDTGDTGASPPPPAGPSLARPDAARPSVPSAPRCASCPPHAPLARPSAVAEGPGLAQASGGSWRRCPGASSAGPPPWPRGYLRSAPGMGHPRS

SEQ ID NO: 62851 - DNA, 663 bp, Artificial Sequence
  derived and/or modified sequence
atgtggcacggcaaccacgtgcagcccggggccacccaccggcccaaccagggcctggagatgctgcagggcctgggcatcggcatcctgaccatcagcatcgtggtgggcctgatgatcctgcagatgtgcatcgccgccagcttcttcctgcagcccaagctgggcacagctgacaagcagaagcccctggccctgaacaacaggaaggccttccacaacttcaactacttcctgttcttctacaacgtgctgctgggcctgggcgcctgcctgagccggctgctgatcagctgcctgctgggcatgtggctgattgccagaattgacaggaccatcatgcagagcggctatgagggcgctgacatgggcttcagcgcctggattggcatgctgtacatggaccactaccacatcaaccctgtgctggtgtccttctgccacatcctgatcaccaaccaccgggagaagaagctgcagcagagcaccaagtactggtgcctgaaccagagcgctggcccccacgtgtctgcccggagcaggacccgctggttcctgctgcagaccctgattgacaacccccggctgaccatgcacaggaagctgaagctgggccacagcagccaggagagccagatcctgatggcctgcagcgagagctag

SEQ ID NO: 62852 - DNA, 708 bp, Artificial Sequence
  derived and/or modified sequence
atgctgagaggtgctcccggcttggggctaaccgcgaggaagggcgctgaggatagcgccgaggatttgggcgggccttgccccgagcctggaggggattctggcgtgcttggagctaacggagccagttgtagtagaggagaagccgaggaacctgctgggagacgtcgggcaaggcccgtcagatcaaaggctcgtcgaatggcagctaatgtgagggaacgcaaacgcatcctggactacaacgaagcattcaacgccctccgtcgggcattgagacacgatttgggaggtaaaagactgtccaaaatcgctacactaaggagagcaatccaccgtatcgccgccttgagcctggtactgcgcgcatcgccggctccccgtggcccttgtggtcaccttgaatgccacggtccagccgccaggggagatacaggagacacaggcgctagccctccaccacccgcaggaccaagtctggcaaggcctgacgccgctcggcccagtgtgccttctgcaccacggtgtgctagttgtccacctcatgctcccctggcaaggccttctgcggtggcagagggaccagggctggcacaggcttctggtggctcctggcgcaggtgtccaggggcctcctctgcaggtcctccaccatggcccaggggatatctgcgctcggctcccggaatgggacacccccgaagctag

SEQ ID NO: 62853 - DNA, 708 bp, Artificial Sequence
  derived and/or modified sequence
atgctgcggggggcccctggcctgggcctgacagccaggaaaggagcagaagattctgctgaggacctgggcggcccctgcccagagcccggcggggacagcggcgtgctgggcgccaacggggccagctgcagcagaggagaggccgaggagcctgctggaagaagaagagcccggcctgtgcgcagcaaggcccggaggatggccgccaacgtgcgggagaggaagaggatcctggactacaatgaggccttcaatgccctgcggcgggccctgcggcatgacctgggcggcaagaggctgagcaagatcgccaccctgcggcgggccatccacagaattgctgccctgagcctggtgctgcgggccagccctgccccccggggcccctgtggccacctggagtgccacggccctgctgcccggggggacacaggagacaccggggccagccccccacctcctgctggccccagcctggcccggccagatgctgcccggcccagcgtgcccagcgccccccgctgtgccagctgccccccccacgcccccctggcccggcccagcgctgtggccgagggccctggcctggcccaggccagcggcggctcctggaggcgctgccctggggccagcagcgctggccccccaccctggccccggggctacctgcggagcgcccctggcatgggccaccccaggagctag

SEQ ID NO: 62854 - DNA, 708 bp, Artificial Sequence
  derived and/or modified sequence
atgctgcggggcgcccccggcctgggcctgaccgcccggaagggcgccgaggattctgctgaagacctgggcggtccatgtcccgagcccggcggagacagtggggttttaggtgccaacggagccagttgttcacgcggagaggcggaggagcctgcaggaagacggagggcccggccggtgaggtccaaggcacgccggatggcggcgaatgtgagggagcgcaaaaggatcctcgattataatgaggcctttaatgctttaagacgcgcactgcgccacgacctggggggaaaacggttgagtaagattgctacactacgtagagccatccaccgaattgctgccttaagcctggtgttgcgcgcctctccagcacccaggggaccatgtggacatctggagtgccacggccccgctgccagaggggacacaggggatactggagcgagcccacccccaccagctggcccatccctcgcccgccctgacgctgcccgtcctagtgtgccttccgccccacgttgcgccagttgcccccctcacgccccccttgctcgcccctccgctgtggctgagggccccggcctggctcaggcctcaggcggaagctggcgtcggtgccccggagcaagttccgccggtccgcctccgtggcccagggggtacctgcgttctgcccctggcatgggacacccccgttcatag

SEQ ID NO: 62855 - DNA, 708 bp, Artificial Sequence
  derived and/or modified sequence
atgctaagaggtgcgcctggccttggactgactgctcgaaaaggggctgaagattctgcagaagatctcgggggaccctgccctgagccgggaggcgacagcggcgtgttaggagccaacggagcctcctgttcccgtggcgaagccgaggaaccagcaggccgacggagggcgagaccagtgcggagcaaggcccgtcggatggcggcaaatgtgagagaacgcaagcggattttggactacaatgaggccttcaatgctcttcgcagggcccttcgacacgacctcggaggaaaacgcctttctaagatagctactctgcggcgagctatccaccgaattgccgctctctctttagtgctccgggcatcacctgcgccaagaggaccctgtggacatctcgagtgtcacgggccagccgctcgaggagacaccggcgacaccggcgcatcccctcctcctcctgctggccctagcctggcacggcctgacgccgctaggccgagtgtgccttctgccccaagatgcgccagctgtccgccacatgccccactggcaagaccctccgctgttgccgagggacctggtctagcgcaagcttccggtggctcttggagacgctgcccaggggcatccagtgcgggtccacctccatggcctcgagggtacctgaggtcagctcccggtatggggcatcctagatcgtag

SEQ ID NO: 62856 - DNA, 902 bp, Artificial Sequence
  derived and/or modified sequence
aggccatgctgcggggcgcgccaggactaggcctcacggcgcggaagggggccgaggactctgcggaggacttggggggcccctgccccgagcccgggggcgattcgggggtgctgggggcgaacggcgcttcctgcagccggggcgaggcggaggagccggcgggcaggaggcgcgcgcggccggtgcggtccaaggcgcggcgcatggccgccaacgtgcgggagcgcaagcgcatcctagactacaacgaggccttcaacgcgctgcgccgggcgctgcggcacgacctgggcggcaagaggctctccaagatcgccacgctgcgcagggccatccaccgcatcgccgcgctctccctggtcctgcgcgccagccccgcgccccgcgggccctgcggacacctggagtgccacggcccggccgcgcgcggggacaccggggacacaggcgccagccccccgccgcctgcagggcccagcctcgcgcgcccagacgccgcccgcccctcggtgccgtccgcgccccgctgcgcctcgtgccccccgcacgcgcccctggcacggcccagtgcggtggccgaggggccgggcctagcacaggcctccgggggaagctggcgccgctgtccgggggcttcctctgccgggccgcctccctggccgcggggctacctgcgatccgcccccgggatgggccatccgcgctcctgaccggcctcgaggcaccggctgggctgcagggaggccgggctggcagctggactataaaacccgggactgcaaaggcgtcttggacagagcagaactggaccggctgagacctggcgtggaagagaaggagctcgccagagagaaggagctccgggacccggggttgcgcccccacatcccagcctgggg

SEQ ID NO: 62857 - DNA, 708 bp, Artificial Sequence
  derived and/or modified sequence
atgctgagaggcgcccccggcctgggcctgaccgccagaaagggcgccgaggacagcgccgaggacctgggcggcccctgccccgagcccggcggcgacagcggcgtgctgggcgccaacggcgccagctgcagcagaggcgaggccgaggagcccgccggcagaagaagagccagacccgtgagaagcaaggccagaagaatggccgccaacgtgagagagagaaagagaatcctggactacaacgaggccttcaacgccctgagaagagccctgagacacgacctgggcggcaagagactgagcaagatcgccaccctgagaagagccatccacagaatcgccgccctgagcctggtgctgagagccagccccgcccccagaggcccctgcggccacctggagtgccacggccccgccgccagaggcgacaccggcgacaccggcgccagcccccccccccccgccggccccagcctggccagacccgacgccgccagacccagcgtgcccagcgcccccagatgcgccagctgccccccccacgcccccctggccagacccagcgccgtggccgagggccccggcctggcccaggccagcggcggcagctggagaagatgccccggcgccagcagcgccggcccccccccctggcccagaggctacctgagaagcgcccccggcatgggccaccccagaagctag

SEQ ID NO: 62858 - protein, 260 aa, Artificial Sequence
  derived and/or modified sequence
MQKYEKLEKIGEGTYGTVFKAKNRETHEIVALKRVRLDDDDEGVPSSALREICLLKELKHKNIVRLHDVLHSDKKLTLVFEFCDQDLKKYFDSCNGDLDPEIVKNGELKLADFGLARAFGIPVRCYSAEVVTLWYRPPDVLFGAKLYSTSIDMWSAGCIFAELANAGRPLFPGNDVDDQLKRIFRLLGTPTEEQWPSMTKLPDYKPYPMYPATTSLVNVVPKLNATGRDLLQNLLKCNPVQRISAEEALQHPYFSDFCPP

SEQ ID NO: 62859 - DNA, 783 bp, Artificial Sequence
  derived and/or modified sequence
atgcaaaagtacgaaaaactggagaagattggggaaggcacgtacgggactgtctttaaggccaaaaaccgagaaactcatgagattgtcgcattaaagcgggttcgccttgatgacgacgatgagggggtgccttccagcgcgcttcgggagatttgtctgctcaaagagttaaagcataagaatatcgtgagactgcacgatgtgcttcattccgataagaagctcacactggttttcgagttctgtgatcaggacctcaaaaaatactttgactcttgcaatggcgacctggacccggaaatcgtgaagaatggcgagctgaaactggccgattttgggctggcaagagcctttggcataccagtgcgatgttatagtgcggaagtagtcactctctggtacagaccgccagatgtgcttttcggcgccaaattatattccaccagcattgacatgtggagtgctggctgcatctttgccgagctggcaaatgcggggagacctcttttcccagggaatgatgttgatgaccagctcaagagaattttcaggcttctggggacacccaccgaagagcaatggccatctatgactaagctgcctgattataagccttaccccatgtacccagcaacaacctctctggtgaacgttgtgccaaagctgaatgccactggaagggatctgctgcagaatctcctgaagtgtaaccctgtgcagcgcatctccgctgaagaagccctccaacacccctatttttctgacttctgccccccctag

SEQ ID NO: 62860 - DNA, 783 bp, Artificial Sequence
  derived and/or modified sequence
atgcagaagtatgagaagctggagaagatcggggagggcacctatggaacagtgttcaaggccaagaaccgggagacccatgaaattgtggccctgaagagggtgcggctggatgatgatgatgaaggagtgcccagcagcgccctgcgggagatctgcctgctgaaggagctgaagcacaagaacatcgtgcggctgcatgatgtgctgcacagcgacaagaagctgaccctggtgtttgagttctgtgaccaggacctgaagaagtactttgacagctgcaatggagacctggaccctgagatcgtgaagaatggagagctgaagctggccgactttggcctggcccgggccttcggcatccctgtgcgctgctacagcgctgaggtggtgaccctgtggtacagacctccagatgtgctgtttggagccaagctgtacagcaccagcattgacatgtggagcgctggctgcatctttgctgagctggccaatgccggccggcccctcttccctggaaatgatgtggatgaccagctgaagaggatcttccggctgctgggcacccccacagaggagcagtggcccagcatgaccaagctgcctgactacaagccctaccccatgtacccagccaccaccagcctggtgaatgtggtgcccaagctgaatgccaccggccgggacctgctgcagaacctgctgaagtgcaaccctgtgcagaggatctctgctgaggaggccctgcagcacccctacttcagtgacttctgccccccatag

SEQ ID NO: 62861 - DNA, 783 bp, Artificial Sequence
  derived and/or modified sequence
atgcagaagtacgagaagctggagaagatcggcgagggcacctacggtacagtgtttaaagcgaagaatagggagacgcatgagatcgttgctctaaaaagagtgcgcctggacgacgatgacgagggcgtcccaagctcggcccttcgtgagatttgtctgctgaaagaactcaaacataagaacattgtgcgcctgcacgatgtcctgcattcagataagaagttaacactggtctttgagttttgtgaccaagacctgaaaaaatactttgattcctgcaatggagacctggacccagaaattgttaagaacggggaactgaaactagccgatttcggcttagctcgcgcctttggcatcccagtgcgctgttactcagctgaagtcgtcacactgtggtatcggcctccagatgtgttgttcggtgctaaactgtactctacctcaatagatatgtggagcgcgggatgcatatttgcagagctggcaaacgccgggcgtcccctgtttcccggcaatgacgtagatgatcagctgaaacggatctttcgactcttaggcactcccacggaggagcagtggccatctatgaccaagctgccagactataagccttacccaatgtatcccgctaccacgagcctagtcaatgtcgttcctaaactcaatgctaccggccgcgatctgctgcagaacctgctgaagtgtaacccggtccagaggatcagcgccgaagaggccttgcagcatccctacttctccgacttctgtcccccttag

SEQ ID NO: 62862 - DNA, 783 bp, Artificial Sequence
  derived and/or modified sequence
atgcagaaatatgaaaaactcgagaagatcggcgaggggacttatggaacggtgttcaaagctaaaaaccgagagactcacgaaatcgttgcgctcaaacgcgtgcgactcgacgatgacgacgaaggcgttccttcatccgcgttaagagaaatctgtctgcttaaagagttgaagcataagaacattgttagactccacgacgtcctccattctgataagaagctgactttggtgttcgagttttgcgaccaggatcttaaaaaatattttgatagttgcaacggagatctcgaccctgagatagttaagaatggcgagctgaagttagctgactttggattggccagggccttcggcatccccgtgagatgctattctgcggaggtcgtgaccctgtggtatagaccacctgacgtgctgttcggcgcaaaactctattctacatcaatcgatatgtggagtgccggttgcatatttgccgaactcgctaatgcaggcaggccccttttccccggtaacgatgttgacgatcagctgaaacgaatttttcgcctgctaggaacacccacagaagaacaatggccttctatgactaaactgcccgattacaaaccctaccctatgtatcccgctacaaccagcttggttaacgtcgtcccaaaacttaatgcaaccgggcgtgaccttctgcagaatctgctgaaatgtaatcccgttcagcggatctcagctgaagaagccctacagcatccgtacttcagtgacttctgtcctccctag

SEQ ID NO: 62863 - DNA, 783 bp, Artificial Sequence
  derived and/or modified sequence
atgcagaaatacgagaaactggaaaagattggggaaggcacctacggaactgtgttcaaggccaaaaaccgggagactcatgagatcgtggctctgaaacgggtgaggctggatgacgatgatgagggtgtgccgagttccgccctccgggagatctgcctactcaaggagctgaagcacaagaacatcgtcaggcttcatgacgtcctgcacagcgacaagaagctgactttggtttttgaattctgtgaccaggacctgaagaagtattttgacagttgcaatggtgacctcgatcctgagattgtaaagaatggggagctgaaattggctgattttggcctggctcgagcctttgggattcccgtccgctgttactcagctgaggtggtcacactgtggtaccgcccaccggatgtcctctttggggccaagctgtactccacgtccatcgacatgtggtcagccggctgcatctttgcagagctggccaatgctgggcggcctctttttcccggcaatgatgtcgatgaccagttgaagaggatcttccgactgctggggacgcccaccgaggagcagtggccctctatgaccaagctgccagactataagccctatccgatgtacccggccacaacatccctggtgaacgtcgtgcccaaactcaatgccacagggagggatctgctgcagaaccttctgaagtgtaaccctgtccagcgtatctcagcagaagaggccctgcagcacccctacttctccgacttctgtccgccctag

SEQ ID NO: 62864 - DNA, 783 bp, Artificial Sequence
  derived and/or modified sequence
atgcagaagtacgagaagctggagaagatcggcgagggcacctacggcaccgtgttcaaggccaagaacagagagacccacgagatcgtggccctgaagagagtgagactggacgacgacgacgagggcgtgcccagcagcgccctgagagagatctgcctgctgaaggagctgaagcacaagaacatcgtgagactgcacgacgtgctgcacagcgacaagaagctgaccctggtgttcgagttctgcgaccaggacctgaagaagtacttcgacagctgcaacggcgacctggaccccgagatcgtgaagaacggcgagctgaagctggccgacttcggcctggccagagccttcggcatccccgtgagatgctacagcgccgaggtggtgaccctgtggtacagaccccccgacgtgctgttcggcgccaagctgtacagcaccagcatcgacatgtggagcgccggctgcatcttcgccgagctggccaacgccggcagacccctgttccccggcaacgacgtggacgaccagctgaagagaatcttcagactgctgggcacccccaccgaggagcagtggcccagcatgaccaagctgcccgactacaagccctaccccatgtaccccgccaccaccagcctggtgaacgtggtgcccaagctgaacgccaccggcagagacctgctgcagaacctgctgaagtgcaaccccgtgcagagaatcagcgccgaggaggccctgcagcacccctacttcagcgacttctgccccccctag

SEQ ID NO: 62865 - protein, 188 aa, Artificial Sequence
  derived and/or modified sequence
MNGDDAFARRPTVGAQIPEKIQKAFDDIAKYFSKEEWEKMKASEKIFYVYMKRKYEAMTKLGFKATLPPFMCNKRAEDFQGNDLDNDPNRGNQVERPQMTFGRLQGISPKIMPKKPAEEGNDSEEVPEASGPQNDGKELCPPGKPTTSEKIHERSGPKRGEHAWTHRLRERKQLVIYEEISDPEEDDE

SEQ ID NO: 62866 - protein, 90 aa, Artificial Sequence
  derived and/or modified sequence
MTFGRLQRIIPKIMPEKPAEEGSDSKGVPEASGPQNDGKKLCPPGKASSSEKIHERSGPKRGKHAWTHRLRERKQLVIYEEISDPEEDDK

SEQ ID NO: 62867 - DNA, 567 bp, Artificial Sequence
  derived and/or modified sequence
atgaacggagacgacgcattcgctaggcgcccgaccgtcggagcacagattccagagaagattcagaaggcttttgacgatatcgctaaatattttagtaaggaggagtgggagaaaatgaaggcctccgagaagatcttttacgtatacatgaagcgaaaatacgaagcaatgacaaagttaggttttaaagctacccttccccccttcatgtgtaacaaacgggcggaggatttccaggggaatgatctggacaacgacccgaatcggggaaatcaggtcgaaagaccacaaatgactttcggaagactgcagggaataagtcccaagataatgcctaaaaagcctgcggaggaggggaatgatagtgaggaggttcctgaggcgtcggggccacagaatgacggcaaggagttgtgtccacctgggaaacctacaacctccgaaaagatacacgagaggtcgggacctaaacggggagaacacgcttggacccacaggctccgggaaaggaaacaattggtgatctacgaggaaataagcgatcccgaagaggatgacgagtag

SEQ ID NO: 62868 - DNA, 273 bp, Artificial Sequence
  derived and/or modified sequence
atgactttcggcaggctgcaaagaattatacccaaaatcatgcccgagaagcccgctgaggaggggtcggattctaagggcgtacctgaggccagtggcccccagaacgatgggaaaaagctctgtcccccgggcaaggcatctagcagcgagaaaattcatgagaggtccggccctaagagggggaagcatgcctggacacaccggctgcgcgagcgcaagcagctagttatttacgaggaaatctccgaccccgaggaagacgataagtag

SEQ ID NO: 62869 - DNA, 567 bp, Artificial Sequence
  derived and/or modified sequence
atgaatggagatgatgcctttgcccggcggcccaccgtgggcgcccagatccctgagaagatccagaaggcctttgatgacatcgccaagtacttcagcaaggaggagtgggagaagatgaaggccagcgagaagatcttctacgtgtacatgaagaggaaatatgaggccatgaccaagctgggcttcaaggccaccctgccccccttcatgtgcaacaagagagctgaggacttccagggcaatgacctggacaatgaccccaacagaggcaaccaggtggagcggccccagatgaccttcggccgcctgcagggcatcagccccaagatcatgcccaagaagccagctgaggagggcaatgattctgaggaggtgcctgaggccagcggcccccagaatgatggcaaggagctgtgccccccaggcaagcccaccaccagcgagaagatccacgagaggagcggccccaagagaggagagcacgcctggacccaccggctgcgggagaggaagcagctggtgatctatgaggagatcagtgaccctgaagaagatgatgaatag

SEQ ID NO: 62870 - DNA, 273 bp, Artificial Sequence
  derived and/or modified sequence
atgaccttcggccgcctgcagaggatcatccccaagatcatgcctgagaagccagctgaggagggcagtgacagcaagggcgtgcctgaggccagcggcccccagaatgatggcaagaagctgtgccccccaggcaaggccagcagcagcgagaagatccacgagaggagcggccccaagaggggcaagcacgcctggacccaccggctgcgggagaggaagcagctggtgatctatgaggagatcagtgaccctgaagaagatgacaagtag

SEQ ID NO: 62871 - DNA, 567 bp, Artificial Sequence
  derived and/or modified sequence
atgaacggcgacgacgccttcgcccggcggcccaccgtgggcgcccagatacctgaaaaaatacaaaaagcgttcgacgatattgccaaatacttctccaaggaggaatgggagaagatgaaagctagcgagaaaatcttctacgtctatatgaaaaggaagtatgaggccatgactaaactaggctttaaggcaaccctgcccccgttcatgtgtaacaagcgagctgaggattttcagggtaatgacctggacaacgatcctaaccgaggcaaccaggtcgaaaggccacagatgacattcggcaggctccagggcattagccccaaaatcatgccgaagaaacccgctgaggaaggtaacgactcagaggaggtacccgaggcttcgggtccccaaaacgatggcaaagagctgtgcccacctgggaagccaactacgagcgagaaaattcacgagagatctgggcccaaaagaggggaacacgcgtggacacacaggcttcgggaaagaaaacaacttgttatctacgaggagatcagcgaccctgaggaggacgatgagtag

SEQ ID NO: 62872 - DNA, 273 bp, Artificial Sequence
  derived and/or modified sequence
atgaccttcggccggctgcagcggatcatccccaagatcatgcccgagaaacctgcagaggaaggctccgattccaaaggagtcccagaggccagtgggccacagaacgacggcaaaaaactttgcccgcctggcaaagcatcctccagcgaaaaaattcacgagcggagtgggcccaagcgcggtaaacacgcatggacccacagactacgtgaaagaaagcagcttgtgatttacgaggagatatccgatccagaggaggacgacaagtag

SEQ ID NO: 62873 - DNA, 1296 bp, Artificial Sequence
  derived and/or modified sequence
actttctctctctttcgattcttccatactcagagtacgcacggtctgattttctctttggattcttccaaaatcagagtcagactgctcccggtgccatgaacggagacgacgcctttgcaaggagacccacggttggtgctcaaataccagagaagatccaaaaggccttcgatgatattgccaaatacttctctaaggaagagtgggaaaagatgaaagcctcggagaaaatcttctatgtgtatatgaagagaaagtatgaggctatgactaaactaggtttcaaggccaccctcccacctttcatgtgtaataaacgggccgaagacttccaggggaatgatttggataatgaccctaaccgtgggaatcaggttgaacgtcctcagatgactttcggcaggctccagggaatctccccgaagatcatgcccaagaagccagcagaggaaggaaatgattcggaggaagtgccagaagcatctggcccacaaaatgatgggaaagagctgtgccccccgggaaaaccaactacctctgagaagattcacgagagatctggacccaaaaggggggaacatgcctggacccacagactgcgtgagagaaaacagctggtgatttatgaagagatcagcgaccctgaggaagatgacgagtaactcccctcagggatacgacacatgcccatgatgagaagcagaacgtggtgacctttcacgaacatgggcatggctgcggacccctcgtcatcaggtgcatagcaagtgaaagcaagtgttcacaacagtgaaaagttgagcgtcatttttcttagtgtgccaagagttcgatgttagcgtttacgttgtattttcttacactgtgtcattctgttagatactaacattttcattgatgagcaagacatacttaatgcatattttggtttgtgtatccatgcacctaccttagaaaacaagtattgtcggttacctctgcatggaacagcattaccctcctctctccccagatgtgactactgagggcagttctgagtgtttaatttcagattttttcctctgcatttacacacacacgcacacaaaccacaccacacacacacacacacacacacacacacacacacacacacacacaccaagtaccagtataagcatctgccatctgcttttcccattgccatgcgtcctggtcaagctcccctcactctgtttcctggtcagcatgtactcccctcatccgattcccctgtagcagtcactgacagttaataaacctttgcaaacgttc

SEQ ID NO: 62874 - DNA, 567 bp, Artificial Sequence
  derived and/or modified sequence
atgaatggtgatgacgcttttgcgaggaggcccaccgttggtgctcagataccagagaaaatccagaaggcttttgatgatattgcaaaatacttttccaaggaagaatgggaaaaaatgaaagcctctgaaaaaatcttctacgtctacatgaaacgaaagtacgaggctatgaccaaattgggtttcaaagccactcttcctcctttcatgtgcaacaaacgggctgaggattttcaggggaatgacctagacaatgacccaaaccgtggaaaccaggttgagcggcctcagatgaccttcggaaggctccaagggatcagtccaaagattatgcctaagaaacccgctgaggaagggaatgactcagaggaagtgcccgaggcttccggcccacagaacgatggaaaggagctgtgtccccctggaaaacccacgacatcagagaagatccacgagagaagtggaccaaaaagaggcgaacatgcatggacacaccgactccgggagcggaagcagttggtgatttacgaagagatatcagaccctgaggaggatgacgagtag

SEQ ID NO: 62875 - DNA, 273 bp, Artificial Sequence
  derived and/or modified sequence
atgactttcgggcgactccagcgtattatcccgaagattatgccagaaaagcccgcagaagaggggtctgactctaagggagttcccgaagcatccggcccacagaacgatggaaaaaagctctgcccaccaggaaaggcttcttcaagcgagaaaatccatgaacgcagcggtcccaagcgtggtaagcacgcttggacccatcgcctgagagagagaaagcagctggttatctacgaggagatatcagatcctgaggaagatgacaagtag

SEQ ID NO: 62876 - DNA, 567 bp, Artificial Sequence
  derived and/or modified sequence
atgaacggcgacgacgccttcgccagaagacccaccgtgggcgcccagatccccgagaagatccagaaggccttcgacgacatcgccaagtacttcagcaaggaggagtgggagaagatgaaggccagcgagaagatcttctacgtgtacatgaagagaaagtacgaggccatgaccaagctgggcttcaaggccaccctgccccccttcatgtgcaacaagagagccgaggacttccagggcaacgacctggacaacgaccccaacagaggcaaccaggtggagagaccccagatgaccttcggcagactgcagggcatcagccccaagatcatgcccaagaagcccgccgaggagggcaacgacagcgaggaggtgcccgaggccagcggcccccagaacgacggcaaggagctgtgcccccccggcaagcccaccaccagcgagaagatccacgagagaagcggccccaagagaggcgagcacgcctggacccacagactgagagagagaaagcagctggtgatctacgaggagatcagcgaccccgaggaggacgacgagtag

SEQ ID NO: 62877 - DNA, 273 bp, Artificial Sequence
  derived and/or modified sequence
atgaccttcggcagactgcagagaatcatccccaagatcatgcccgagaagcccgccgaggagggcagcgacagcaagggcgtgcccgaggccagcggcccccagaacgacggcaagaagctgtgcccccccggcaaggccagcagcagcgagaagatccacgagagaagcggccccaagagaggcaagcacgcctggacccacagactgagagagagaaagcagctggtgatctacgaggagatcagcgaccccgaggaggacgacaagtag

SEQ ID NO: 62878 - DNA, 567 bp, Artificial Sequence
  derived and/or modified sequence
atgaatggcgatgacgccttcgcacgccgaccaacagttggcgcccagatcccggagaaaatccaaaaagctttcgatgatattgcaaagtatttttccaaagaggaatgggagaagatgaaagcctctgagaagatcttttatgtgtatatgaaacgcaagtatgaagccatgactaagctgggattcaaggccacgttgccaccctttatgtgtaataagcgcgctgaggacttccaggggaatgacctggacaatgacccaaatcggggtaaccaggtagagcggccccagatgacattcgggaggcttcagggcatatcaccaaagatcatgcccaagaagcctgccgaggaaggcaatgactccgaggaggtccctgaggcaagcggcccgcagaatgatgggaaggaattgtgtccacctgggaaacccacaaccagcgaaaagattcatgagaggtccggcccaaagagaggtgaacatgcttggacccatcggctccgcgaacggaagcagctggtaatctacgaagagatctccgatcccgaagaggatgacgagtag

SEQ ID NO: 62879 - DNA, 567 bp, Artificial Sequence
  derived and/or modified sequence
atgaacggcgacgacgccttcgcccggcggcccaccgtgggcgcccagatacctgaaaagatacagaaggctttcgacgatatcgcaaaatactttagtaaggaggaatgggaaaaaatgaaggcatctgaaaaaatcttctacgtttacatgaagcgcaagtatgaggccatgaccaagctcggttttaaggccactcttcccccattcatgtgtaataagagggccgaagattttcaagggaacgacctcgacaacgatcctaatagaggcaaccaggtggagcgaccccaaatgacattcgggaggctacagggtatcagccctaaaattatgccaaaaaagcctgcagaggaaggcaatgacagcgaagaagtcccggaggcttccgggccacaaaatgatgggaaggagctatgtccaccaggaaaacctacaacgagcgagaagatccacgaaaggtccgggcccaaacggggagaacacgcctggacacatcggctccgcgagagaaagcaactggttatctacgaggagatcagcgatccggaggaggatgacgagtag

SEQ ID NO: 62880 - DNA, 567 bp, Artificial Sequence
  derived and/or modified sequence
atgaatggcgacgatgcctttgctcgccgtcccacagtcggcgctcagattccagagaaaatccaaaaggctttcgacgatattgctaaatacttctctaaggaagaatgggagaagatgaaggcatccgagaaaatcttctacgtttacatgaagaggaaatacgaagcgatgacaaaattaggatttaaggccaccctccctccctttatgtgcaacaagagggctgaagattttcagggaaacgaccttgataatgatcccaacagagggaaccaggttgagagaccccagatgacattcggccgactgcaagggatcagtcccaaaataatgcccaagaagccagcggaagagggtaatgacagtgaggaagtgccagaggcttctggtccccagaacgatggcaaggaactttgccctccaggcaaacccacaacgagtgagaagattcatgagcgctctgggccaaagagaggagagcacgcctggactcatcgactacgggaaagaaagcagttggtgatctatgaagagatctccgacccggaggaggatgatgaatag

SEQ ID NO: 62881 - DNA, 1292 bp, Artificial Sequence
  derived and/or modified sequence
actttctctctctttcgattcttccatactcagagtacgcacggtctgattttctctttggattcttccaaaatcagagtcagactgctcccggtgccatgaacggagacgacgcctttgcaaggagacccacggttggtgctcaaataccagagaagatccaaaaggccttcgatgatattgccaaatacttctctaaggaagagtgggaaaagatgaaagcctcggagaaaatcttctatgtgtatatgaagagaaagtatgaggctatgactaaactaggtttcaaggccaccctcccacctttcatgtgtaataaacgggccgaagacttccaggggaatgatttggataatgaccctaaccgtgggaatcaggttgaacgtcctcagatgactttcggcaggctccagggaatctccccgaagatcatgcccaagaagccagcagaggaaggaaatgattcggaggaagtgccagaagcatctggcccacaaaatgatgggaaagagctgtgccccccgggaaaaccaactacctctgagaagattcacgagagatctggacccaaaaggggggaacatgcctggacccacagactgcgtgagagaaaacagctggtgatttatgaagagatcagcgaccctgaggaagatgacgagtaactcccctcagggatacgacacatgcccatgatgagaagcagaacgtggtgacctttcacgaacatgggcatggctgcggacccctcgtcatcaggtgcatagcaagtgaaagcaagtgttcacaacagtgaaaagttgagcgtcatttttcttagtgtgccaagagttcgatgttagcgtttacgttgtattttcttacactgtgtcattctgttagatactaacattttcattgatgagcaagacatacttaatgcatattttggtttgtgtatccatgcacctaccttagaaaacaagtattgtcggttacctctgcatggaacagcattaccctcctctctccccagatgtgactactgagggcagttctgagtgtttaatttcagattttttcctctgcatttacacacacacgcacacaaaccacaccacacacacacacacacacacacacacacacacacacacacaccaagtaccagtataagcatctgccatctgcttttcccattgccatgcgtcctggtcaagctcccctcactctgtttcctggtcagcatgtactcccctcatccgattcccctgtagcagtcactgacagttaataaacctttgcaaacgttc

SEQ ID NO: 62882 - protein, 5478 aa, Artificial Sequence
  derived and/or modified sequence
MLVIWILTLALRLCASVTTVTPEGSAVHKAISQQGTLWTGEVLEKQTVEQGKSTLRRQKNHFHRSAGELRCRNALKDEGASAGWSVMFAGESVVVLVHLWMTGARVKNLGLVEFASPGDDGDGRAEGFSLGLPLSEQARAAGAREKERQETVINHSTFSGFSQITGSTVNTSIGGNTTSASTPSSSDPFTTFSDYGVSVTFITGSTATKHFLDSSTNSGHSEESTVSHSGPGATGTTLFPSHSATSVFVGEPKTSPITSASMETTALPGSTTTAGLSEKSTTFYSSPRSPDRTLSPARTTSSGVSEKSTTSHSRPGPTHTIAFPDSTTMPGVSQESTASHSIPGSTDTTLSPGTTTPSSLGPESTTFHSSPGYTKTTRLPDNTTTSGLLEASTPVHSSTGSPHTTLSPSSSTTHEGEPTTFQSWPSSKDTSPAPSGTTSAFVKLSTTYHSSPSSTPTTHFSASSTTLGHSEESTPVHSSPVATATTPPPARSATSGHVEESTAYHRSPGSTQTMHFPESSTTSGHSEESATFHGSTTHTKSSTPSTTAALAHTSYHSSLGSTETTHFRDSSTISGRSEESKASHSSPDAMATTVLPAGSTPSVLVGDSTPSPISSGSMETTALPGSTTKPGLSEKSTTFYSSPRSPDTTHLPASMTSSGVSEESTTSHSRPGSTHTTAFPGSTTMPGLSQESTASHSSPGPTDTTLSPGSTTASSLGPEYTTFHSRPGSTETTLLPDNTTASGLLEASMPVHSSTRSPHTTLSPAGSTTRQGESTTFHSWPSSKDTRPAPPTTTSAFVEPSTTSHGSPSSIPTTHISARSTTSGLVEESTTYHSSPGSTQTMHFPESDTTSGRGEESTTSHSSTTHTISSAPSTTSALVEEPTSYHSSPGSTATTHFPDSSTTSGRSEESTASHSSQDATGTIVLPARSTTSVLLGESTTSPISSGSMETTALPGSTTTPGLSERSTTFHSSPRSPATTLSPASTTSSGVSEESTTSRSRPGSTHTTAFPDSTTTPGLSRHSTTSHSSPGSTDTTLLPASTTTSGPSQESTTSHSSSGSTDTALSPGSTTALSFGQESTTFHSNPGSTHTTLFPDSTTSSGIVEASTRVHSSTGSPRTTLSPASSTSPGLQGESTAFQTHPASTHTTPSPPSTATAPVEESTTYHRSPGSTPTTHFPASSTTSGHSEKSTIFHSSPDASGTTPSSAHSTTSGRGESTTSRISPGSTEITTLPGSTTTPGLSEASTTFYSSPRSPTTTLSPASMTSLGVGEESTTSRSQPGSTHSTVSPASTTTPGLSEESTTVYSSSRGSTETTVFPHSTTTSVHGEEPTTFHSRPASTHTTLFTEDSTTSGLTEESTAFPGSPASTQTGLPATLTTADLGEESTTFPSSSGSTGTKLSPARSTTSGLVGESTPSRLSPSSTETTTLPGSPTTPSLSEKSTTFYTSPRSPDATLSPATTTSSGVSEESSTSHSQPGSTHTTAFPDSTTTSDLSQEPTTSHSSQGSTEATLSPGSTTASSLGQQSTTFHSSPGDTETTLLPDDTITSGLVEASTPTHSSTGSLHTTLTPASSTSAGLQEESTTFQSWPSSSDTTPSPPGTTAAPVEVSTTYHSRPSSTPTTHFSASSTTLGRSEESTTVHSSPGATGTALFPTRSATSVLVGEPTTSPISSGSTETTALPGSTTTAGLSEKSTTFYSSPRSPDTTLSPASTTSSGVSEESTTSHSRPGSTHTTAFPGSTTMPGVSQESTASHSSPGSTDTTLSPGSTTASSLGPESTTFHSSPGSTETTLLPDNTTASGLLEASTPVHSSTGSPHTTLSPAGSTTRQGESTTFQSWPSSKDTMPAPPTTTSAFVELSTTSHGSPSSTPTTHFSASSTTLGRSEESTTVHSSPVATATTPSPARSTTSGLVEESTAYHSSPGSTQTMHFPESSTASGRSEESRTSHSSTTHTISSPPSTTSALVEEPTSYHSSPGSTATTHFPDSSTTSGRSEESTASHSSQDATGTIVLPARSTTSVLLGESTTSPISSGSMETTALPGSTTTPGLSEKSTTFHSSPRSPATTLSPASTTSSGVSEESTTSHSRPGSTHTTAFPDSTTTPGLSRHSTTSHSSPGSTDTTLLPASTTTSGPSQESTTSHSSPGSTDTALSPGSTTALSFGQESTTFHSSPGSTHTTLFPDSTTSSGIVEASTRVHSSTGSPRTTLSPASSTSPGLQGESTAFQTHPASTHTTPSPPSTATAPVEESTTYHRSPGSTPTTHFPASSTTSGHSEKSTIFHSSPDASGTTPSSAHSTTSGRGESTTSRISPGSTEITTLPGSTTTPGLSEASTTFYSSPRSPTTTLSPASMTSLGVGEESTTSRSQPGSTHSTVSPASTTTPGLSEESTTVYSSSPGSTETTVFPRTPTTSVRGEEPTTFHSRPASTHTTLFTEDSTTSGLTEESTAFPGSPASTQTGLPATLTTADLGEESTTFPSSSGSTGTTLSPARSTTSGLVGESTPSRLSPSSTETTTLPGSPTTPSLSEKSTTFYTSPRSPDATLSPATTTSSGVSEESSTSHSQPGSTHTTAFPDSTTTPGLSRHSTTSHSSPGSTDTTLLPASTTTSGPSQESTTSHSSPGSTDTALSPGSTTALSFGQESTTFHSSPGSTHTTLFPDSTTSSGIVEASTRVHSSTGSPRTTLSPASSTSPGLQGESTTFQTHPASTHTTPSPPSTATAPVEESTTYHRSPGSTPTTHFPASSTTSGHSEKSTIFHSSPDASGTTPSSAHSTTSGRGESTTSRISPGSTEITTLPGSTTTPGLSEASTTFYSSPRSPTTTLSPASMTSLGVGEESTTSRSQPGSTHSTVSPASTTTPGLSEESTTVYSSSPGSTETTVFPRSTTTSVRGEEPTTFHSRPASTHTTLFTEDSTTSGLTEESTAFPGSPASTQTGLPATLTTADLGEESTTFPSSSGSTGTTLSPARSTTSGLVGESTPSRLSPSSTETTTLPGSPTTPSLSEKSTTFYTSPRSPDATLSPATTTSSGVSEESSTSHSQPGSTHTTAFPDSTTTSGLSQEPTASHSSQGSTEATLSPGSTTASSLGQQSTTFHSSPGDTETTLLPDDTITSGLVEASTPTHSSTGSLHTTLTPASSTSAGLQEESTTFQSWPSSSDTTPSPPGTTAAPVEVSTTYHSRPSSTPTTHFSASSTTLGRSEESTTVHSSPGATGTALFPTRSATSVLVGEPTTSPISSGSTETTALPGSTTTAGLSEKSTTFYSSPRSPDTTLSPASTTSSGVSEESTTSHSRPGSTHTTAFPGSTTMPGVSQESTASHSSPGSTDTTLSPGSTTASSLGPESTTFHSGPGSTETTLLPDNTTASGLLEASTPVHSSTGSPHTTLSPAGSTTRQGESTTFQSWPNSKDTTPAPPTTTSAFVELSTTSHGSPSSTPTTHFSASSTTLGRSEESTTVHSSPVATATTPSPARSTTSGLVEESTTYHSSPGSTQTMHFPESDTTSGRGEESTTSHSSTTHTISSAPSTTSALVEEPTSYHSSPGSTATTHFPDSSTTSGRSEESTASHSSQDATGTIVLPARSTTSVLLGESTTSPISSGSMETTALPGSTTTPGLSEKSTTFHSSPRSPATTLSPASTTSSGVSEESTTSHSRPGSTHTTAFPDSTTTPGLSRHSTTSHSSPGSTDTTLLPASTTTSGSSQESTTSHSSSGSTDTALSPGSTTALSFGQESTTFHSSPGSTHTTLFPDSTTSSGIVEASTRVHSSTGSPRTTLSPASSTSPGLQGESTAFQTHPASTHTTPSPPSTATAPVEESTTYHRSPGSTPTTHFPASSTTSGHSEKSTIFHSSPDASGTTPSSAHSTTSGRGESTTSRISPGSTEITTLPGSTTTPGLSEASTTFYSSPRSPTTTLSPASMTSLGVGEESTTSRSQPGSTHSTVSPASTTTPGLSEESTTVYSSSPGSTETTVFPRSTTTSVRREEPTTFHSRPASTHTTLFTEDSTTSGLTEESTAFPGSPASTQTGLPATLTTADLGEESTTFPSSSGSTGTKLSPARSTTSGLVGESTPSRLSPSSTETTTLPGSPTTPSLSEKSTTFYTSPRSPDATLSPATTTSSGVSEESSTSHSQPGSTHTTAFPDSTTTSGLSQEPTTSHSSQGSTEATLSPGSTTASSLGQQSTTFHSSPGDTETTLLPDDTITSGLVEASTPTHSSTGSLHTTLTPASSTSTGLQEESTTFQSWPSSSDTTPSPPSTTAVPVEVSTTYHSRPSSTPTTHFSASSTTLGRSEESTTVHSSPGATGTALFPTRSATSVLVGEPTTSPISSGSTETTALPGSTTTAGLSEKSTTFYSSPRSPDTTLSPASTTSSGVSEESTTSHSRPGSMHTTAFPSSTTMPGVSQESTASHSSPGSTDTTLSPGSTTASSLGPESTTFHSSPGSTETTLLPDNTTASGLLEASTPVHSSTGSPHTTLSPAGSTTRQGESTTFQSWPNSKDTTPAPPTTTSAFVELSTTSHGSPSSTPTTHFSASSTTLGRSEESTTVHSSPVATATTPSPARSTTSGLVEESTTYHSSPGSTQTMHFPESNTTSGRGEESTTSHSSTTHTISSAPSTTSALVEEPTSYHSSPGSTATTHFPDSSTTSGRSEESTASHSSQDATGTIVLPARSTTSVLLGESTTSPISSGSMETTALPGSTTTPGLSEKSTTFHSSPSSTPTTHFSASSTTLGRSEESTTVHSSPVATATTPSPARSTTSGLVEESTAYHSSPGSTQTMHFPESSTASGRSEESRTSHSSTTHTISSPPSTTSALVEEPTSYHSSPGSIATTHFPESSTTSGRSEESTASHSSPDTNGITPLPAHFTTSGRIAESTTFYISPGSMETTLASTATTPGLSAKSTILYSSSRSPDQTLSPASMTSSSISGEPTSLYSQAESTHTTAFPASTTTSGLSQESTTFHSKPGSTETTLSPGSITTSSFAQEFTTPHSQPGSALSTVSPASTTVPGLSEESTTFYSSPGSTETTAFSHSNTMSIHSQQSTPFPDSPGFTHTVLPATLTTTDIGQESTAFHSSSDATGTTPLPARSTASDLVGEPTTFYISPSPTYTTLFPASSSTSGLTEESTTFHTSPSFTSTIVSTESLETLAPGLCQEGQIWNGKQCVCPQGYVGYQCLSPLESFPVETPEKLNATLGMTVKVTYRNFTEKMNDASSQEYQNFSTLFKNRMDVVLKGDNLPQYRGVNIRRLLNGSIVVKNDVILEADYTLEYEELFENLAEIVKAKIMNETRTTLLDPDSCRKAILCYSEEDTFVDSSVTPGFDFQEQCTQKAAEGYTQFYYVDVLDGKLACVNKCTKGTKSQMNCNLGTCQLQRSGPRCLCPNTNTHWYWGETCEFNIAKSLVYGIVGAVMAVLLLALIILIILFSLSQRKRHREQYDVPQEWRKEGTPGIFQKTAIWEDQNLRESRFGLENAYNNFRPTLETVDSGTELHIQRPEMVASTV

SEQ ID NO: 62883 - protein, 5335 aa, Artificial Sequence
  derived and/or modified sequence
MLVIWILTLALRLCASVTTVTPGSTVNTSIGGNTTSASTPSSSDPFTTFSDYGVSVTFITGSTATKHFLDSSTNSGHSEESTVSHSGPGATGTTLFPSHSATSVFVGEPKTSPITSASMETTALPGSTTTAGLSEKSTTFYSSPRSPDRTLSPARTTSSGVSEKSTTSHSRPGPTHTIAFPDSTTMPGVSQESTASHSIPGSTDTTLSPGTTTPSSLGPESTTFHSSPGYTKTTRLPDNTTTSGLLEASTPVHSSTGSPHTTLSPSSSTTHEGEPTTFQSWPSSKDTSPAPSGTTSAFVKLSTTYHSSPSSTPTTHFSASSTTLGHSEESTPVHSSPVATATTPPPARSATSGHVEESTAYHRSPGSTQTMHFPESSTTSGHSEESATFHGSTTHTKSSTPSTTAALAHTSYHSSLGSTETTHFRDSSTISGRSEESKASHSSPDAMATTVLPAGSTPSVLVGDSTPSPISSGSMETTALPGSTTKPGLSEKSTTFYSSPRSPDTTHLPASMTSSGVSEESTTSHSRPGSTHTTAFPGSTTMPGLSQESTASHSSPGPTDTTLSPGSTTASSLGPEYTTFHSRPGSTETTLLPDNTTASGLLEASMPVHSSTRSPHTTLSPAGSTTRQGESTTFHSWPSSKDTRPAPPTTTSAFVEPSTTSHGSPSSIPTTHISARSTTSGLVEESTTYHSSPGSTQTMHFPESDTTSGRGEESTTSHSSTTHTISSAPSTTSALVEEPTSYHSSPGSTATTHFPDSSTTSGRSEESTASHSSQDATGTIVLPARSTTSVLLGESTTSPISSGSMETTALPGSTTTPGLSERSTTFHSSPRSPATTLSPASTTSSGVSEESTTSRSRPGSTHTTAFPDSTTTPGLSRHSTTSHSSPGSTDTTLLPASTTTSGPSQESTTSHSSSGSTDTALSPGSTTALSFGQESTTFHSNPGSTHTTLFPDSTTSSGIVEASTRVHSSTGSPRTTLSPASSTSPGLQGESTAFQTHPASTHTTPSPPSTATAPVEESTTYHRSPGSTPTTHFPASSTTSGHSEKSTIFHSSPDASGTTPSSAHSTTSGRGESTTSRISPGSTEITTLPGSTTTPGLSEASTTFYSSPRSPTTTLSPASMTSLGVGEESTTSRSQPGSTHSTVSPASTTTPGLSEESTTVYSSSRGSTETTVFPHSTTTSVHGEEPTTFHSRPASTHTTLFTEDSTTSGLTEESTAFPGSPASTQTGLPATLTTADLGEESTTFPSSSGSTGTKLSPARSTTSGLVGESTPSRLSPSSTETTTLPGSPTTPSLSEKSTTFYTSPRSPDATLSPATTTSSGVSEESSTSHSQPGSTHTTAFPDSTTTSDLSQEPTTSHSSQGSTEATLSPGSTTASSLGQQSTTFHSSPGDTETTLLPDDTITSGLVEASTPTHSSTGSLHTTLTPASSTSAGLQEESTTFQSWPSSSDTTPSPPGTTAAPVEVSTTYHSRPSSTPTTHFSASSTTLGRSEESTTVHSSPGATGTALFPTRSATSVLVGEPTTSPISSGSTETTALPGSTTTAGLSEKSTTFYSSPRSPDTTLSPASTTSSGVSEESTTSHSRPGSTHTTAFPGSTTMPGVSQESTASHSSPGSTDTTLSPGSTTASSLGPESTTFHSSPGSTETTLLPDNTTASGLLEASTPVHSSTGSPHTTLSPAGSTTRQGESTTFQSWPSSKDTMPAPPTTTSAFVELSTTSHGSPSSTPTTHFSASSTTLGRSEESTTVHSSPVATATTPSPARSTTSGLVEESTAYHSSPGSTQTMHFPESSTASGRSEESRTSHSSTTHTISSPPSTTSALVEEPTSYHSSPGSTATTHFPDSSTTSGRSEESTASHSSQDATGTIVLPARSTTSVLLGESTTSPISSGSMETTALPGSTTTPGLSEKSTTFHSSPRSPATTLSPASTTSSGVSEESTTSHSRPGSTHTTAFPDSTTTPGLSRHSTTSHSSPGSTDTTLLPASTTTSGPSQESTTSHSSPGSTDTALSPGSTTALSFGQESTTFHSSPGSTHTTLFPDSTTSSGIVEASTRVHSSTGSPRTTLSPASSTSPGLQGESTAFQTHPASTHTTPSPPSTATAPVEESTTYHRSPGSTPTTHFPASSTTSGHSEKSTIFHSSPDASGTTPSSAHSTTSGRGESTTSRISPGSTEITTLPGSTTTPGLSEASTTFYSSPRSPTTTLSPASMTSLGVGEESTTSRSQPGSTHSTVSPASTTTPGLSEESTTVYSSSPGSTETTVFPRTPTTSVRGEEPTTFHSRPASTHTTLFTEDSTTSGLTEESTAFPGSPASTQTGLPATLTTADLGEESTTFPSSSGSTGTTLSPARSTTSGLVGESTPSRLSPSSTETTTLPGSPTTPSLSEKSTTFYTSPRSPDATLSPATTTSSGVSEESSTSHSQPGSTHTTAFPDSTTTPGLSRHSTTSHSSPGSTDTTLLPASTTTSGPSQESTTSHSSPGSTDTALSPGSTTALSFGQESTTFHSSPGSTHTTLFPDSTTSSGIVEASTRVHSSTGSPRTTLSPASSTSPGLQGESTTFQTHPASTHTTPSPPSTATAPVEESTTYHRSPGSTPTTHFPASSTTSGHSEKSTIFHSSPDASGTTPSSAHSTTSGRGESTTSRISPGSTEITTLPGSTTTPGLSEASTTFYSSPRSPTTTLSPASMTSLGVGEESTTSRSQPGSTHSTVSPASTTTPGLSEESTTVYSSSPGSTETTVFPRSTTTSVRGEEPTTFHSRPASTHTTLFTEDSTTSGLTEESTAFPGSPASTQTGLPATLTTADLGEESTTFPSSSGSTGTTLSPARSTTSGLVGESTPSRLSPSSTETTTLPGSPTTPSLSEKSTTFYTSPRSPDATLSPATTTSSGVSEESSTSHSQPGSTHTTAFPDSTTTSGLSQEPTASHSSQGSTEATLSPGSTTASSLGQQSTTFHSSPGDTETTLLPDDTITSGLVEASTPTHSSTGSLHTTLTPASSTSAGLQEESTTFQSWPSSSDTTPSPPGTTAAPVEVSTTYHSRPSSTPTTHFSASSTTLGRSEESTTVHSSPGATGTALFPTRSATSVLVGEPTTSPISSGSTETTALPGSTTTAGLSEKSTTFYSSPRSPDTTLSPASTTSSGVSEESTTSHSRPGSTHTTAFPGSTTMPGVSQESTASHSSPGSTDTTLSPGSTTASSLGPESTTFHSGPGSTETTLLPDNTTASGLLEASTPVHSSTGSPHTTLSPAGSTTRQGESTTFQSWPNSKDTTPAPPTTTSAFVELSTTSHGSPSSTPTTHFSASSTTLGRSEESTTVHSSPVATATTPSPARSTTSGLVEESTTYHSSPGSTQTMHFPESDTTSGRGEESTTSHSSTTHTISSAPSTTSALVEEPTSYHSSPGSTATTHFPDSSTTSGRSEESTASHSSQDATGTIVLPARSTTSVLLGESTTSPISSGSMETTALPGSTTTPGLSEKSTTFHSSPRSPATTLSPASTTSSGVSEESTTSHSRPGSTHTTAFPDSTTTPGLSRHSTTSHSSPGSTDTTLLPASTTTSGSSQESTTSHSSSGSTDTALSPGSTTALSFGQESTTFHSSPGSTHTTLFPDSTTSSGIVEASTRVHSSTGSPRTTLSPASSTSPGLQGESTAFQTHPASTHTTPSPPSTATAPVEESTTYHRSPGSTPTTHFPASSTTSGHSEKSTIFHSSPDASGTTPSSAHSTTSGRGESTTSRISPGSTEITTLPGSTTTPGLSEASTTFYSSPRSPTTTLSPASMTSLGVGEESTTSRSQPGSTHSTVSPASTTTPGLSEESTTVYSSSPGSTETTVFPRSTTTSVRREEPTTFHSRPASTHTTLFTEDSTTSGLTEESTAFPGSPASTQTGLPATLTTADLGEESTTFPSSSGSTGTKLSPARSTTSGLVGESTPSRLSPSSTETTTLPGSPTTPSLSEKSTTFYTSPRSPDATLSPATTTSSGVSEESSTSHSQPGSTHTTAFPDSTTTSGLSQEPTTSHSSQGSTEATLSPGSTTASSLGQQSTTFHSSPGDTETTLLPDDTITSGLVEASTPTHSSTGSLHTTLTPASSTSTGLQEESTTFQSWPSSSDTTPSPPSTTAVPVEVSTTYHSRPSSTPTTHFSASSTTLGRSEESTTVHSSPGATGTALFPTRSATSVLVGEPTTSPISSGSTETTALPGSTTTAGLSEKSTTFYSSPRSPDTTLSPASTTSSGVSEESTTSHSRPGSMHTTAFPSSTTMPGVSQESTASHSSPGSTDTTLSPGSTTASSLGPESTTFHSSPGSTETTLLPDNTTASGLLEASTPVHSSTGSPHTTLSPAGSTTRQGESTTFQSWPNSKDTTPAPPTTTSAFVELSTTSHGSPSSTPTTHFSASSTTLGRSEESTTVHSSPVATATTPSPARSTTSGLVEESTTYHSSPGSTQTMHFPESNTTSGRGEESTTSHSSTTHTISSAPSTTSALVEEPTSYHSSPGSTATTHFPDSSTTSGRSEESTASHSSQDATGTIVLPARSTTSVLLGESTTSPISSGSMETTALPGSTTTPGLSEKSTTFHSSPSSTPTTHFSASSTTLGRSEESTTVHSSPVATATTPSPARSTTSGLVEESTAYHSSPGSTQTMHFPESSTASGRSEESRTSHSSTTHTISSPPSTTSALVEEPTSYHSSPGSIATTHFPESSTTSGRSEESTASHSSPDTNGITPLPAHFTTSGRIAESTTFYISPGSMETTLASTATTPGLSAKSTILYSSSRSPDQTLSPASMTSSSISGEPTSLYSQAESTHTTAFPASTTTSGLSQESTTFHSKPGSTETTLSPGSITTSSFAQEFTTPHSQPGSALSTVSPASTTVPGLSEESTTFYSSPGSTETTAFSHSNTMSIHSQQSTPFPDSPGFTHTVLPATLTTTDIGQESTAFHSSSDATGTTPLPARSTASDLVGEPTTFYISPSPTYTTLFPASSSTSGLTEESTTFHTSPSFTSTIVSTESLETLAPGLCQEGQIWNGKQCVCPQGYVGYQCLSPLESFPVETPEKLNATLGMTVKVTYRNFTEKMNDASSQEYQNFSTLFKNRMDVVLKGDNLPQYRGVNIRRLLNGSIVVKNDVILEADYTLEYEELFENLAEIVKAKIMNETRTTLLDPDSCRKAILCYSEEDTFVDSSVTPGFDFQEQCTQKAAEGYTQFYYVDVLDGKLACVNKCTKGTKSQMNCNLGTCQLQRSGPRCLCPNTNTHWYWGETCEFNIAKSLVYGIVGAVMAVLLLALIILIILFSLSQRKRHREQYDVPQEWRKEGTPGIFQKTAIWEDQNLRESRFGLENAYNNFRPTLETVDSGTELHIQRPEMVASTV

SEQ ID NO: 62884 - DNA, 156 bp, Artificial Sequence
  derived and/or modified sequence
atgactcatgataagtcttggaggagatgttcaatctccggcagtactaagtgccgctgcggtagtcgcatcgctggcccgaacgccctggggagcggggggtccagaagttcgtccagctcctctcgctcaatcctgtcctcgtccatcctgtag

SEQ ID NO: 62885 - DNA, 16437 bp, Artificial Sequence
  derived and/or modified sequence
atgcttgtgatctggattcttactttagccctaagactgtgcgccagcgtaactaccgtgacccctgagggatctgctgttcacaaagctatctcacagcagggcaccctgtggactggagaagtcctagagaagcagacggtggagcaaggcaaatcgacactgcgacgtcagaaaaaccactttcaccggtcggccggtgaacttagatgtagaaacgcccttaaggacgagggggcttctgccgggtggtccgtgatgtttgcaggtgaatccgtggtggtgcttgtgcacctttggatgactggtgcccgggtgaaaaatctcgggttggtggagttcgcttctcctggggacgacggtgatggtcgtgccgaagggtttagcctgggcctccccctgagtgagcaagcccgggccgctggggctagagagaaagagaggcaggagactgtgataaatcacagtacgttctctgggttcagccagatcactggctctactgtgaacaccagtattggtgggaacacaacgtctgcaagcacaccttctagctccgacccgttcaccacctttagcgattatggggtgagtgtcaccttcataacaggatctaccgccaccaagcattttctggatagttctactaacagcgggcatagtgaggaatcgaccgtgtctcatagtggccctggggccaccggaacaacactgttcccatctcactctgcaacatcagtgttcgtgggcgagccaaagacttccccaatcacatctgcgagcatggagacaaccgcacttcctggaagcaccacgaccgcaggcttatctgagaaatccacaaccttctactcatctccgagaagtccagatcgcacgttgagtcctgcaaggacaacatcgagcggcgtctctgaaaaatccacaacctcccacagtcgtccaggtcccacccataccattgccttccctgactccacaaccatgcccggtgtgagtcaagaatctacggcatctcactctattccaggatccactgataccacactttcccccggaacgaccacacccagctcgctgggccctgagtctactaccttccattctagcccaggctatactaagaccacacggttacccgacaataccaccacctctgggcttttagaggcctcaacacctgtacattcctccaccggaagcccccatacaaccctgtctccgtccagtagtacaactcatgagggcgaacctacaactttccaatcatggccatcgagtaaagacacaagcccggcacctagcggcaccacttctgcctttgtcaagctcagcacaacatatcatagctcccccagttccactcctaccactcacttcagtgcctcaagcaccaccctgggccattcagaagaatcaaccccggtacactcttcaccagttgctacagccacaactccaccccccgcccggagcgccacaagtggtcacgttgaagagtccaccgcctatcacagaagtcctggctccacccagaccatgcactttcccgaaagtagcaccaccagcggacatagcgaagagagtgcaacattccacgggtcgacaactcacactaaatctagcacccctagtaccactgccgcgctggcacacacctcttaccactcaagcctgggcagtaccgaaacaacgcattttagggactccagcactatttccggtcgcagcgaggaatccaaagcaagtcattcaagtccagacgctatggcgacgaccgttctgccagccgggagcaccccaagcgtactagttggagactcaacaccctctcccataagcagtggttcgatggagacaacggcattgcccggttcgaccacgaagccaggactcagtgagaaatccacgaccttctattcctctccccggagtcccgataccactcacctgcctgcctctatgactagctcaggggttagcgaggagagcacaacgagccacagccgcccgggatccactcatacgacggcattcccaggctctactaccatgcccggcctgtcgcaagagagcactgccagccactctagccctgggccaacggataccactctttctcctggttctacaaccgctagttctctggggccggaatacaccacttttcattccagaccaggcagcaccgaaactacattgttgcccgataataccaccgcttcaggtctcctggaggcgagcatgcctgtgcatagcagcacgcgcagcccccacaccaccctatcacctgcgggtagcacaacaaggcagggggagtcaaccacattccactcctggcccagctcaaaagacacaagacccgcgccgcccactacaacaagtgcattcgtggaaccaagcaccacctctcacgggtcccccagtagcattcccacaactcacattagcgcacgcagcaccacatcgggcctggttgaagagtcgacaacctaccactcttctcccggcagcacccaaaccatgcactttcccgagagtgatactactagtggtcgcggcgaggagtctacaaccagtcacagtagtaccactcatactatttcttctgcaccatccaccacaagcgcgctggtggaggagcccacttcctatcactcatcccccggctccacagcaacaacacacttccctgactcctctactaccagcggacgcagtgaggaatccaccgcaagccatagctctcaggacgctaccggaaccatcgtgctgccggctagatcaactactagcgtgttacttggcgaaagcacgacctctcccataagtagtggctctatggaaacaaccgccctgcctggcagcacgaccacacccgggctcagcgaacgatccaccacattccacagctctcctcgtagtcccgccaccaccctcagtcccgctagcactacttcaagtggcgtttcggaagaaagcaccaccagcaggagtaggcccggttctacccataccactgcctttccagactctacaaccactcccgggttgagccgccattccacgacctcccacagcagcccagggtccacagacaccaccctcctgccggcttctaccactacctcaggcccgtctcaggagtctacaaccagccactcctcttccggatctacagacacagctttaagcccaggatcgaccaccgctctgtccttcggccaagagagcaccactttccactccaaccccgggtcaactcacaccacactttttcctgactctacaacctcatcgggcatcgtggaagctagtacaagggtgcactcctcaaccggctctccaaggaccaccctttctcccgcgtcatcaacctcccctggtctgcagggagagtctaccgccttccagacacatccagctagtacacataccacacctagtcctccgtccaccgccacagcccctgtggaggaatcaactacatatcacagaagcccaggatcgaccccaactacgcacttccctgcctcgagcacgacctctggacactcggagaagtcaaccatattccacagctctcccgacgcctctggaactacccctagcagtgcccatagcaccacctctggccgcggcgaatcaactactagtcgcatttctccaggcagcacagaaattaccaccctgcctggctccacaactacccccggcctgagcgaggcgtcaacaaccttctacagttcccccagaagtccaacaactacactatcacccgccagtatgacaagtctcggtgtaggcgaggagtcgacaacaagccgctcccagcccggctcaacccattccacggtgtcccccgcatctaccactacacccgggctgagcgaagagtcaacgaccgtatattctagctcacgcggttccacggaaaccacagtgttccctcactcgactacaacttctgtgcatggagaggagcccaccacctttcactcccgcccagcctcaactcatactaccctcttcactgaggattccacaacatccgggctaactgaggaatcaactgcatttcctgggagccccgcaagtacccagactggtctgcccgctaccctcacaactgccgacctcggggaagagtccacaacgttcccctcctcctctggctctaccggaacaaagttatcccctgcaagatccactactagcggcttggtgggcgaaagtactccaagccgcttatccccctctagtacggaaaccactaccctcccgggctctcccacgacgccctccctgtcagaaaagagtaccaccttttacacatcacctagatctccagatgccactctttcccccgctactacgacctcatcaggcgttagtgaagagagctctacttcccattctcagcctggaagtacccacacgactgccttccctgacagcaccacaacttcagaccttagtcaggaaccgaccacctcgcatagctcccagggttctacagaagccaccctgagccccggctctacaacagcctcatccctgggtcagcagagcaccacctttcattcttctcccggtgatactgagactaccctcctccccgacgataccattacgtcaggcttggtggaagcctcaactcctactcactcctctaccggctcccttcatactacgttgacacccgcttcctcaactagcgccggcctccaggaagaaagtactaccttccagagctggcctagtagctctgacaccactcctagcccccctgggaccaccgctgcaccagtggaagtttccacaacctaccactctcgtccatccagtacgcccacgactcacttttccgcctcgagtactaccctggggaggtcagaagaaagcacaaccgtgcatagctcacctggcgccaccggtacagcactcttcccaacacgttcggctacctcagtgctggtgggcgagccaactacctccccgatttctagcggcagtaccgagacaaccgccttacctggaagcacaaccacagctggcttgagcgaaaaatccaccactttctatagctctcctcgatctccagacaccaccctgagccctgcgtcaaccacaagtagcggtgtaagtgaggagtcaactacaagccattcaaggccgggatctacccacacaacagctttcccaggatcaaccactatgccaggggtgtcccaagagtcaactgccagccactcgagtccaggaagcaccgacaccactctttcgccggggtcgacaacagcttctagcttaggccccgagtccacgacattccatagttcccccggttcaacagaaacaacactgctgccagataatacgacagcctcaggattgctggaagcatccaccccagtgcacagctcaactggatctccccatacgacacttagccccgccgggtcaactaccaggcagggggaatctactacatttcagagttggcctagctcgaaggatacaatgccggcccccccaacaactacttcagccttcgtggagttgtcgacaacatctcatggcagcccgagctctacaccaactactcacttcagtgcttcctccacgactttaggacgcagcgaggaatcgaccaccgttcacagttctcctgtcgctactgcaacaacaccgtcacccgcccgaagcaccacctccggacttgtggaggagtcaacagcctatcacagtagccccggcagcacccaaacaatgcatttccccgaatcatcgacggctagtggcaggagtgaagagtctcggacgagccattcttccacgacgcacactataagctctccacccagcactacttcagctttggtggaagagccgacatcctaccactcatctccaggatctaccgcaactactcacttccctgactctagcacaacaagcggtcgctcagaagagagtactgcctctcactcctcacaggacgctacgggtacaatcgttctccccgcaagaagcacgacatctgttttattaggtgaatctacaacctctccaatcagtagcggaagcatggagacaacagcgcttcccggaagtacaacaacccctgggttgtctgaaaagagcacgacctttcactcatcccctcgaagcccagcaactacactttcacccgccagcaccacatccagtggcgttagcgaagagtctactacatcacatagcaggcctggttccacccacacaacagcatttcccgatagcacaactacacctggactttctcgccacagcacaacgagtcattcctctcccggaagtactgatactacactgctgccggccagcactacaacatctgggccatcacaggagagcaccacgtcccattctagtcctggaagtaccgataccgccctttccccgggctccacaacggctctgtcgtttggacaggagtctacaacgtttcacagttctcccggcagtacccatactacactgtttcccgactccactaccagtagcggcatagtcgaggcttctactcgggtgcattcttccacaggtagcccgagaacaacgctcagccccgctagcagtacctcgcccgggcttcagggtgagtctaccgccttccaaacacaccctgcgagtactcacacaacaccatcacccccaagtaccgcaacagccccagtggaggagagcaccacttaccataggtcccccggaagcacaccaaccacacacttccccgcctctagcaccacctccggccacagcgagaagtctactatctttcacagcagccccgacgcctccggcactacaccttcatccgctcatagcacaacatcaggcaggggcgagtccacaaccagccgcattagccctgggtcgactgagataaccacattgcctgggtcaactacaactccaggtctgagcgaagcatctacaacattctattcctccccccgttcaccaacaactaccctatcccctgcttccatgacatccctcggcgtgggtgaggaaagcacgacaagtcgctcccaacctggttctacacattcaactgtgtcccctgccagcactacgacccccggcctgtccgaagaatcaacaaccgtttactcctcatcccccggaagtaccgagacaactgtctttcctcgcaccccaacaacatcagtgcgcggagaggaacctacaaccttccactctagacccgcttctacacacactaccctcttcaccgaagattcaactacatcaggtctgacagaagagtctacagcctttccaggctccccagcatctacacaaactggtctcccagcgacactaactactgcagacctgggcgaggaatccaccacatttccttcctcctcaggcagcaccggtactacactttcaccagcccgctcaactacgagcggtctcgtgggggagtcaacgcccagtaggctgtctccatctagtacagaaaccaccacacttcccggtagcccaaccacaccgtcccttagtgagaaatccacaactttttacactagccctcgatcccctgatgccacacttagccccgccacaactactagcagcggcgtctccgaggaatcaagtaccagtcactctcagcctggctccacccacaccaccgcttttcctgattcaaccacaacccccgggttgtcacgtcatagcaccacctcccactcaagccccggttctacagatacaacccttctgcctgccagtaccacaacctctggaccctcgcaagaatcaacaacctcccattccagcccaggctcaacggacaccgcattgtcaccgggaagtacaaccgccctgagcttcggtcaggagagcaccaccttccatagttctcctggctccacccatacaaccttattccccgatagtacaacatcatcaggtatagtggaagcaagtactcgggtccactcatcgaccgggtccccaaggaccacactgagccctgcctcttccaccagtcctggcctgcagggtgagagtaccacgtttcagacccaccctgctagcacacacactaccccctctccaccatcaactgccactgcccctgtggaggaatcaacaacatatcataggtcccccggatccacaccaacaacacactttcccgcgtcctccactactagcggccattccgagaaatccacgatttttcattcttctccggacgcttctggcactactccttcgtcggcccattccaccaccagtggcagaggagagtccacgacgtcaagaatctcccccggtagcacagaaatcactaccctgccaggcagcactaccactccaggcctctcagaggctagcaccactttctactcctcacccaggagccccactacaaccctttcaccagcaagtatgaccagtctcggtgtgggagaggagtcaacaacaagccgctcccaaccagggtctactcacagcaccgtaagccctgcctctaccactacccctggcttatctgaggaatccacgacagtgtattcaagttctcccggctcgaccgagactacagtgtttcctcggtccacaacaacatcagtgagaggcgaggaacccaccactttccactcccgacccgcttctacgcacacgacactgttcaccgaggacagtacgacttcgggcctcacagaagaatcaactgcctttccggggtcacctgctagcacccaaaccggcctgccagccacgctcacaactgcagacctgggagaggagagcaccacatttccctccagctcagggagcaccggcaccaccctgagccccgctagaagcactacgagcgggctggttggcgaatcaacaccatcacgactgtcaccaagcagtaccgagactacaacccttccgggtagccctactactccctccctgtctgaaaagagtaccactttctatacctccccccgctctcccgacgccactctctccccagccaccactacgagctctggagtgtcggaggaatctagtactagccattcacagcccggcagtacacacaccactgcattcccggactctaccactacttctggcctctcccaggagcctacggcgtcccactcttctcagggctctaccgaggccaccctttctccgggctctacgactgcttcctcacttggtcagcagtccactaccttccatagctcgcccggcgacacagagactaccttattgcccgacgacaccattacaagtggccttgttgaagcttctacacctacccattcttccaccggaagtctccatactacactcactccagccagctcaacctccgcaggactgcaggaggagagcacaacgtttcagtcctggccttcctcctcggacactacacctagtcccccgggcacaactgccgcacccgtggaggtaagcacaacctatcatagtcgtccctccagcaccccaaccacacattttagcgccagctcaactactttggggagatccgaagaaagtaccaccgtgcactcatcacccggggccaccggcactgccctgttccctacacgtagtgccactagcgtgcttgtgggagaaccgaccaccagccccatcagcagcgggtccaccgagaccactgccctgcctggcagcacaacaactgcaggcctgagtgagaaatccaccactttttatagttctcccaggtccccagatactaccttgtcaccagcatcaaccacatcttccggcgtaagcgaagagtcaacaacttcccacagtcgacctgggtccacgcacaccacggcttttcccggttccaccacaatgcccggagtgtctcaggagtctactgcaagtcactcatccccgggctctaccgacaccactctgagcccaggctcaactactgcctccagccttgggccagaatcaacaactttccactcaggtccaggcagtacggaaacgaccctgctgccggataatactactgcttcaggactgctggaagcttctacccccgtgcactctagcacgggctccccccacacaactcttagtccagcggggtcaactacgcgtcagggggagtctactacattccagtcgtggccgaacagtaaggacacaacacccgctcctccgaccaccacatccgcctttgtggagctctccaccacttctcatggcagtccctccagtaccccaacgacccactttagcgcttcatctacaacgctcgggagaagtgaggagtcgactaccgtacattcatccccggtggctaccgccactactccgtctcctgctcgcagtactacatcaggcctagtagaggaatcgacgacctaccattcctccccaggatccactcaaactatgcactttccagagtccgatactaccagtggacggggtgaagaatccaccacgagccattcatcaacgacccataccataagttctgcacctagcaccacatcggcactcgttgaggagcccacttcctatcattcaagtcctggctcaaccgcaactacacacttccctgatagttcgacgacgagtggacggtcagaagagtccacggcctcccactccagccaggacgctacagggacaatagttctcccagcccgctccaccacatccgttctgcttggtgaaagcaccacttctcccatctccagtggatctatggagactactgcattaccaggatctaccactacacctggactctcagagaagagtacaacttttcactctagcccacgctcgcccgccactaccctgagcccggcctccactaccagttcaggcgtgagcgaggagtccacaacaagccactctagaccaggctctacccatactaccgcattcccagactcgaccaccaccccgggtctgagtaggcattccaccaccagccatagctccccaggctccaccgacacaactctgttaccagcaagtactacgacctcggggagctcccaagagagcacaacatcacactcctcttcaggttctactgacaccgccttgtctccggggagcacgacggcattgtcttttgggcaagaatctaccacgttccatagtagccctgggagtacccacaccacactctttcctgactctactacctcttccggaattgtggaggccagcacacgggtgcactcctctacaggatctccacggacaacactgagccccgccagctcaactagtccaggcctgcagggcgaaagcacagccttccagactcaccccgcttccacccatacaactccttcccccccctcaacagcaacagccccagttgaggagtcgacgacctaccaccggagccccggctcgaccccaacaacccattttcccgccagcagcaccactagtggacactctgagaagagcaccatcttccactccagccctgatgcaagcggaaccacaccatcttccgctcatagcacaacgagcggaagaggcgagagtacaaccagcaggatctccccagggagtaccgagattacaacgctgcccgggtcaacaaccacacctggcctgagtgaggcctctaccaccttttactcctcgccacggagccccaccactaccctgagtcctgcctctatgaccagcctcggggttggagaggagagtactacatctagaagccaacccggcagcacccacagcactgtgtcccccgcctctactaccactcctgggctatctgaagagtcgaccacggtctattcaagttctcctggctctaccgagaccactgtgtttccacggtctacaaccacaagtgttcggagggaggaacccacaacgtttcattcccgcccagccagcacacacactactttattcacagaggactccaccaccagtggactcaccgaagagagcacagcgtttcccggctctccggcatctacacagaccggcctgcccgccacactgactacggcagatcttggcgaagaatcaacaacattcccatccagttccggatccacagggactaaattgtctcccgctcgcagcactacctccggattggttggcgaatctaccccttcccgtttatcacccagtagcaccgaaaccacaaccctgcccggcagccccacgacaccttctctgtcagaaaagtctacaaccttctacacatcccctagaagcccggatgcaactttgtctccagccacaacaacatcttccggtgtttctgaagagagtagtacgtctcactcccagccgggaagtacccatacgaccgctttccctgactcaaccaccacctcaggcctgtcccaagagcctactacctctcacagctcgcagggaagcaccgaagccaccctcagccccgggtctacgaccgcatcttcactgggacaacagtctaccaccttccactccagcccaggcgacacagagaccactctgcttcctgacgataccatcacatccggcctggtggaggctagcacacctactcactcgtccactggctccctgcacaccaccctcacgccagcatcgagcacctctacaggtctgcaagaggagtccaccacattccaatcctggccctcctccagtgacaccactccgtcccccccctccaccacggccgttcctgttgaggtctccactacttaccatagccgtccgtccagcacccccacaacgcacttttcagcaagctcgacaacgttgggaagaagcgaagaatccacaacagtgcattcgtcaccaggagctactggcactgccttatttccaaccagatctgccaccagcgtacttgtgggggagcctaccacttccccaatcagctcaggaagcacagaaaccactgctcttccaggcagcacaaccactgcggggctctctgaaaaatcaacgaccttctatagcagtccccgttctccggataccactctcagtcccgcctctacgacttcttctggcgtatctgaggagagcacaacatctcactctcggccgggcagcatgcacacaaccgccttcccatcttcaaccacaatgcccggggtctcgcaagaatcaactgctagccacagctctcccggctcaaccgatacaaccctgtcccccggaagtactacggcttcctccctggggcctgagtctaccacttttcatagcagccctgggtccacagagaccaccctgcttccagacaatacgaccgccagcggcctattggaagcatcgacaccagttcactccagtactggcagcccccacacaaccttgtcccccgcaggctccacgacaaggcaaggcgaatcaacgacttttcagtcctggcctaacagtaaggatacgacccctgcaccacctactaccacatctgccttcgttgaacttagcactacttcacacggatcccccagttctaccccaacgacccattttagtgctagctcgacgacgttaggtcgcagcgaagagtccacaaccgtccactcttcccccgtggcaactgccaccactccctcccccgccaggagcaccacaagtgggctagtggaagaatctacaacctaccattctagccccgggtccacacagacgatgcactttcccgagtcaaacacaacgtccgggcggggtgaggaatctactaccagccatagtagtaccacccacacaataagcagtgcaccgtctacgactagtgccttggttgaggagccaacatcataccactcctcccccgggagcactgccaccacacattttcccgactcgtcaaccacatcaggccgcagcgaggaatcaaccgcgagtcattcttcccaggacgcgactggaacgatcgtactgccagctaggtctacaaccagcgttcttctgggcgagtccacaaccagcccgatctcctccggatccatggaaaccaccgcgttacccggaagcactacaacgcctgggttgtccgaaaagtccaccacgtttcatagcagcccttcaagcacacctaccacgcacttcagcgccagctccaccacattgggacgcagcgaggagtccacaactgtgcactctagtcctgtggccacagccacaacaccatccccagcccgctcgactaccagtggcctcgtagaggaatccaccgcctatcacagctccccgggctcaacgcaaacaatgcactttcccgaaagtagcaccgcttccgggaggtcagaggagtcgaggacatcacatagcagcacaactcacaccatctctagcccccccagcaccacctccgccctggtggaggagcccacctcgtaccattcttcccctggcagtatagcaactacccacttcccagagagctccaccacgtccggcaggtccgaggagtccacagccagccacagttcgccagataccaacgggattaccccccttccagcccattttactacatctgggaggatcgctgagtctaccacattctatataagcccaggctctatggaaaccaccttggcaagcaccgcaactactccaggtctaagtgccaaatcaacgatattgtattcctcctctagaagcccagaccagacgctgtcccctgcctcaatgacaagctcatctatttcaggcgagcccactagtctgtactcccaggcagagtctactcacactacggctttccccgcctctaccaccacaagtggattatcacaggaatccacaacattccacagtaagccagggtccactgagaccactcttagtcccggcagcatcactacgtctagctttgcacaggagtttacaacccctcattctcagccaggaagtgctctgtccacagtgagtcccgccagcacaactgtacccggactgtccgaagaaagtactaccttctactcatctcctggatctactgaaaccaccgccttttctcatagcaacacaatgtcaatccattcacaacaaagcactcccttcccggattcacccgggttcacacacactgtgctgccagcgacactcactactaccgatatcggccaggagagcaccgccttccattcctctagtgatgctaccggcacgaccccattgcccgcacgctcaaccgcgtcagacctagttggagaacctaccacgttttacattagcccttcccctacatatacaacacttttcccagcttctagttctacctcagggctgactgaggagtccactaccttccacacaagccccagtttcacatccactattgttagcactgaatctctcgagactctggcccctggcctctgccaggagggccaaatctggaatggcaagcaatgcgtctgccctcagggctacgtggggtaccaatgcctctctcccctggagtcctttccagtggagacaccagagaaacttaacgctaccctgggaatgactgtcaaggttacatataggaattttacagaaaagatgaacgacgcaagctcccaagagtaccaaaacttcagtaccctgttcaaaaaccgcatggacgtggtgctgaaaggcgacaatctacctcaataccgcggcgtcaatatccggcggctgcttaacggctctatcgtagttaaaaatgacgtgatcctagaggcagactacacgcttgaatatgaggagctttttgagaacctggcagagatcgtgaaagctaaaattatgaacgagacgcgcaccactcttttggaccccgattcctgccgtaaggccattttatgttactccgaagaagatactttcgtcgattcttccgtaactcccggctttgactttcaggaacaatgtactcagaaggccgccgaaggctacactcaattctactatgtcgatgtgctggacgggaagctcgcatgcgtgaacaagtgtaccaagggaacaaaatcccagatgaattgtaacttagggacttgccaactccagcggtcaggccctaggtgcttgtgcccaaataccaacacccactggtattggggggaaacttgcgaattcaacattgcaaagtctctcgtctacggcattgtgggggcagtgatggctgtgctactcctggctttgatcattctcattattctgttctcactgagccagaggaaacgccaccgcgagcagtatgatgtcccccaggagtggagaaaagagggcacacctggcatattccagaagaccgcgatctgggaagaccagaacctgagagaaagcagatttggcctagaaaacgcctacaataattttcgcccaactcttgaaacagttgacagcgggacagaactccatatccagaggcctgagatggtggcatccaccgtgtag

SEQ ID NO: 62886 - DNA, 16008 bp, Artificial Sequence
  derived and/or modified sequence
atgctcgtgatttggatcctgactctagccctccgactgtgtgcctctgtcacgacagttactccgggatcgaccgttaacaccagtataggtggtaacacgactagcgcgtctacaccaagtagcagtgacccgttcactacctttagtgattacggagttagtgtcacatttattaccggttcaaccgccacgaagcacttcctggacagctccaccaatagtggacactccgaggagagcacagtctcccactctggccccggggcaaccggaaccactctctttccatctcacagcgccacctcggtctttgtcggggagcctaagaccagccctataacctcagcgtccatggaaaccactgccctccccggctctacgacgactgcgggacttagcgagaaatccactaccttctactcttcgccacggagtccagaccgaactctctctcctgcccgcactacaagttccggcgtctctgagaaaagcactactagccactcgagacctggccctacacacacaattgcctttcctgactctacaacgatgcccggggtttcgcaggagtctaccgcttcacactctatcccaggttcaacagataccacactgagtccaggcacaaccactccatcttcattgggacccgagagtactaccttccactcctctccgggttacacaaagacaactcgccttccggacaacacaaccacgagtgggctgctcgaggccagcacccctgtgcacagctccaccggcagtccacacactactctgagtcctagctcctctacaacccatgagggcgaaccaaccacatttcaaagctggccttcttccaaggatacctctccagcaccctctggtactacctccgcctttgtaaagctcagtaccacctaccactcttccccttcctctacccccaccacacacttcagcgccagcagtactactctgggccactccgaggagtccactccagtccactcctcgcctgtggctactgctaccacgccaccccctgcacgatccgctacatctggccatgttgaggagtcaacagcataccataggagtcccggctccactcagacaatgcactttcctgaaagtagtacgacatccggccattctgaggaaagcgccactttccatggcagcacgactcatacaaagagctctaccccttctaccaccgcggctttagctcacacatcctaccacagcagtctgggaagtaccgaaactacccacttccgagattcttcgactatcagtgggcgctctgaagagagcaaggcctcccactccagcccagatgccatggcaactacagtgttgcccgctgggagcacaccctccgttctagtgggggacagcacaccatccccaatcagcagtggcagcatggagacaacagcgctgcccggttccacgactaaacctggcctgtctgaaaagtcgaccactttctattcatctcccagatccccggacaccacacatttacctgcgtccatgaccagcagtggcgtatcagaggagtctaccacctctcattcaagaccaggctctacccacactacagctttccccggctctacaacgatgcctgggctgagtcaagagtcaactgcttcccactccagcccgggaccgacagacaccacgcttagccccggatcaaccacagcgagcagtctgggaccagaatacaccacgtttcacagccggcctgggagcacagagaccacactcctgcctgataatacgaccgcctccggtctgctcgaggcttccatgcccgtgcacagctccactcgttccccgcatacgaccctatctccagccgggtccaccacacgacagggggaaagcaccactttccacagttggccctcttcaaaggatacccggcccgctccgccgacaaccacatctgcattcgtcgagccgtcgactactagccacggcagcccaagcagcatccctactacacatatctccgctagatccaccacgagtgggctcgtcgaggagtctactacgtatcacagcagtccaggatccacacagactatgcattttcctgagagcgatacaacatccgggaggggcgaggaaagcacaacaagccacagtagcacaactcacactatatctagcgcgccgagcaccactagtgcgcttgtagaggagcctactagctatcattcaagtccaggcagcacggcaaccacacatttccctgattcctcaaccacttccggacggagcgaggagtccaccgcgtcgcactcaagccaggacgccacagggactatcgtcctccctgccagatcaactactagcgtgctcttgggggagagcaccacctccccaatttcctctggttcgatggagacaaccgctctgccagggtcaaccacgacaccagggctcagtgaaaggagcaccacctttcactcgtcacctcgctctcccgcaactaccttgagccccgcttcaaccacttcctctggtgtatctgaggaaagcacaacttcaagatccagaccaggtagcactcatacgactgcttttccggattctacaaccactcctggactctcacgtcactctaccacatctcattcttcgccggggtccacagacactaccctcctccctgccagcaccacgacctccggcccatcccaggaatcaaccacctctcactcatctagtggcagcacagataccgccctgtccccaggaagcaccacggcgctgagctttggccaagagagtaccaccttccactccaatcccggaagtacccatacgacactgttcccggattcaaccacttctagtggtatcgttgaggcctccacgcgagtccatagttccactgggtcacctcgtaccacgctatccccagcatcttcaacatctccgggcttgcagggcgagagcactgcctttcagacccaccctgcatccacacacaccactccgagcccaccttccactgctaccgcccctgtcgaagaatctaccacgtaccaccgatctcccggatcgactccaaccacgcattttcccgcctctagcaccacaagcggccattccgagaagagtactatctttcatagctcccccgacgcttccggaaccacaccaagcagcgctcacagcacaacatcgggccgcggtgaaagcaccacctcaaggatttcgccaggaagcacggaaattactacactgcccggcagtaccacaacacccgggctgtcggaagcctccaccactttctattcctctcctcggagtcctaccaccaccctctcccccgctagcatgacctcacttggtgtgggtgaagaatccaccacctcacggagccagccaggaagcacccatagcacagtatccccagccagcactactacacccggtctgagcgaggagtcaactaccgtttattcttctagtcgtggatcgacggagaccactgtcttcccacactccacgaccacttccgttcacggagaggaacccaccacttttcattctagaccggcaagtacacatacaacgctctttacggaggactcaaccaccagtggactgaccgaggaaagcactgccttccctgggtcgcccgcctcaacgcaaaccggccttcccgcaactctcacaaccgctgacctcggcgaagaaagcactacatttcccagcagcagcgggagcacaggcactaaactcagtcctgccaggagtaccacctcaggccttgtgggcgaatcaaccccatcacggctcagtcctagcagcaccgagaccacaactctgccaggcagtccgaccaccccttcactaagcgagaagagcactaccttttatacgtccccaaggagcccagacgccaccctgagcccagccacaactaccagttcaggggtgagcgaggagagctccaccagccactcccagcctggctcgacccatacaacagcctttcccgacagcactactacctccgacctttcccaggaaccaactaccagccatagctcccaagggagcactgaggcgacgctctcacctggtagcacgactgcaagttctctgggacagcaatccaccacttttcatagctcacctggagatacagaaacaacgctgttaccagatgacaccataacgtctggtctggtcgaagccagtactccgacccactccagtacaggatccctacataccactcttactccagcgtcatctacaagtgccggactgcaggaggaaagcacaacgtttcaatcctggcccagcagcagcgatacaacaccctccccaccgggcacaacagccgcaccagtcgaggtgtctaccacgtaccattccaggccatccagcacccctaccactcacttctcagctagttccacaacactcggaagaagcgaggagtccacaacggtgcattcatctcctggggctactggcacggccctgttccccaccagatccgcgacaagtgtgctggtgggggagcccaccaccagtcccatcagctctggcagtaccgaaaccaccgctctgccagggagcactaccactgctggcctctccgagaagtccactactttttactcatccccgaggtccccagatacaacgctgagtcctgccagcactacatcatcgggggtgagcgaggaatctaccacatcgcacagtagaccaggctccactcacacgaccgcgttccccggatccacaactatgccgggcgtgagccaggagtccaccgcttcacacagctctccgggaagcacagacaccacgctgagtccaggctccacaacagcttcctccctgggacctgagagtaccacttttcacagtagcccaggcagtactgaaaccactctcttgcctgataacacaaccgcatcagggctgctcgaggcatccacacctgtccattcgtctacggggagtcctcacacaactctctcaccagccggtagtacaacccgccaaggggagtccaccaccttccagtcctggccctcctcgaaagacacaatgccagccccccccacaactacgagcgcgttcgtggaactgagcaccacatcccatggctcaccttcaagtaccccaacaacccatttctccgcatccagtacaaccctggggagaagtgaagagtctacaaccgtgcacagttcccccgtggccaccgcaaccacaccaagcccggcccgctctactacctccggattggtcgaagaatcaacagcataccatagctcccccgggagtacacagacaatgcatttccctgagtcctctacagcgagcggcagaagcgaggaaagcagaacatcccacagttccactacccacaccatttcatctcctcccagcacgacctcagccctggtggaagaaccaacaagctatcacagtagcccgggttcgactgccactacacatttcccggattcctccacgacctccgggagaagcgaggaatcgaccgcaagtcactcctcgcaggatgccactggcaccattgtgctgccggcaaggtctacaacctctgttctcctgggagaatccactacctctcctatcagtagcggtagtatggaaactactgcccttcctggctctactaccacaccgggcctgtctgagaaatcaactactttccactcctccccaagaagccctgccaccaccctatctccggccagcaccacttcttcaggcgtttccgaagaatccactacatctcattctcgaccaggatctacacacacaaccgcttttccagacagcaccactaccccaggccttagcagacacagcactacgtcgcatagctcaccaggatccaccgataccactctgctccctgcttctacaacaacttctgggcctagtcaggagtcgaccacctcccattctagtccagggtctaccgacaccgctctgagtcccgggagtacaaccgccctgtccttcggtcaggagtcaaccactttccactcgtcacctgggtcgacacacaccacgctttttcctgacagcacaacctcttccggtatcgtcgaggcatctacccgtgtccactcaagcaccggttcgccccgtacgacgctgagtccagcctcatctacctctcccgggctgcagggagaatccacagccttccagactcatccagcctccacgcacacaaccccgagccccccaagtaccgccactgcccccgttgaggaaagtacgacttatcaccgaagtcccggatccacaccgaccacccactttcctgctagcagcacaacgagcgggcacagcgaaaaatccactatatttcactccagccctgacgccagcgggacaaccccttcttccgcacactctacaacaagcggaaggggtgaatctacgacttcacggattagtcccggctccacagaaatcactacattgcccgggagcacaacaacaccaggcttgagtgaagcgtccactacattctacagcagccccaggtctccaacgacaactctcagccctgcttccatgacaagtctgggtgttggcgaggaaagcaccacatcccggtcgcagcctgggagcacccactctactgtgtctccagccagcactaccactcccggattgtctgaggaatcaaccactgtgtacagctcttccccaggatctaccgagactactgttttcccccgcacacctaccactagtgtccgcggagaagaacctacgactttccacagcaggccagcctcgacacacaccacccttttcacagaggactctaccacctccggactgacagaagaatctaccgcttttcctggcagtccagctagcacacaaaccggactccctgcaacactcaccacagcagacttaggagaagagtcaacaacatttcccagctctagtggatcaactgggaccactctctctcctgcccgctctacaacgtctggcctggtgggagagtctacccctagcaggttgagcccgagcagcacagagacaactaccctcccaggttctcctacaacaccaagcctcagcgagaaaagtacaaccttctacactagtccacggtccccagacgcgactcttagcccagcgaccacaactagttcaggggtctcggaggagtcctccacctctcatagccagccaggcagcacccatacgaccgcatttcctgactcaacgactactccaggcctgagccgtcacagcactacgagccactcctctccgggcagtactgacaccaccctcctgcccgcatcaacgaccacctccggccccagtcaagagtctacaacatctcactcgagccctggaagtacagatactgctctgtccccgggttcaactaccgcgttgagctttggtcaggaatctacaacttttcattcttctcccggctccactcacactactttgttcccggactctacaacttctagcgggatcgtggaggccagtacccgagtgcactctagtactgggtcaccccgcactactttgagccctgcttcttcgaccagccctggacttcaaggtgaatcaactacattccagacacacccagcgtctacccatacaacgccttctccacccagtacagcaacagctccagtggaggaatctacaacataccatcgatcccccgggagcactccaaccactcactttcccgctagttctacaacgagtggacatagtgaaaagagcacaatctttcatagctctcctgatgcttccggaaccacccccagctctgctcatagtaccaccagtgggcggggggagtcaaccactagtcgcatctcccctggtagcactgagataaccacactgccaggaagtaccactactcccggtctgtctgaagcgtcaacaacattttattcaagcccccgaagtccaacaactacgttgtccccagcttctatgacctctctgggcgtgggggaggagagtaccacatcacggtcacagccggggtcaacccactccaccgtgtctcccgctagtactaccaccccaggcctctcagaagaaagtacaactgtgtattcatcaagcccggggtccaccgagacaaccgtcttcccaagatcaacaactacatcggtgagaggcgaagagcccaccacgtttcactcaagaccagccagcacccatacaacactctttacagaggattcaactacctctggactgacagaagagtctaccgcatttcccggaagccctgcttccacgcagaccggcctgcccgctacattaacaaccgctgatttgggggaagaatccacaacattccccagcagttccggatcaactggcaccaccttgagcccagctaggtctaccacatccggcctggtgggagaatccacaccctctagattaagtccgtctagtaccgaaaccacgacactccctggaagcccgactacaccatccctgagtgagaagagtactacgttctacacatcaccccgctcccctgatgcaactctaagcccagcaactacgacaagctccggggtgtcagaggaaagcagcacatctcatagccaaccggggtcgacccacactactgcgttcccggattccactacaacgtcaggactctcacaggagcctacagcgtcccatagctctcagggttcaacggaggccacactgagccccggcagcaccacggcctcttccctcgggcagcagtctactacctttcatagcagccctggagacaccgagacaacgctgctccctgatgatactataaccagcgggctggtcgaagctagtactcctacgcattcatcaacaggctcgttgcatactaccttgacgcctgcttcatcgactagcgccggactgcaggaggagtcaacaaccttccaatcctggccttctagctctgacacgaccccctcgccaccgggaaccactgctgcccctgtagaagtatcgacaacctaccactctcgcccaagcagcacccccactacccacttctctgcatcctctaccactttaggcaggagcgaagagtccaccactgtgcacagtagtccaggagccaccggcacggcactgtttcccacaaggagcgccacctccgtcctggtgggagaacccacgacaagtcctataagctctggatctacagagaccaccgccctacccggcagtaccaccacagccggactcagcgagaaatccacaacattttactcatccccaaggtctcccgacaccactctaagcccagcatctactacatcatctggagtgtcggaagaatcaactacttcacactctagacccgggagcacccataccacggctttccctggatcaactaccatgcccggcgttagccaggagagcaccgcttcacattcctcccctggcagtactgatacaacactctcccctggatccaccacagcctctagcctcggtccagagtccacaaccttccacagtggaccaggatctactgaaacaaccttgttgccggacaatacaaccgcttccgggttgctagaggcttcaacacccgtgcactcatcgaccggctccccacatacgacactctcacccgccggctctacgactcggcagggggagagcaccacatttcagagctggcctaacagtaaggacactacaccagccccgcctactactacttctgcattcgtggagctgtctaccacatctcatggcagcccaagctctaccccaacaacccacttttctgccagttctaccacccttggacggagtgaggagtccaccacagtgcattcaagccccgttgcaaccgccactaccccttctccggcgcggtcaacgacttcgggcctcgttgaggaatccacaacgtatcactcaagcccgggttctacccagacaatgcacttcccagaaagcgatacgacgtcagggaggggtgaagaaagcaccacatctcacagtagcactacccataccatctcgagtgcgcccagcactacctctgccctggtagaggagccaaccagctaccatagctcccccgggtcaacagccacaacgcacttcccagatagcagcactactagtggcagatcagaagagtccaccgcctctcatagtagccaggacgccaccgggaccattgtactccccgcaaggtccaccacctcagttttgcttggcgaatcaaccaccagccctatctcttcgggaagtatggagactacggcgttgcctggttccacaacaacccccgggctgagcgagaagtctaccacattccacagctcaccaaggtccccggccacaacactgagcccggcgagcacaacatcttcaggagtttccgaggagagcaccacgtctcacagcagaccagggagcacacacactacagctttccccgactcaacgacaacacctggtctgtctagacatagcaccacctcccactcatcacctggtagcaccgacaccacgttgctccccgcttctacaaccacctctggatcctcacaggagtcaacgactagccactcaagttcggggtctaccgacaccgctttatcacccggatccacgacagccctgagttttggacaggaatctactaccttccatagttccccaggctccacccacaccaccctgttcccagattccaccaccagcagtggaattgtcgaggccagcacgcgcgtacacagctctacaggttcaccgaggacaaccctcagccccgcctcatccacatcaccggggcttcaaggagaatcgacggcattccaaactcacccagccagcacccacacaacacctagcccaccgagcacagcaacagctcctgtagaagagtccaccacctaccacaggtccccaggctcgacccccactacacactttccagcatcttctacaacaagtgggcattccgaaaaaagcacgattttccactcttccccagatgccagtggcaccactccgagttctgcgcattccaccactagtggaaggggggagagcaccacatccaggatctctccgggttccactgaaattactacccttccagggtccaccaccaccccaggattgtcagaggctagtaccaccttctattcatccccccgctcaccgactactactctttcaccagctagtatgacctcacttggcgtgggcgaggagagtaccacctcccggtcccagccaggcagcacacatagcacggtaagccctgcctccaccacgacccctgggctctccgaggaatcaaccacagtttatagctctagccctggctctaccgagacaacggtttttccacgttcaaccacaacaagcgtcagacgtgaggagcctacaacctttcacagtcgccccgcctcaactcatactaccctgtttacagaggattctaccacctctggactgacagaagagtctactgcatttccggggtcgcctgcctccactcagacaggactgcccgccacactgacaacagctgacctgggggaggagtctaccacgtttcctagcagctcaggatcaaccggtacaaagctgtcacctgcacgatctacaactagcggacttgttggtgagtcaactccctcaagactgagcccttccagcacagaaacaactaccttgcctggttcccctactaccccttctctctctgagaaaagcactaccttctacacttcaccacggtcacctgatgccacactgtcacccgccactaccacctcctccggggtgtccgaggaaagctcaacaagccatagccaaccagggtccacacataccacagcctttcctgacagcactacaacttctggactgagccaggagccaactacctcccactcctctcagggatctaccgaagctaccctgtcacccgggagcactacagccagctccctggggcaacagtcaacgactttccattcttccccaggggatactgagaccacgctgttaccagatgatacaatcacatccggcttagtggaggcttctacccctacccactcctccacaggaagcctgcacacaaccttgacccctgcctcttccacatccactggcttacaggaggaaagtacaacgttccagtcttggccgagtagttcggacaccacaccctccccaccatccacgacagctgtccctgtggaagtgtccaccacataccattctcggccgagttcaacccccactacccattttagcgcctcaagcacgacacttgggcgaagcgaggagtcaacaactgtgcatagcagcccgggtgccacagggacagcccttttccccacacggtccgctacgagcgtattggttggcgagccaactacatcccccattagctccgggagcacagaaactacagcgctgcccggctccacaacaacagccggtttatcggaaaagtcgaccactttctacagcagccctaggagccccgacaccacactcagtcctgcttccactacctcttcgggggtgagtgaagagtctacgacttcgcactctagacccggttcaatgcatacaactgcctttccttccagcaccaccatgcccggcgtatcacaggaatccacggcatcccacagttcccccgggtccaccgacacaactttgtcacctggtagcactacagcatcttcactgggacctgagtctaccacgtttcattcctcacctggatctactgaaacaaccctgcttcccgacaatactacggcctctgggctgttggaggccagtacccctgttcacagcagcaccgggtctcctcacaccacattatcgcctgccggctctactactaggcagggggaaagcactacgtttcagtcctggccaaattccaaggacactacacctgcaccccccaccaccacttcagctttcgtggagctgtctaccactagccatggctctccgtcttctacccctaccacacacttcagtgcatctagcactacattgggtcgcagcgaggagtccacgacagttcacagttccccggtcgccaccgccacaacaccctccccagccagatcaactacaagtgggctcgtggaggaatccacaacttaccatagcagtccagggtccactcagaccatgcatttcccagagtctaacactacaagcgggcgaggtgaggagtccacaacctctcacagcagcacaactcacaccatctctagtgccccttccacaaccagcgcactagtcgaagagccaacgtcctaccattcctcacccgggtccaccgcaaccacacactttccagactcaagcaccactagcggtcggtccgaggaatccacagcatcccactctagtcaggacgccactggtaccattgtgctgcccgcccggagcacgaccagtgtgttgctgggagagagcacgacgtctccaatctcctccggttctatggagacaacggccctcccggggtccaccaccactcctggattgagcgaaaagtccaccacgttccattcaagccctagtagcacacctactacgcatttctcggcttcttctacgacactgggacggagcgaagagagcactaccgtgcatagctctcccgtagcgactgcgacaacgccatcaccagcccgcagcaccacaagtggcctagtcgaggagagtaccgcctaccacagcagcccaggctcaactcagaccatgcactttcctgagtcttccactgcatctgggagatcagaggaaagccgcacctcacacagctctaccacgcatacaattagttcccctccctctaccacttccgctctcgtagaggagccaacgtcctatcattcttctcctgggtctattgccaccactcattttcctgaatcatctaccaccagcggcagatctgaggaaagcacagccagtcacagtagcccagatactaacggaattaccccactgcccgcgcatttcactacatcggggagaatagcagaatcgaccacattctacatctcccctggtagtatggagaccactcttgcttcaactgccactactcctggactttctgcgaagagtaccatactatatagctcttctcggtccccggatcaaactctgagtccggcatcaatgactagtagctctatctccggagagcctacctccctgtactcccaggctgagagtacgcatacgacagcgttcccagcctccaccactacttccgggctgtcacaggagtctacaactttccattccaagcctgggtccaccgaaacaaccctcagccctgggagcattaccacctcatcattcgcccaggagtttactaccccacatagtcagccaggctccgccttgtctaccgtgagccccgcttcaacaacagtacccgggctttctgaggaatcaacaaccttctactcgtctccgggatcaaccgagacgacagcgttttcccacagtaatacaatgagcatccactcccagcagagcacacccttccccgactccccaggattcactcatactgtgctgcctgctacgctgactaccacagatattggccaggagtctactgcttttcactcatccagcgacgcaactggcactaccccactgcccgcccggtctactgcctcagatctggtcggagagcccactactttttacattagcccaagtccgacgtacacgacacttttccccgcctcttcaagtacatccggactgactgaagaatccaccaccttccataccagtccaagcttcacttcgaccatagtctctaccgaatctctggagaccctggctcccggcctgtgtcaagaggggcagatttggaacgggaagcagtgcgtgtgcccacagggttatgtggggtatcagtgtctgtcaccgctcgaatcttttcctgtcgagacgcctgaaaagcttaacgccacattaggaatgaccgttaaggtcacttacagaaacttcacagaaaaaatgaacgacgccagctcacaggagtatcagaatttttctacactgttcaagaacaggatggacgtcgttctgaaaggagataacctacctcagtaccgcggcgtgaatatcaggagactactcaacgggtcgatcgtggtgaagaacgacgtcatacttgaagcggattacacactcgaatacgaagagctcttcgagaacctggcagagatcgtgaaagcgaaaatcatgaacgagactagaactacgttgttagacccagacagctgtagaaaagccatattgtgttactccgaggaggacacattcgtggactcctccgtaacacctggcttcgattttcaggaacaatgcacccaaaaagctgccgaagggtatactcagttttattacgtggacgtgcttgacggcaaattggcgtgtgttaacaaatgtacaaagggtaccaaaagccagatgaactgcaacttgggaacttgccagctgcagcggtctggcccaaggtgtctatgtcctaataccaatacccactggtactggggagagacatgcgagttcaacattgcaaagtctttggtgtatggcattgtgggcgcggtgatggccgttctgctcctcgccctcatcatcctcattatcctgttctccctgtcccaacggaaaagacatagggaacaatacgacgtccctcaggaatggcgtaaagagggcacacccgggattttccagaagactgcgatctgggaagaccagaatctgcgcgagtcacgctttgggcttgaaaacgcctacaacaattttcgcccaactctggaaactgtggattctggcactgagctccacatccaacgcccagaaatggtggctagtacggtgtag

SEQ ID NO: 62887 - DNA, 16437 bp, Artificial Sequence
  derived and/or modified sequence
atgctggtgatctggatcctgaccctggccctgcggctgtgtgcctctgtgaccaccgtgaccccagagggcagcgctgtgcacaaggccatcagccagcagggcaccctgtggacaggagaggtgctggagaagcagacagtggagcagggcaagagcaccctgcggcggcagaagaaccacttccacaggtctgctggggagctgcgctgcagaaatgccctgaaggatgaaggagccagcgctggctggagcgtgatgtttgctggggagagcgtggtggtgctggtgcacctgtggatgaccggggcccgggtgaagaacctgggcctggtggagtttgccagccctggagatgatggagatggccgggcagagggcttcagcctgggcctgcccctgtctgagcaggcccgggctgctggggcccgggagaaggagcggcaggagaccgtcatcaaccacagcaccttcagcggcttcagccagatcaccggcagcacagtgaacaccagcattggaggcaacaccaccagcgccagcacccccagcagcagtgaccccttcaccaccttcagtgactatggagtgtctgtgaccttcatcaccggcagcacagccaccaagcacttcctggacagcagcaccaacagcggccacagcgaggagagcacagtgagccacagcggccctggggccaccggcaccaccctcttccccagccacagcgccacctctgtgtttgtgggggagcccaagaccagccccatcaccagcgcctccatggagaccacagccctgcccggcagcaccaccacagctggcctgtctgagaagagcaccaccttctacagcagccccaggagcccagacaggaccctgagccctgcccggaccaccagcagcggcgtgtctgagaagagcaccaccagccacagcaggcctggccccacccacaccatcgccttcccagacagcaccaccatgcctggggtgtcccaggagagcacagccagccacagcatccctggcagcacagacaccaccctgagccctggcaccaccacccccagcagcctgggccctgagagcaccaccttccacagcagccctggctacaccaagaccacccggctgcctgacaacaccaccaccagcggcctgctggaggccagcacccctgtgcacagcagcacaggcagcccccacaccaccctgagccccagcagcagcaccacccatgaaggagagcccaccaccttccagagctggcccagcagcaaggacaccagccctgcccccagcggcaccaccagcgcctttgtgaagctgagcaccacctaccacagcagccccagcagcacccccaccacccacttcagcgccagcagcaccaccctgggccacagcgaggagagcacccctgtgcacagcagccctgtggccacagccaccaccccacctccagcccggagcgccaccagcggccacgtggaggagagcacagcctaccacaggagccctggcagcacccagaccatgcacttccctgagagcagcaccaccagcggccacagcgaggagagcgccaccttccacggcagcaccacccacaccaagagcagcacccccagcaccacagctgccctggcccacaccagctaccacagcagcctgggcagcacagagaccacccacttccgggacagcagcaccatcagcggccgctctgaggagagcaaggccagccacagcagcccagatgccatggccaccaccgtgctgcctgctggcagcacccccagcgtgctggtgggggacagcacccccagccccatcagcagcggctccatggagaccacagccctgcccggcagcaccaccaagccaggcctgtctgagaagagcaccaccttctacagcagccccaggagcccagacaccacccacctgcctgcctccatgaccagcagcggcgtgtctgaggagagcaccaccagccacagcaggcctggcagcacccacaccacagccttccctggcagcaccaccatgcctggcctgagccaggagagcacagccagccacagcagccctggccccacagacaccaccctgagccctggcagcaccacagccagcagcctgggccctgagtacaccaccttccacagcaggcctggcagcacagagaccaccctgctgcctgacaacaccacagccagcggcctgctggaggcctccatgcctgtgcacagcagcaccaggagcccccacaccaccctgagccctgctggcagcaccacccggcagggcgagagcaccaccttccacagctggcccagcagcaaggacaccaggcctgccccacccaccaccaccagcgcctttgtggagcccagcaccaccagccacggcagccccagcagcatccccaccacccacatcagcgcccggagcaccaccagcggcctggtggaggagagcaccacctaccacagcagccctggcagcacccagaccatgcacttccctgagagtgacaccaccagcggccgcggggaggagagcaccaccagccacagcagcaccacccacaccatcagcagcgcccccagcaccaccagcgccctggtggaggagcccaccagctaccacagcagccctggcagcacagccaccacccacttcccagacagcagcaccaccagcggccgctctgaggagagcacagccagccacagcagccaggatgccaccggcaccatcgtgctgcctgcccggagcaccacctctgtgctgctgggggagagcaccaccagccccatcagcagcggctccatggagaccacagccctgcccggcagcaccaccaccccaggcctgtctgagaggagcaccaccttccacagcagccccaggagccctgccaccaccctgagccctgccagcaccaccagcagcggcgtgtctgaggagagcaccaccagccgcagcaggcctggcagcacccacaccacagccttcccagacagcaccaccaccccaggcctgagccgccacagcaccaccagccacagcagccctggcagcacagacaccaccctgctgcctgccagcaccaccaccagcggccccagccaggagagcaccaccagccacagcagcagcggcagcacagacacagccctgagccctggcagcaccacagccctgagctttggccaggagagcaccaccttccacagcaaccctggcagcacccacaccaccctcttcccagacagcaccaccagcagcggcatcgtggaggccagcaccagggtgcacagcagcacaggcagccccaggaccaccctgagccctgccagcagcaccagccctggcctgcagggcgagagcacagccttccagacccacccagccagcacccacaccacccccagcccccccagcacagccacagcccctgtggaggagagcaccacctaccacaggagccctggcagcacccccaccacccacttccctgccagcagcaccaccagcggccacagcgagaagagcaccatcttccacagcagcccagatgccagcggcaccacccccagcagcgcccacagcaccaccagcggccgcggggagagcaccaccagccgcatcagccctggcagcacagagatcaccaccctgcccggcagcaccaccaccccaggcctgtctgaggccagcaccaccttctacagcagccccaggagccccaccaccaccctgagccctgcctccatgaccagcctgggcgtgggggaggagagcaccaccagccgcagccagcccggcagcacccacagcacagtgtccccagccagcaccaccaccccaggcctgtctgaggagagcaccaccgtgtacagcagcagccggggcagcacagagaccaccgtcttcccccacagcaccaccacctctgtgcatggagaggagcccaccaccttccacagcaggcctgccagcacccacaccaccctcttcacagaggacagcaccaccagcggcctgacagaggagagcacagccttccctggcagccctgccagcacccagacaggcctgcctgccaccctgaccacagctgacctgggggaggagagcaccaccttccccagcagcagcggcagcacaggcaccaagctgagccctgcccggagcaccaccagcggcctggtgggggagagcacccccagccggctgagccccagcagcacagagaccaccaccctgcccggcagccccaccacccccagcctgtctgagaagagcaccaccttctacaccagccccaggagcccagatgccaccctgagccctgccaccaccaccagcagcggcgtgtctgaggagagcagcaccagccacagccagcccggcagcacccacaccacagccttcccagacagcaccaccaccagtgacctgagccaggagcccaccaccagccacagcagccagggcagcacagaggccaccctgagccctggcagcaccacagccagcagcctgggccagcagagcaccaccttccacagcagccctggggacacagagaccaccctgctgcctgatgacaccatcaccagcggcctggtggaggccagcacccccacccacagcagcacaggcagcctgcacaccaccctgaccccagccagcagcaccagcgctggcctgcaggaggagagcaccaccttccagagctggcccagcagcagtgacaccacccccagccccccaggcaccacagctgcccctgtggaggtgtccaccacctaccacagccggcccagcagcacccccaccacccacttcagcgccagcagcaccaccctgggccgctctgaggagagcaccaccgtgcacagcagccctggggccactggaacagccctcttccccaccaggtctgccacctctgtgctggtgggggagcccaccaccagccccatcagcagcggcagcacagagaccacagccctgcccggcagcaccaccacagctggcctgtctgagaagagcaccaccttctacagcagccccaggagcccagacaccaccctgagccctgccagcaccaccagcagtggagtgtctgaggagagcaccaccagccacagccggcccggcagcacccacaccacagccttccctggcagcaccaccatgcctggggtgtcccaggagagcacagccagccacagcagccctggcagcacagacaccaccctgagccctggcagcaccacagccagcagcctgggccctgagagcaccaccttccacagcagccctggcagcacagagaccaccctgctgcctgacaacaccacagccagcggcctgctggaggccagcacccctgtgcacagcagcacaggcagcccccacaccaccctgagccctgctggcagcaccacccggcagggcgagagcaccaccttccagagctggcccagcagcaaggacaccatgcctgccccacccaccaccaccagcgcctttgtggagctgagcaccaccagccacggcagccccagcagcacccccaccacccacttcagcgccagcagcaccaccctgggccgctctgaggagagcaccaccgtgcacagcagccctgtggccacagccaccacccccagccctgcccggagcaccaccagcggcctggtggaggagagcacagcctaccacagcagccctggcagcacccagaccatgcacttccctgagagcagcacagccagcggccgctctgaggagagcaggaccagccacagcagcaccacccacaccatcagcagcccccccagcaccaccagcgccctggtggaggagcccaccagctaccacagcagccctggcagcacagccaccacccacttcccagacagcagcaccaccagcggccgctctgaggagagcacagccagccacagcagccaggatgccaccggcaccatcgtgctgcctgcccggagcaccacctctgtgctgctgggggagagcaccaccagccccatcagcagcggctccatggagaccacagccctgcccggcagcaccaccaccccaggcctgtctgagaagagcaccaccttccacagcagccccaggagccctgccaccaccctgagccctgccagcaccaccagcagtggagtgtctgaggagagcaccaccagccacagccggcccggcagcacccacaccacagccttcccagacagcaccaccaccccaggcctgagccgccacagcaccaccagccacagcagccctggcagcacagacaccaccctgctgcctgccagcaccaccaccagcggccccagccaggagagcaccaccagccacagcagccctggcagcacagacacagccctgagccctggcagcaccacagccctgagctttggccaggagagcaccaccttccacagcagccctggcagcacccacaccaccctcttcccagacagcaccaccagcagcggcatcgtggaggccagcaccagggtgcacagcagcacaggcagccccaggaccaccctgagccctgccagcagcaccagccctggcctgcagggcgagagcacagccttccagacccacccagccagcacccacaccacccccagcccccccagcacagccacagcccctgtggaggagagcaccacctaccacaggagccctggcagcacccccaccacccacttccctgccagcagcaccaccagcggccacagcgagaagagcaccatcttccacagcagcccagatgccagcggcaccacccccagcagcgcccacagcaccaccagcggccgcggggagagcaccaccagccgcatcagccctggcagcacagagatcaccaccctgcccggcagcaccaccaccccaggcctgtctgaggccagcaccaccttctacagcagccccaggagccccaccaccaccctgagccctgcctccatgaccagcctgggcgtgggggaggagagcaccaccagccgcagccagcccggcagcacccacagcacagtgtccccagccagcaccaccaccccaggcctgtctgaggagagcaccaccgtgtacagcagcagccctggcagcacagagaccaccgtcttccccaggacccccaccacctctgtgcggggggaggagcccaccaccttccacagcaggcctgccagcacccacaccaccctcttcacagaggacagcaccaccagcggcctgacagaggagagcacagccttccctggcagccctgccagcacccagacaggcctgcctgccaccctgaccacagctgacctgggggaggagagcaccaccttccccagcagcagcggcagcacaggcaccaccctgagccctgcccggagcaccaccagcggcctggtgggggagagcacccccagccggctgagccccagcagcacagagaccaccaccctgcccggcagccccaccacccccagcctgtctgagaagagcaccaccttctacaccagccccaggagcccagatgccaccctgagccctgccaccaccaccagcagtggagtgtctgaggagagcagcaccagccacagccagcccggcagcacccacaccacagccttcccagacagcaccaccaccccaggcctgagccgccacagcaccaccagccacagcagccctggcagcacagacaccaccctgctgcctgccagcaccaccaccagcggccccagccaggagagcaccaccagccacagcagccctggcagcacagacacagccctgagccctggcagcaccacagccctgagctttggccaggagagcaccaccttccacagcagccctggcagcacccacaccaccctcttcccagacagcaccaccagcagcggcatcgtggaggccagcaccagggtgcacagcagcacaggcagccccaggaccaccctgagccctgccagcagcaccagccctggcctgcagggcgagagcaccaccttccagacccacccagccagcacccacaccacccccagcccccccagcacagccacagcccctgtggaggagagcaccacctaccacaggagccctggcagcacccccaccacccacttccctgccagcagcaccaccagcggccacagcgagaagagcaccatcttccacagcagcccagatgccagcggcaccacccccagcagcgcccacagcaccaccagcggccgcggggagagcaccaccagccgcatcagccctggcagcacagagatcaccaccctgcccggcagcaccaccaccccaggcctgtctgaggccagcaccaccttctacagcagccccaggagccccaccaccaccctgagccctgcctccatgaccagcctgggcgtgggggaggagagcaccaccagccgcagccagcccggcagcacccacagcacagtgtccccagccagcaccaccaccccaggcctgtctgaggagagcaccaccgtgtacagcagcagccctggcagcacagagaccaccgtcttccccaggagcaccaccacctctgtgcggggggaggagcccaccaccttccacagcaggcctgccagcacccacaccaccctcttcacagaggacagcaccaccagcggcctgacagaggagagcacagccttccctggcagccctgccagcacccagacaggcctgcctgccaccctgaccacagctgacctgggggaggagagcaccaccttccccagcagcagcggcagcacaggcaccaccctgagccctgcccggagcaccaccagcggcctggtgggggagagcacccccagccggctgagccccagcagcacagagaccaccaccctgcccggcagccccaccacccccagcctgtctgagaagagcaccaccttctacaccagccccaggagcccagatgccaccctgagccctgccaccaccaccagcagtggagtgtctgaggagagcagcaccagccacagccagcccggcagcacccacaccacagccttcccagacagcaccaccaccagcggcctgagccaggagcccacagccagccacagcagccagggcagcacagaggccaccctgagccctggcagcaccacagccagcagcctgggccagcagagcaccaccttccacagcagccctggggacacagagaccaccctgctgcctgatgacaccatcaccagcggcctggtggaggccagcacccccacccacagcagcacaggcagcctgcacaccaccctgaccccagccagcagcaccagcgctggcctgcaggaggagagcaccaccttccagagctggcccagcagcagtgacaccacccccagccccccaggcaccacagctgcccctgtggaggtgtccaccacctaccacagccggcccagcagcacccccaccacccacttcagcgccagcagcaccaccctgggccgctctgaggagagcaccaccgtgcacagcagccctggggccaccggcacagccctcttccccaccaggtctgccacctctgtgctggtgggggagcccaccaccagccccatcagcagcggcagcacagagaccacagccctgcccggcagcaccaccacagctggcctgtctgagaagagcaccaccttctacagcagccccaggagcccagacaccaccctgagccctgccagcaccaccagcagcggcgtgtctgaggagagcaccaccagccacagcaggcctggcagcacccacaccacagccttccctggcagcaccaccatgcctggggtgtcccaggagagcacagccagccacagcagccctggcagcacagacaccaccctgagccctggcagcaccacagccagcagcctgggccctgagagcaccaccttccacagcggccctggcagcacagagaccaccctgctgcctgacaacaccacagccagcggcctgctggaggccagcacccctgtgcacagcagcacaggcagcccccacaccaccctgagccctgctggcagcaccacccggcagggcgagagcaccaccttccagagctggcccaacagcaaggacaccaccccagccccacccaccaccaccagcgcctttgtggagctgagcaccaccagccacggcagccccagcagcacccccaccacccacttcagcgccagcagcaccaccctgggccgctctgaggagagcaccaccgtgcacagcagccctgtggccacagccaccacccccagccctgcccggagcaccaccagcggcctggtggaggagagcaccacctaccacagcagccctggcagcacccagaccatgcacttccctgagagtgacaccaccagcggccgcggggaggagagcaccaccagccacagcagcaccacccacaccatcagcagcgcccccagcaccaccagcgccctggtggaggagcccaccagctaccacagcagccctggcagcacagccaccacccacttcccagacagcagcaccaccagcggccgctctgaggagagcacagccagccacagcagccaggatgccaccggcaccatcgtgctgcctgcccggagcaccacctctgtgctgctgggggagagcaccaccagccccatcagcagcggctccatggagaccacagccctgcccggcagcaccaccaccccaggcctgtctgagaagagcaccaccttccacagcagccccaggagccctgccaccaccctgagccctgccagcaccaccagcagcggcgtgtctgaggagagcaccaccagccacagcaggcctggcagcacccacaccacagccttcccagacagcaccaccaccccaggcctgagccgccacagcaccaccagccacagcagccctggcagcacagacaccaccctgctgcctgccagcaccaccaccagcggcagcagccaggagagcaccaccagccacagcagcagcggcagcacagacacagccctgagccctggcagcaccacagccctgagctttggccaggagagcaccaccttccacagcagccctggcagcacccacaccaccctcttcccagacagcaccaccagcagcggcatcgtggaggccagcaccagggtgcacagcagcacaggcagccccaggaccaccctgagccctgccagcagcaccagccctggcctgcagggcgagagcacagccttccagacccacccagccagcacccacaccacccccagcccccccagcacagccacagcccctgtggaggagagcaccacctaccacaggagccctggcagcacccccaccacccacttccctgccagcagcaccaccagcggccacagcgagaagagcaccatcttccacagcagcccagatgccagcggcaccacccccagcagcgcccacagcaccaccagcggccgcggggagagcaccaccagccgcatcagccctggcagcacagagatcaccaccctgcccggcagcaccaccaccccaggcctgtctgaggccagcaccaccttctacagcagccccaggagccccaccaccaccctgagccctgcctccatgaccagcctgggcgtgggggaggagagcaccaccagccgcagccagcccggcagcacccacagcacagtgtccccagccagcaccaccaccccaggcctgtctgaggagagcaccaccgtgtacagcagcagccctggcagcacagagaccaccgtcttccccaggagcaccaccacctctgtgagaagagaggagcccaccaccttccacagcaggcctgccagcacccacaccaccctcttcacagaggacagcaccaccagcggcctgacagaggagagcacagccttccctggcagccctgccagcacccagacaggcctgcctgccaccctgaccacagctgacctgggggaggagagcaccaccttccccagcagcagcggcagcacaggcaccaagctgagccctgcccggagcaccaccagcggcctggtgggggagagcacccccagccggctgagccccagcagcacagagaccaccaccctgcccggcagccccaccacccccagcctgtctgagaagagcaccaccttctacaccagccccaggagcccagatgccaccctgagccctgccaccaccaccagcagcggcgtgtctgaggagagcagcaccagccacagccagcccggcagcacccacaccacagccttcccagacagcaccaccaccagcggcctgagccaggagcccaccaccagccacagcagccagggcagcacagaggccaccctgagccctggcagcaccacagccagcagcctgggccagcagagcaccaccttccacagcagccctggggacacagagaccaccctgctgcctgatgacaccatcaccagcggcctggtggaggccagcacccccacccacagcagcacaggcagcctgcacaccaccctgaccccagccagcagcaccagcacaggcctgcaggaggagagcaccaccttccagagctggcccagcagcagtgacaccacccccagcccccccagcaccacagctgtgcctgtggaggtgtccaccacctaccacagccggcccagcagcacccccaccacccacttcagcgccagcagcaccaccctgggccgctctgaggagagcaccaccgtgcacagcagccctggggccactggaacagccctcttccccaccaggtctgccacctctgtgctggtgggggagcccaccaccagccccatcagcagcggcagcacagagaccacagccctgcccggcagcaccaccacagctggcctgtctgagaagagcaccaccttctacagcagccccaggagcccagacaccaccctgagccctgccagcaccaccagcagtggagtgtctgaggagagcaccaccagccacagccggcccggctccatgcacaccacagccttccccagcagcaccaccatgcctggggtgtcccaggagagcacagccagccacagcagccctggcagcacagacaccaccctgagccctggcagcaccacagccagcagcctgggccctgagagcaccaccttccacagcagccctggcagcacagagaccaccctgctgcctgacaacaccacagccagcggcctgctggaggccagcacccctgtgcacagcagcacaggcagcccccacaccaccctgagccctgctggcagcaccacccggcagggcgagagcaccaccttccagagctggcccaacagcaaggacaccaccccagccccacccaccaccaccagcgcctttgtggagctgagcaccaccagccacggcagccccagcagcacccccaccacccacttcagcgccagcagcaccaccctgggccgctctgaggagagcaccaccgtgcacagcagccctgtggccacagccaccacccccagccctgcccggagcaccaccagcggcctggtggaggagagcaccacctaccacagcagccctggcagcacccagaccatgcacttccctgagagcaacaccaccagcggccgcggggaggagagcaccaccagccacagcagcaccacccacaccatcagcagcgcccccagcaccaccagcgccctggtggaggagcccaccagctaccacagcagccctggcagcacagccaccacccacttcccagacagcagcaccaccagcggccgctctgaggagagcacagccagccacagcagccaggatgccaccggcaccatcgtgctgcctgcccggagcaccacctctgtgctgctgggggagagcaccaccagccccatcagcagcggctccatggagaccacagccctgcccggcagcaccaccaccccaggcctgtctgagaagagcaccaccttccacagcagccccagcagcacccccaccacccacttcagcgccagcagcaccaccctgggccgctctgaggagagcaccaccgtgcacagcagccctgtggccacagccaccacccccagccctgcccggagcaccaccagcggcctggtggaggagagcacagcctaccacagcagccctggcagcacccagaccatgcacttccctgagagcagcacagccagcggccgctctgaggagagcaggaccagccacagcagcaccacccacaccatcagcagcccccccagcaccaccagcgccctggtggaggagcccaccagctaccacagcagccctggcagcatcgccaccacccacttccctgagagcagcaccaccagcggccgctctgaggagagcacagccagccacagcagcccagacaccaacggcatcacccccctgcctgcccacttcaccaccagcggcagaattgctgagagcaccaccttctacatcagccctggctccatggagaccaccctggccagcacagccaccaccccaggcctgagcgccaagagcaccatcctgtacagcagcagccgcagcccagaccagaccctgagccctgcctccatgaccagcagcagcatcagcggggagcccaccagcctgtacagccaggccgagagcacccacaccacagccttccctgccagcaccaccaccagcggcctgagccaggagagcaccaccttccacagcaagccaggcagcacagagaccaccctgagccctggcagcatcaccaccagcagctttgcccaggagttcaccaccccccacagccagcccggcagcgccctgagcacagtgtccccagccagcaccaccgtgcccggcctgtctgaggagagcaccaccttctacagcagccctggcagcacagagaccacagccttcagccacagcaacaccatgagcatccacagccagcagagcacccccttcccagacagccctggcttcacccacacagtgctgcctgccaccctgaccaccacagacatcggccaggagagcacagccttccacagcagcagtgatgccaccggcaccacccccctgcctgcccggagcacagccagtgacctggtgggggagcccaccaccttctacatcagccccagccccacctacaccaccctcttccctgccagcagcagcaccagcggcctgacagaggagagcaccaccttccacaccagccccagcttcaccagcaccatcgtgtccacagagagcctggagaccctggcccctggcctgtgccaggagggccagatctggaatggcaagcagtgtgtgtgcccccagggctacgtgggctaccagtgcctgagccccctggagagcttccctgtggagaccccagagaagctgaatgccaccctgggcatgacagtgaaggtgacctacagaaacttcacagagaagatgaatgatgccagcagccaggagtaccagaacttcagcaccctcttcaagaacaggatggatgtggtgctgaagggggacaacctgccccagtaccggggcgtgaacatccggcggctgctgaatggcagcatcgtggtgaagaatgatgtgatcctggaggccgactacaccctggagtatgaggagctgtttgagaacctggccgagatcgtgaaggccaagatcatgaatgagaccaggaccaccctgctggaccctgacagctgcaggaaggccatcctgtgctacagcgaggaggacacctttgtggacagctctgtgaccccaggctttgacttccaggagcagtgcacccagaaggctgctgagggctacacccagttctactacgtggatgtgctggatggcaagctggcctgtgtgaacaagtgcaccaagggcaccaagagccagatgaactgcaacctgggcacctgccagctgcagaggagcggcccccgctgcctgtgccccaacaccaacacccactggtactggggcgagacctgtgagttcaacatcgccaagagcctggtgtatggcatcgtgggcgctgtgatggctgtgctgctgctggccctgatcatcctgatcatcctcttcagcctgagccagaggaagaggcaccgggagcagtatgatgtgccccaggagtggaggaaggagggcaccccaggcatcttccagaagacagccatctgggaggaccagaacctgcgggagagccgcttcggcctggagaatgcctacaacaacttccggcccaccctggagaccgtggacagcggcacagagctgcacatccagaggcctgagatggtggccagcacagtgtag

SEQ ID NO: 62888 - DNA, 16008 bp, Artificial Sequence
  derived and/or modified sequence
atgctggtgatctggatcctgaccctggccctgcggctgtgtgcctctgtgaccaccgtgaccccaggcagcacagtgaacaccagcatcggcggcaacaccaccagcgccagcacccccagcagcagtgaccccttcaccaccttcagtgactatggagtgtctgtgaccttcatcaccggcagcacagccaccaagcacttcctggacagcagcaccaacagcggccacagcgaggagagcacagtgagccacagcggccctggggccaccggcaccaccctcttccccagccacagcgccacctctgtgtttgtgggggagcccaagaccagccccatcaccagcgcctccatggagaccacagccctgcccggcagcaccaccacagctggcctgtctgagaagagcaccaccttctacagcagccccaggagcccagacaggaccctgagccctgcccggaccaccagcagtggagtgtctgagaagagcaccaccagccacagccggcccggccccacccacaccatcgccttcccagacagcaccaccatgcctggggtgtcccaggagagcacagccagccacagcatccctggcagcacagacaccaccctgagccctggcaccaccacccccagcagcctgggccctgagagcaccaccttccacagcagccctggctacaccaagaccacccggctgcctgacaacaccaccaccagcggcctgctggaggccagcacccctgtgcacagcagcacaggcagcccccacaccaccctgagccccagcagcagcaccacccatgaaggagagcccaccaccttccagagctggcccagcagcaaggacaccagccctgcccccagcggcaccaccagcgcctttgtgaagctgagcaccacctaccacagcagccccagcagcacccccaccacccacttcagcgccagcagcaccaccctgggccacagcgaggagagcacccctgtgcacagcagccctgtggccacagccaccaccccacctccagcccggagcgccaccagcggccacgtggaggagagcacagcctaccacaggagccctggcagcacccagaccatgcacttccctgagagcagcaccaccagcggccacagcgaggagagcgccaccttccacggcagcaccacccacaccaagagcagcacccccagcaccacagctgccctggcccacaccagctaccacagcagcctgggcagcacagagaccacccacttccgggacagcagcaccatcagcggccgctctgaggagagcaaggccagccacagcagcccagatgccatggccaccaccgtgctgcctgctggcagcaccccatctgtgctggtgggggacagcacccccagccccatcagcagcggctccatggagaccacagccctgcccggcagcaccaccaagccaggcctgtctgagaagagcaccaccttctacagcagccccaggagcccagacaccacccacctgcctgcctccatgaccagcagtggagtgtctgaggagagcaccaccagccacagccggcccggcagcacccacaccacagccttccctggcagcaccaccatgcctggcctgagccaggagagcacagccagccacagcagccctggccccacagacaccaccctgagccctggcagcaccacagccagcagcctgggccctgagtacaccaccttccacagccggcccggcagcacagagaccaccctgctgcctgacaacaccacagccagcggcctgctggaggcctccatgcctgtgcacagcagcaccaggagcccccacaccaccctgagccctgctggcagcaccacccggcagggcgagagcaccaccttccacagctggcccagcagcaaggacaccaggcctgccccacccaccaccaccagcgcctttgtggagcccagcaccaccagccacggcagccccagcagcatccccaccacccacatcagcgcccggagcaccaccagcggcctggtggaggagagcaccacctaccacagcagccctggcagcacccagaccatgcacttccctgagagtgacaccaccagcggccgcggggaggagagcaccaccagccacagcagcaccacccacaccatcagcagcgcccccagcaccaccagcgccctggtggaggagcccaccagctaccacagcagccctggcagcacagccaccacccacttcccagacagcagcaccaccagcggccgctctgaggagagcacagccagccacagcagccaggatgccaccggcaccatcgtgctgcctgcccggagcaccacctctgtgctgctgggggagagcaccaccagccccatcagcagcggctccatggagaccacagccctgcccggcagcaccaccaccccaggcctgtctgagaggagcaccaccttccacagcagccccaggagccctgccaccaccctgagccctgccagcaccaccagcagtggagtgtctgaggagagcaccaccagccgcagccggcccggcagcacccacaccacagccttcccagacagcaccaccaccccaggcctgagccgccacagcaccaccagccacagcagccctggcagcacagacaccaccctgctgcctgccagcaccaccaccagcggccccagccaggagagcaccaccagccacagcagcagcggcagcacagacacagccctgagccctggcagcaccacagccctgagctttggccaggagagcaccaccttccacagcaaccctggcagcacccacaccaccctcttcccagacagcaccaccagcagcggcatcgtggaggccagcaccagggtgcacagcagcacaggcagccccaggaccaccctgagccctgccagcagcaccagccctggcctgcagggcgagagcacagccttccagacccacccagccagcacccacaccacccccagcccccccagcacagccacagcccctgtggaggagagcaccacctaccacaggagccctggcagcacccccaccacccacttccctgccagcagcaccaccagcggccacagcgagaagagcaccatcttccacagcagcccagatgccagcggcaccacccccagcagcgcccacagcaccaccagcggccgcggggagagcaccaccagccgcatcagccctggcagcacagagatcaccaccctgcccggcagcaccaccaccccaggcctgtctgaggccagcaccaccttctacagcagccccaggagccccaccaccaccctgagccctgcctccatgaccagcctgggcgtgggggaggagagcaccaccagccgcagccagcccggcagcacccacagcacagtgtccccagccagcaccaccaccccaggcctgtctgaggagagcaccaccgtgtacagcagcagccggggcagcacagagaccaccgtcttcccccacagcaccaccacctctgtgcacggggaggagcccaccaccttccacagcaggcctgccagcacccacaccaccctcttcacagaggacagcaccaccagcggcctgacagaggagagcacagccttccctggcagccctgccagcacccagacaggcctgcctgccaccctgaccacagctgacctgggggaggagagcaccaccttccccagcagcagcggcagcacaggcaccaagctgagccctgcccggagcaccaccagcggcctggtgggggagagcacccccagccggctgagccccagcagcacagagaccaccaccctgcccggcagccccaccacccccagcctgtctgagaagagcaccaccttctacaccagccccaggagcccagatgccaccctgagccctgccaccaccaccagcagtggagtgtctgaggagagcagcaccagccacagccagcccggcagcacccacaccacagccttcccagacagcaccaccaccagtgacctgagccaggagcccaccaccagccacagcagccagggcagcacagaggccaccctgagccctggcagcaccacagccagcagcctgggccagcagagcaccaccttccacagcagccctggggacacagagaccaccctgctgcctgatgacaccatcaccagcggcctggtggaggccagcacccccacccacagcagcacaggcagcctgcacaccaccctgaccccagccagcagcaccagcgctggcctgcaggaggagagcaccaccttccagagctggcccagcagcagtgacaccacccccagccccccaggcaccacagctgcccctgtggaggtgtccaccacctaccacagccggcccagcagcacccccaccacccacttcagcgccagcagcaccaccctgggccgctctgaggagagcaccaccgtgcacagcagccctggggccaccggcacagccctcttccccaccaggtctgccacctctgtgctggtgggggagcccaccaccagccccatcagcagcggcagcacagagaccacagccctgcccggcagcaccaccacagctggcctgtctgagaagagcaccaccttctacagcagccccaggagcccagacaccaccctgagccctgccagcaccaccagcagcggcgtgtctgaggagagcaccaccagccacagcaggcctggcagcacccacaccacagccttccctggcagcaccaccatgcctggggtgtcccaggagagcacagccagccacagcagccctggcagcacagacaccaccctgagccctggcagcaccacagccagcagcctgggccctgagagcaccaccttccacagcagccctggcagcacagagaccaccctgctgcctgacaacaccacagccagcggcctgctggaggccagcacccctgtgcacagcagcacaggcagcccccacaccaccctgagccctgctggcagcaccacccggcagggcgagagcaccaccttccagagctggcccagcagcaaggacaccatgcctgccccacccaccaccaccagcgcctttgtggagctgagcaccaccagccacggcagccccagcagcacccccaccacccacttcagcgccagcagcaccaccctgggccgctctgaggagagcaccaccgtgcacagcagccctgtggccacagccaccacccccagccctgcccggagcaccaccagcggcctggtggaggagagcacagcctaccacagcagccctggcagcacccagaccatgcacttccctgagagcagcacagccagcggccgctctgaggagagcaggaccagccacagcagcaccacccacaccatcagcagcccccccagcaccaccagcgccctggtggaggagcccaccagctaccacagcagccctggcagcacagccaccacccacttcccagacagcagcaccaccagcggccgctctgaggagagcacagccagccacagcagccaggatgccaccggcaccatcgtgctgcctgcccggagcaccacctctgtgctgctgggggagagcaccaccagccccatcagcagcggctccatggagaccacagccctgcccggcagcaccaccaccccaggcctgtctgagaagagcaccaccttccacagcagccccaggagccctgccaccaccctgagccctgccagcaccaccagcagcggcgtgtctgaggagagcaccaccagccacagcaggcctggcagcacccacaccacagccttcccagacagcaccaccaccccaggcctgagccgccacagcaccaccagccacagcagccctggcagcacagacaccaccctgctgcctgccagcaccaccaccagcggccccagccaggagagcaccaccagccacagcagccctggcagcacagacacagccctgagccctggcagcaccacagccctgagctttggccaggagagcaccaccttccacagcagccctggcagcacccacaccaccctcttcccagacagcaccaccagcagcggcatcgtggaggccagcaccagggtgcacagcagcacaggcagccccaggaccaccctgagccctgccagcagcaccagccctggcctgcagggcgagagcacagccttccagacccacccagccagcacccacaccacccccagcccccccagcacagccacagcccctgtggaggagagcaccacctaccacaggagccctggcagcacccccaccacccacttccctgccagcagcaccaccagcggccacagcgagaagagcaccatcttccacagcagcccagatgccagcggcaccacccccagcagcgcccacagcaccaccagcggccgcggggagagcaccaccagccgcatcagccctggcagcacagagatcaccaccctgcccggcagcaccaccaccccaggcctgtctgaggccagcaccaccttctacagcagccccaggagccccaccaccaccctgagccctgcctccatgaccagcctgggcgtgggggaggagagcaccaccagccgcagccagcccggcagcacccacagcacagtgtccccagccagcaccaccaccccaggcctgtctgaggagagcaccaccgtgtacagcagcagccctggcagcacagagaccaccgtcttccccaggacccccaccacctctgtgcggggggaggagcccaccaccttccacagcaggcctgccagcacccacaccaccctcttcacagaggacagcaccaccagcggcctgacagaggagagcacagccttccctggcagccctgccagcacccagacaggcctgcctgccaccctgaccacagctgacctgggggaggagagcaccaccttccccagcagcagcggcagcacaggcaccaccctgagccctgcccggagcaccaccagcggcctggtgggggagagcacccccagccggctgagccccagcagcacagagaccaccaccctgcccggcagccccaccacccccagcctgtctgagaagagcaccaccttctacaccagccccaggagcccagatgccaccctgagccctgccaccaccaccagcagcggcgtgtctgaggagagcagcaccagccacagccagcccggcagcacccacaccacagccttcccagacagcaccaccaccccaggcctgagccgccacagcaccaccagccacagcagccctggcagcacagacaccaccctgctgcctgccagcaccaccaccagcggccccagccaggagagcaccaccagccacagcagccctggcagcacagacacagccctgagccctggcagcaccacagccctgagctttggccaggagagcaccaccttccacagcagccctggcagcacccacaccaccctcttcccagacagcaccaccagcagcggcatcgtggaggccagcaccagggtgcacagcagcacaggcagccccaggaccaccctgagccctgccagcagcaccagccctggcctgcagggcgagagcaccaccttccagacccacccagccagcacccacaccacccccagcccccccagcacagccacagcccctgtggaggagagcaccacctaccacaggagccctggcagcacccccaccacccacttccctgccagcagcaccaccagcggccacagcgagaagagcaccatcttccacagcagcccagatgccagcggcaccacccccagcagcgcccacagcaccaccagcggccgcggggagagcaccaccagccgcatcagccctggcagcacagagatcaccaccctgcccggcagcaccaccaccccaggcctgtctgaggccagcaccaccttctacagcagccccaggagccccaccaccaccctgagccctgcctccatgaccagcctgggcgtgggggaggagagcaccaccagccgcagccagcccggcagcacccacagcacagtgtccccagccagcaccaccaccccaggcctgtctgaggagagcaccaccgtgtacagcagcagccctggcagcacagagaccaccgtcttccccaggagcaccaccacctctgtgcggggggaggagcccaccaccttccacagcaggcctgccagcacccacaccaccctcttcacagaggacagcaccaccagcggcctgacagaggagagcacagccttccctggcagccctgccagcacccagacaggcctgcctgccaccctgaccacagctgacctgggggaggagagcaccaccttccccagcagcagcggcagcacaggcaccaccctgagccctgcccggagcaccaccagcggcctggtgggggagagcacccccagccggctgagccccagcagcacagagaccaccaccctgcccggcagccccaccacccccagcctgtctgagaagagcaccaccttctacaccagccccaggagcccagatgccaccctgagccctgccaccaccaccagcagcggcgtgtctgaggagagcagcaccagccacagccagcccggcagcacccacaccacagccttcccagacagcaccaccaccagcggcctgagccaggagcccacagccagccacagcagccagggcagcacagaggccaccctgagccctggcagcaccacagccagcagcctgggccagcagagcaccaccttccacagcagccctggggacacagagaccaccctgctgcctgatgacaccatcaccagcggcctggtggaggccagcacccccacccacagcagcacaggcagcctgcacaccaccctgaccccagccagcagcaccagcgctggcctgcaggaggagagcaccaccttccagagctggcccagcagcagtgacaccacccccagccccccaggcaccacagctgcccctgtggaggtgtccaccacctaccacagccggcccagcagcacccccaccacccacttcagcgccagcagcaccaccctgggccgctctgaggagagcaccaccgtgcacagcagccctggggccactggaacagccctcttccccaccaggtctgccacctctgtgctggtgggggagcccaccaccagccccatcagcagcggcagcacagagaccacagccctgcccggcagcaccaccacagctggcctgtctgagaagagcaccaccttctacagcagccccaggagcccagacaccaccctgagccctgccagcaccaccagcagtggagtgtctgaggagagcaccaccagccacagccggcccggcagcacccacaccacagccttccctggcagcaccaccatgcctggggtgtcccaggagagcacagccagccacagcagccctggcagcacagacaccaccctgagccctggcagcaccacagccagcagcctgggccctgagagcaccaccttccacagcggccctggcagcacagagaccaccctgctgcctgacaacaccacagccagcggcctgctggaggccagcacccctgtgcacagcagcacaggcagcccccacaccaccctgagccctgctggcagcaccacccggcagggcgagagcaccaccttccagagctggcccaacagcaaggacaccaccccagccccacccaccaccaccagcgcctttgtggagctgagcaccaccagccacggcagccccagcagcacccccaccacccacttcagcgccagcagcaccaccctgggccgctctgaggagagcaccaccgtgcacagcagccctgtggccacagccaccacccccagccctgcccggagcaccaccagcggcctggtggaggagagcaccacctaccacagcagccctggcagcacccagaccatgcacttccctgagagtgacaccaccagcggccgcggggaggagagcaccaccagccacagcagcaccacccacaccatcagcagcgcccccagcaccaccagcgccctggtggaggagcccaccagctaccacagcagccctggcagcacagccaccacccacttcccagacagcagcaccaccagcggccgctctgaggagagcacagccagccacagcagccaggatgccaccggcaccatcgtgctgcctgcccggagcaccacctctgtgctgctgggggagagcaccaccagccccatcagcagcggctccatggagaccacagccctgcccggcagcaccaccaccccaggcctgtctgagaagagcaccaccttccacagcagccccaggagccctgccaccaccctgagccctgccagcaccaccagcagtggagtgtctgaggagagcaccaccagccacagccggcccggcagcacccacaccacagccttcccagacagcaccaccaccccaggcctgagccgccacagcaccaccagccacagcagccctggcagcacagacaccaccctgctgcctgccagcaccaccaccagcggcagcagccaggagagcaccaccagccacagcagcagcggcagcacagacacagccctgagccctggcagcaccacagccctgagctttggccaggagagcaccaccttccacagcagccctggcagcacccacaccaccctcttcccagacagcaccaccagcagcggcatcgtggaggccagcaccagggtgcacagcagcacaggcagccccaggaccaccctgagccctgccagcagcaccagccctggcctgcagggcgagagcacagccttccagacccacccagccagcacccacaccacccccagcccccccagcacagccacagcccctgtggaggagagcaccacctaccacaggagccctggcagcacccccaccacccacttccctgccagcagcaccaccagcggccacagcgagaagagcaccatcttccacagcagcccagatgccagcggcaccacccccagcagcgcccacagcaccaccagcggccgcggggagagcaccaccagccgcatcagccctggcagcacagagatcaccaccctgcccggcagcaccaccaccccaggcctgtctgaggccagcaccaccttctacagcagccccaggagccccaccaccaccctgagccctgcctccatgaccagcctgggcgtgggggaggagagcaccaccagccgcagccagcccggcagcacccacagcacagtgtccccagccagcaccaccaccccaggcctgtctgaggagagcaccaccgtgtacagcagcagccctggcagcacagagaccaccgtcttccccaggagcaccaccacctctgtgcggcgggaggagcccaccaccttccacagcaggcctgccagcacccacaccaccctcttcacagaggacagcaccaccagcggcctgacagaggagagcacagccttccctggcagccctgccagcacccagacaggcctgcctgccaccctgaccacagctgacctgggggaggagagcaccaccttccccagcagcagcggcagcacaggcaccaagctgagccctgcccggagcaccaccagcggcctggtgggggagagcacccccagccggctgagccccagcagcacagagaccaccaccctgcccggcagccccaccacccccagcctgtctgagaagagcaccaccttctacaccagccccaggagcccagatgccaccctgagccctgccaccaccaccagcagtggagtgtctgaggagagcagcaccagccacagccagcccggcagcacccacaccacagccttcccagacagcaccaccaccagcggcctgagccaggagcccaccaccagccacagcagccagggcagcacagaggccaccctgagccctggcagcaccacagccagcagcctgggccagcagagcaccaccttccacagcagccctggggacacagagaccaccctgctgcctgatgacaccatcaccagcggcctggtggaggccagcacccccacccacagcagcacaggcagcctgcacaccaccctgaccccagccagcagcaccagcacaggcctgcaggaggagagcaccaccttccagagctggcccagcagcagtgacaccacccccagcccccccagcaccacagctgtgcctgtggaggtgtccaccacctaccacagccggcccagcagcacccccaccacccacttcagcgccagcagcaccaccctgggccgctctgaggagagcaccaccgtgcacagcagccctggggccaccggcacagccctcttccccaccaggtctgccacctctgtgctggtgggggagcccaccaccagccccatcagcagcggcagcacagagaccacagccctgcccggcagcaccaccacagctggcctgtctgagaagagcaccaccttctacagcagccccaggagcccagacaccaccctgagccctgccagcaccaccagcagcggcgtgtctgaggagagcaccaccagccacagcaggcctggctccatgcacaccacagccttccccagcagcaccaccatgcctggggtgtcccaggagagcacagccagccacagcagccctggcagcacagacaccaccctgagccctggcagcaccacagccagcagcctgggccctgagagcaccaccttccacagcagccctggcagcacagagaccaccctgctgcctgacaacaccacagccagcggcctgctggaggccagcacccctgtgcacagcagcacaggcagcccccacaccaccctgagccctgctggcagcaccacccggcagggcgagagcaccaccttccagagctggcccaacagcaaggacaccaccccagccccacccaccaccaccagcgcctttgtggagctgagcaccaccagccacggcagccccagcagcacccccaccacccacttcagcgccagcagcaccaccctgggccgctctgaggagagcaccaccgtgcacagcagccctgtggccacagccaccacccccagccctgcccggagcaccaccagcggcctggtggaggagagcaccacctaccacagcagccctggcagcacccagaccatgcacttccctgagagcaacaccaccagcggccgcggggaggagagcaccaccagccacagcagcaccacccacaccatcagcagcgcccccagcaccaccagcgccctggtggaggagcccaccagctaccacagcagccctggcagcacagccaccacccacttcccagacagcagcaccaccagcggccgctctgaggagagcacagccagccacagcagccaggatgccaccggcaccatcgtgctgcctgcccggagcaccacctctgtgctgctgggggagagcaccaccagccccatcagcagcggctccatggagaccacagccctgcccggcagcaccaccaccccaggcctgtctgagaagagcaccaccttccacagcagccccagcagcacccccaccacccacttcagcgccagcagcaccaccctgggccgctctgaggagagcaccaccgtgcacagcagccctgtggccacagccaccacccccagccctgcccggagcaccaccagcggcctggtggaggagagcacagcctaccacagcagccctggcagcacccagaccatgcacttccctgagagcagcacagccagcggccgctctgaggagagcaggaccagccacagcagcaccacccacaccatcagcagcccccccagcaccaccagcgccctggtggaggagcccaccagctaccacagcagccctggcagcatcgccaccacccacttccctgagagcagcaccaccagcggccgctctgaggagagcacagccagccacagcagcccagacaccaacggcatcacccccctgcctgcccacttcaccaccagcggcagaattgctgagagcaccaccttctacatcagccctggctccatggagaccaccctggccagcacagccaccaccccaggcctgagcgccaagagcaccatcctgtacagcagcagccgcagcccagaccagaccctgagccctgcctccatgaccagcagcagcatctctggagagcccaccagcctgtacagccaggccgagagcacccacaccacagccttccctgccagcaccaccaccagcggcctgagccaggagagcaccaccttccacagcaagccaggcagcacagagaccaccctgagccctggcagcatcaccaccagcagctttgcccaggagttcaccaccccccacagccagcccggcagcgccctgagcacagtgtccccagccagcaccaccgtgcccggcctgtctgaggagagcaccaccttctacagcagccctggcagcacagagaccacagccttcagccacagcaacaccatgagcatccacagccagcagagcacccccttcccagacagccctggcttcacccacacagtgctgcctgccaccctgaccaccacagacatcggccaggagagcacagccttccacagcagcagtgatgccaccggcaccacccccctgcctgcccggagcacagccagtgacctggtgggggagcccaccaccttctacatcagccccagccccacctacaccaccctcttccctgccagcagcagcaccagcggcctgacagaggagagcaccaccttccacaccagccccagcttcaccagcaccatcgtgtccacagagagcctggagaccctggcccctggcctgtgccaggagggccagatctggaatggcaagcagtgtgtgtgcccccagggctacgtgggctaccagtgcctgagccccctggagagcttccctgtggagaccccagagaagctgaatgccaccctgggcatgacagtgaaggtgacctacagaaacttcacagagaagatgaatgatgccagcagccaggagtaccagaacttcagcaccctcttcaagaacaggatggatgtggtgctgaagggggacaacctgccccagtacagaggagtgaacatccggcggctgctgaatggcagcatcgtggtgaagaatgatgtgatcctggaggccgactacaccctggagtatgaggagctgtttgagaacctggccgagatcgtgaaggccaagatcatgaatgagaccaggaccaccctgctggaccctgacagctgcaggaaggccatcctgtgctacagcgaggaggacacctttgtggacagctctgtgaccccaggctttgacttccaggagcagtgcacccagaaggctgctgagggctacacccagttctactacgtggatgtgctggatggcaagctggcctgtgtgaacaagtgcaccaagggcaccaagagccagatgaactgcaacctgggcacctgccagctgcagaggagcggcccccgctgcctgtgccccaacaccaacacccactggtactggggcgagacctgtgagttcaacatcgccaagagcctggtgtatggaattgtgggcgctgtgatggctgtgctgctgctggccctgatcatcctgatcatcctcttcagcctgagccagaggaagaggcaccgggagcagtatgatgtgccccaggagtggaggaaggagggcaccccaggcatcttccagaagacagccatctgggaggaccagaacctgcgggagagcagatttggcctggagaatgcctacaacaacttccggcccaccctggagaccgtggacagcggcacagagctgcacatccagaggcctgagatggtggccagcacagtgtag

SEQ ID NO: 62889 - DNA, 16737 bp, Artificial Sequence
  derived and/or modified sequence
atgctggtgatctggattctgacgctggctctccggctctgcgcgtccgttactacagtgacaccagagggctctgctgttcacaaagccatttcccagcagggcacattgtggactggtgaggttttggagaagcagacagtcgagcaagggaagagcactctgagaaggcagaaaaatcatttccacaggtctgcaggggagctacggtgcaggaatgccctgaaagatgagggggcatctgctggatggagcgtgatgtttgctggggagagtgtggtggtgctggtgcatttgtggatgacaggagcacgagtgaagaacctgggcttggtggagtttgctagcccaggggacgacggggatggcagagccgagggctttagcctggggctcccacttagtgagcaggcaagggctgcaggagccagagagaaggagcgtcaggagacagtcataaatcatagcactttctctggtttctctcaaatcacaggctcaacagtaaacaccagtattggaggtaatacaacttctgcatccacacccagttcaagcgacccttttaccacctttagtgactatggggtgtcagtcacatttatcacgggctcaactgcaacaaaacacttccttgacagctccacaaactcaggccacagtgaggaatcaacagtatcccacagcggcccaggtgcaactggaacaacactcttcccttcccactctgcaacctcagtttttgttggagaacctaaaacctcacccatcacttcagcctcaatggaaacaacagcgttacctggcagtaccacaacagcaggcctgagtgagaaatctaccaccttctacagtagccccagatcaccagacagaacactctcacctgcccgcacgacaagctcaggcgtcagtgaaaaatcaaccacctcccacagccgaccaggcccaacgcacacaatagcgttccctgacagtaccaccatgccaggcgtcagtcaggaatctacagcttcccacagcatccccggctccacagacacaacactgtcccctggcactaccacaccatcatcccttggtccagaatctactaccttccacagcagcccaggctacactaaaacaacacgcttacctgacaacaccacaacctcaggcctccttgaagcatctacgcccgtccacagcagcactggatcgccacacacaacactgtccccttccagctctacaacccatgagggagaacctaccaccttccagagctggccaagctcaaaggacacttcgcctgcaccttctggtaccacatcagcctttgttaaactatctacaacttatcacagcagcccgagctcaactccaacaacccacttttctgccagctccacaaccttgggccatagtgaggaatcgacaccagtccacagcagcccagttgcaactgcaacaacacccccacctgcccgctccgcgacctcaggccatgttgaagaatctacagcctaccacaggagcccgggctcaactcaaacaatgcacttccctgaaagctccacaacttcaggccatagtgaagaatcagcaactttccacggcagcacaacacacacaaaatcttcaactcctagcaccacagctgccctagcacatacaagctaccacagcagcctgggctcaactgaaacaacacacttccgtgatagctccacaatctcaggccgtagtgaggaatcaaaagcatcccacagcagcccagatgcaatggcaacaacagtcttacctgccggctctacaccctcagttcttgttggagactcgacgccctcacccatcagttcaggctcaatggaaaccacagcgttacccggcagtaccacaaaaccaggcctcagtgagaaatctaccactttctacagtagccccagatcaccagacacaacacacttacctgccagcatgacaagctcaggcgtcagtgaagaatccaccacctcccacagccgaccaggctcaacacacacaacagcattccctggcagtaccaccatgccaggcctcagtcaggaatctacagcttcccacagcagcccaggccccacagacacaacattgtcccctggcagtaccacagcatcatcccttggtccagaatatactaccttccacagccgcccaggctccactgaaacaacactcttacctgacaacaccacagcctcaggactccttgaagcatctatgcccgtccacagcagcaccagatcgccacacacaacactgtcccctgccggctctacaacccgtcagggagaatctaccacattccatagctggccaagctcaaaggacactaggcctgcacctcctactaccacatcagcctttgttgagccatctacaacctcccacggcagcccgagctcaattccaacaacccacatttctgcccgctccacaacctcaggcctcgttgaagaatctacgacctaccacagcagcccgggctcaactcaaacaatgcacttccctgaaagcgacacaacttcaggccgtggtgaagaatcaacaacttcccacagcagcacaacacacacaatatcttcagctcctagcaccacatctgcccttgttgaagaacctaccagctaccacagcagcccgggctcaactgcaacaacacacttccctgacagctccacaacctcaggccgtagtgaggaatcaacagcatcgcacagcagccaagacgcaacgggaacaatagtcctacctgcccgctccacaacctcagttcttcttggagaatctacgacctcacccatcagttcaggctcaatggaaacgacagcgttacccggcagtaccacaacgccaggcctcagtgagagatctaccactttccatagtagccccagatcaccagccacaacactctcacctgccagcacgacaagctcaggcgtcagtgaagaatccaccacctcccgcagccgaccaggctcaacgcacacaacagcattccctgacagcaccaccacgccaggcctcagtcggcattctacaacttcccacagcagcccaggctcaacggatacaacactgttacctgccagcaccaccacctcaggccccagtcaggaatcaacaacttcccacagcagctcaggttcaactgacacagcactgtcccctggcagtaccacagccttatcctttggtcaagaatctacaaccttccacagcaacccaggctccactcacacaacactcttccctgacagcaccacaagctcaggcatcgttgaagcatctacacgcgtccacagcagcactggctcaccacgcacaacactgtcccctgccagctccacaagccctggacttcagggagaatctactgccttccagacccacccagcctcaactcacacaacgccttcacctcctagcaccgcaacagcccctgttgaagaatctacaacctaccaccgcagcccaggctcgactccaacaacacacttccctgccagctccacaacttcgggccacagtgagaaatcaacaatattccacagcagcccagatgcaagtggaacaacaccctcatctgcccactccacaacctcaggtcgtggagaatctacaacctcacgcatcagtccaggctcaactgaaataacaacgttacctggcagtaccacaacaccaggcctcagtgaggcatctaccaccttctacagcagccccagatcaccaaccacaacactctcacctgccagcatgacaagcctgggcgtcggtgaagaatccaccacctcccgtagccaaccaggttctactcactcaacagtgtcacctgccagcaccaccacgccaggcctcagtgaggaatctaccaccgtctacagcagcagccgaggctcaactgaaaccacagtgttccctcacagcaccacaacctcagttcatggtgaagagcctacaaccttccacagccggccagcctcaactcacacaacactgttcactgaggacagcaccacctcgggcctcactgaagaatctacagccttccccggcagcccagcctccacccaaacagggttacctgccacactcacaaccgcagacctcggtgaggaatcaactacctttcccagcagctcaggctcaactggaacaaaactctcacctgcccgctccaccacctctggcctcgttggagaatccacaccctcacgcctcagtccaagctcaaccgaaacaacaactttacctggcagtcccacaacaccaagcctcagtgagaaatcaaccaccttctacactagccccagatcaccagatgcaacactctcacctgcaaccacaacaagctcaggcgtcagcgaagaatccagcacatcccacagtcaaccaggctcaacgcacacaacagcattccctgacagcaccaccacctcagacctcagtcaggaacctacaacttcccacagcagccaaggctcaacagaggcaacactgtcccctggcagtaccacagcctcatcccttggtcaacaatctacaaccttccacagcagcccaggcgacactgaaaccacactcttacctgacgacaccataacctcaggcctcgtggaggcatctacacccacccacagcagcactggctcgctacacacaacactgacccctgccagctccacaagcgctggccttcaggaagaatctaccactttccagagctggccaagctcaagtgacacaacaccttcacctcccggcaccacagcagcccctgttgaagtatccacaacctaccacagccgcccgagctcaactccaacaacacacttttctgccagttccacaaccttgggccgtagtgaggaatcaacaacagtccacagcagcccaggtgcaactggaacagcactcttccctacccgctctgcaacctcagttcttgttggagaacctacaacgtcacccatcagttcaggctcaacggaaacaacagcgttacctggcagtaccacaacagcaggcctgagtgagaaatctaccaccttctacagtagccccagatcaccggacacaacactctcacctgccagcacgacaagctcaggcgtcagtgaagaatccaccacctcccacagccgaccaggctcaacgcacacaacagcattccctggcagtaccaccatgccaggcgtcagtcaggaatctacagcttcccacagcagcccaggctccacagacacaacattgtcccctggcagtaccacagcatcatcccttggtccagaatctactactttccacagcagcccaggctccactgaaacaacactcttacctgacaacaccacagcctcaggcctccttgaagcatctacgcccgtccacagcagcactggatcgccacacacaacactgtcccctgccggctctacaacacgtcagggagaatctaccaccttccagagctggccaagctcaaaggacactatgcctgcacctcctactaccacatcagcctttgttgagctatctacaacctcccacggcagcccgagctcaactccaacaacccacttttctgccagctccacaaccttgggccgtagtgaggaatcgacaacagtccacagcagcccagttgcaactgcaacaacaccctcgcctgcccgctccacaacctcaggcctcgttgaagaatctacggcgtaccacagcagcccgggctcaactcaaacaatgcacttccctgaaagctccacagcttcaggtcgtagtgaagaatcaagaacttcccacagcagcacaacacacacaatatcttcacctcctagcaccacatctgcccttgttgaagaacctaccagctaccacagcagcccgggctcaactgcaacaacacacttccctgacagctccacaacctcaggccgtagtgaggaatcaacagcatcccacagcagccaagacgcaacgggaacaatagtcctacctgcccgctccacaacctcagttcttcttggagaatctacgacctcacccatcagttcaggctcaatggaaacgacagcgttacccggcagtaccacaacgccaggcctcagtgagaaatctaccactttccacagtagccccagatcaccagccacaacactctcacctgccagcacgacaagctcaggcgtcagtgaagaatccaccacctcccacagccgaccaggctcaacgcacacaacagcattccctgacagcaccaccacgccaggcctcagtcggcattctacaacttcccacagcagcccaggctcaacggatacaacactgttacctgccagcaccaccacctcaggccccagtcaggaatcaacaacttcccacagcagcccaggttcaactgacacagcactgtcccctggcagtaccacagccttatcctttggtcaagaatctacaaccttccacagcagcccaggctccactcacacaacgctcttccctgacagcaccacaagctcaggcatcgttgaagcatctacacgcgtccacagcagcactggctcaccacgcacaacactgtcccctgccagctccacaagccctggacttcagggagaatctaccgccttccagacccacccagcctcaactcacacgacgccttcacctcctagcaccgcaacagcccctgttgaagaatctacaacctaccaccgcagcccaggctcgactccaacaacacacttccctgccagctccacaacttcgggccacagtgagaaatcaacaatattccacagcagcccagatgcaagtggaacaacaccctcatctgcccactccacaacctcaggtcgtggagaatctacaacctcacgcatcagtccaggctcaactgaaataacaacgttacctggcagtaccacaacaccaggcctcagtgaggcatctaccaccttctacagcagccccagatcaccaaccacaacactctcacctgccagtatgacaagcctaggcgtcggtgaagaatccaccacctcccgtagccaaccaggttctactcactcaacagtgtcacctgccagcaccaccacgccaggcctcagtgaggaatctaccaccgtctacagcagcagcccaggctcaactgaaaccacagtgttccctcgcacccccacaacctcagttcgtggtgaagagcctacaaccttccacagccggccagcctcaactcacacaacactgttcactgaggacagcaccacctcgggcctcactgaagaatctacagccttccccggcagcccagcctccacccaaacagggttacctgccacactcacaaccgcagacctcggtgaggaatcaactacctttcccagcagctcaggctcaactggaacaacactctcacctgcccgctccaccacctctggcctcgttggagaatccacaccctcacgcctcagtccaagctcaaccgaaacaacaactttacccggcagtcccacaacaccaagcctcagtgagaaatcaaccaccttctacactagccccagatcaccagatgcaacactctcacctgcaaccacaacaagctcaggcgtcagtgaagaatccagcacatcccacagtcaaccaggctcaacgcacacaacagcattccctgacagcaccaccacgccaggcctcagtcggcattctacaacttcccacagcagcccaggctcaacggatacaacactgttacctgccagcaccaccacctcaggccccagtcaggaatcaacaacttcccacagcagcccaggttcaactgacacagcactgtcccctggcagtaccacagccttatcctttggtcaagaatctacaaccttccacagcagcccaggctccactcacacaacactcttccctgacagcaccacaagctcaggcatcgttgaagcatctacacgcgtccacagcagcactggctcaccacgcacaacactgtcccctgccagctccacaagccctggacttcagggagaatctaccaccttccagacccacccagcctcaactcacacgacgccttcacctcctagcaccgcaacagcccctgttgaagaatctacaacctaccaccgcagcccaggctcgactccaacaacacacttccctgccagctccacaacttcgggccacagtgagaaatcaacaatattccacagcagcccagatgcaagtggaacaacaccctcatctgcccactccacaacctcaggtcgtggagaatctacaacctcacgcatcagtccaggctcaactgaaataacaacgttacctggcagtaccacaacaccaggcctcagtgaggcatctaccaccttctacagcagccccagatcaccaaccacaacactctcacctgccagtatgacaagcctaggcgtcggtgaagaatccaccacctcccgtagccaaccaggttctactcactcaacagtgtcacctgccagcaccaccacgccaggcctcagtgaggaatctaccaccgtctacagcagcagcccaggctcaactgaaaccacagtgttccctcgcagcaccacaacctcagttcgtggtgaagagcctacaaccttccacagccggccagcctcaactcacacaacactgttcactgaggacagcaccacctcgggcctcactgaagaatctacagccttccccggcagcccagcctccacccaaacagggttacctgccacactcacaaccgcagacctcggtgaggaatcaactacctttcccagcagctcaggctcaactggaacaacactctcacctgcccgctccaccacctctggcctcgttggagaatccacaccctcacgcctcagtccaagctcaaccgaaacaacaactttacccggcagtcccacaacaccaagcctcagtgagaaatcaaccaccttctacactagccccagatcaccagatgcaacactctcacctgcaaccacaacaagctcaggcgtcagtgaagaatccagcacatcccacagtcaaccaggctcaacgcacacaacagcgttccctgacagcaccaccacctcaggcctcagtcaggaacctacagcttcccacagcagccaaggctcaacagaggcaacactgtcccctggcagtaccacagcctcatcccttggtcaacaatctacaaccttccacagcagcccaggcgacactgaaaccacactcttacctgacgacaccataacctcaggcctcgtggaggcatctacacccacccacagcagcactggctcgctacacacaacactgacccctgccagctccacaagcgctggccttcaggaagaatctaccactttccagagctggccaagctcaagtgacacaacaccttcacctcccggcaccacagcagcccctgttgaagtatccacaacctaccacagccgcccgagctcaactccaacaacacacttttctgccagttccacaaccttgggccgtagtgaggaatcaacaacagtccacagcagcccaggtgcaactggaacagcactcttccctacccgctctgcaacctcagttcttgttggagaacctacaacgtcacccatcagttcaggctcaacggaaacaacagcgttacctggcagtaccacaacagcaggcctgagtgagaaatctaccaccttctacagtagccccagatcaccggacacaacactctcacctgccagcacgacaagctcaggcgtcagtgaagaatccaccacctcccacagccgaccaggctcaacgcacacaacagcattccctggcagtaccaccatgccaggcgtcagtcaggaatctacagcttcccacagcagcccaggctccacagacacaacactgtcccctggcagtaccacagcatcatcccttggtccagaatctactaccttccacagcggcccaggctccactgaaacaacactcttacctgacaacaccacagcctcaggcctccttgaagcatctacgcccgtccacagcagcactggatcgccacacacaacactgtcccctgccggctctacaacccgtcagggagaatctaccaccttccagagctggcctaactcgaaggacactacccctgcacctcctactaccacatcagcctttgttgagctatctacaacctcccacggcagcccgagctcaactccaacaacccacttttctgccagctccacaaccttgggccgtagtgaggaatcgacaacagtccacagcagcccagttgcaactgcaacaacaccctcgcctgcccgctccacaacctcaggcctcgttgaagaatctacgacctaccacagcagcccgggctcaactcaaacaatgcacttccctgaaagcgacacaacttcaggccgtggtgaagaatcaacaacttcccacagcagcacaacacacacaatatcttcagctcctagcaccacatctgcccttgttgaagaacctaccagctaccacagcagcccgggctcaactgcaacaacacacttccctgacagctccacaacctcaggccgtagtgaggaatcaacagcatcccacagcagccaagacgcaacgggaacaatagtcctacctgcccgctccacaacctcagttcttcttggagaatctacgacctcacccatcagttcaggctcaatggaaacgacagcgttacccggcagtaccacaacgccaggcctcagtgagaaatctaccactttccacagtagccccagatcaccagccacaacactctcacctgccagcacgacaagctcaggcgtcagtgaagaatccaccacctcccacagccgaccaggctcaacgcacacaacagcattccctgacagcaccaccacgccaggcctcagtcggcattctacaacttcccacagcagcccaggctcaacggatacaacactgttacctgccagcaccaccacctcaggctccagtcaggaatcaacaacttcccacagcagctcaggttcaactgacacagcactgtcccctggcagtaccacagccttatcctttggtcaagaatctacaaccttccacagcagcccaggctccactcacacaacactcttccctgacagcaccacaagctcaggcatcgttgaagcatctacacgcgtccacagcagcactggctcaccacgcacaacactgtcccctgccagctccacaagccctggacttcagggagaatctaccgccttccagacccacccagcctcaactcacacgacgccttcacctcctagcaccgcaacagcccctgttgaagaatctacaacctaccaccgcagcccaggctcgactccaacaacacacttccctgccagctccacaacttcgggccacagtgagaaatcaacaatattccacagcagcccagatgcaagtggaacaacaccctcatctgcccactccacaacctcaggtcgtggagaatctacaacctcacgcatcagtccaggctcaactgaaataacaacgttacctggcagtaccacaacaccaggcctcagtgaggcatctaccaccttctacagcagccccagatcaccaaccacaacactctcacctgccagtatgacaagcctaggcgtcggtgaagaatccaccacctcccgtagccaaccaggttctactcactcaacagtgtcacctgccagcaccaccacgccaggcctcagtgaggaatctaccaccgtctacagcagcagcccaggctcaactgaaaccacagtgttccctcgcagcaccacaacctcagttcgtcgtgaagagcctacaaccttccacagccggccagcctcaactcacacaacactgttcactgaggacagcaccacctcgggcctcactgaagaatctacagccttccccggcagcccagcctccacccaaacagggttacctgccacactcacaaccgcagacctcggtgaggaatcaactacctttcccagcagctcaggctcaactggaacaaaactctcacctgcccgctccaccacctctggcctcgttggagaatccacaccctcacgcctcagtccaagctcaaccgaaacaacaactttacccggcagtcccacaacaccaagcctcagtgagaaatcaaccaccttctacactagccccagatcaccagatgcaacactctcacctgcaaccacaacaagctcaggcgtcagcgaagaatccagcacatcccacagtcaaccaggctcaacgcacacaacagcgttccctgacagcaccaccacctcaggcctcagtcaggaacctacaacttcccacagcagccaaggctcaacagaggcaacactgtcccctggcagtaccacagcctcatcccttggtcaacaatctacaaccttccacagcagcccaggcgacactgaaaccacactcttacctgacgacaccataacctcaggcctcgtggaggcatctacacccacccacagcagcactggctcgctacacacaacactgacccctgccagctccacaagcactggccttcaggaagaatctaccactttccagagctggccaagctcaagtgacacaacaccttcacctcccagcaccacagcagtccctgttgaagtatccacaacctaccacagccgcccgagctcaactccaacaacacacttttctgccagttccacaaccttgggccgtagtgaggaatcaacaacagtccacagcagcccaggtgcaactggaacagcactcttccctacccgctctgcaacctcagttcttgttggagaacctacaacgtcacccatcagttcaggctcaacggaaacaacagcgttacctggcagtaccacaacagcaggcctgagtgagaaatctaccaccttctacagtagccccagatcaccggacacaacactttcacctgccagcacgacaagctcaggcgtcagtgaagaatccaccacctcccacagccgaccaggctcaatgcacacaacagcattccctagcagtaccaccatgccaggcgtcagtcaggaatctacagcttcccacagcagcccaggctccacagacacaacactgtcccctggcagtaccacagcatcatcccttggtccagaatctactaccttccacagcagcccaggctccactgaaacaacactcttacctgacaacaccacagcctcaggcctccttgaagcatctacacccgtccacagcagcactggatcgccacacacaacactgtcccctgccggctctacaacccgtcagggagaatctaccaccttccagagctggccaaactcgaaggacactacccctgcacctcctactaccacatcagcctttgttgagctatctacaacctcccacggcagcccgagctcaactccaacaacccacttttctgccagctccacaacattgggccgtagtgaggaatcgacaacagtccacagcagcccagttgcaactgcaacaacaccctcgcctgcccgctccacaacctcaggcctcgttgaagaatctacgacctaccacagcagcccgggctcaactcaaacaatgcacttccctgaaagcaacacaacttcaggccgtggtgaagaatcaacaacttcccacagcagcacaacacacacaatatcttcagctcctagcaccacatctgcccttgttgaagaacctaccagctaccacagcagcccgggctcaactgcaacaacacacttccctgacagctccacaacctcaggccgtagtgaggaatcaacagcatcccacagcagccaagacgcaacgggaacaatagtcctacctgcccgctccacaacctcagttcttcttggagaatctacgacctcacccatcagttcaggctcaatggaaacgacagcgttacccggcagtaccacaacgccaggcctcagtgagaaatctaccactttccacagtagcccgagctcaactccaacaacccacttttctgccagctccacaaccttgggccgtagtgaggaatcgacaacagtccacagcagcccagttgcaactgcaacaacaccctcgcctgcccgctccacaacctcaggcctcgttgaagaatctacggcgtaccacagcagcccgggctcaactcaaacaatgcacttccctgaaagctccacagcttcaggtcgtagtgaagaatcaagaacttcccacagcagcacaacacacacaatatcttcacctcctagcaccacatctgcccttgttgaagaacctaccagctaccacagcagcccgggctcaattgcaacaacacactttcctgagagctccacaacctccggccgtagtgaggaatcaacagcatcccacagcagcccagatacaaatggaatcacacccttacctgcccattttactacctcaggccgcattgcagaatctaccaccttctatatctctccaggctcaatggaaacaacattagccagcactgccacaacaccaggcctcagtgcaaaatctaccatcctttacagtagctccagatcaccagaccaaacactctcacctgccagcatgacaagctccagcatcagtggagaacccaccagcttgtatagccaagcagagtcaacacacacaacagcgttccctgccagcaccaccacctcaggcctcagtcaggaatcaacaactttccacagtaagccaggctcaactgagacaacactgtcccctggcagcatcacaacttcatcttttgctcaagaatttaccacccctcatagccaaccaggctcagctctgtcaacagtgtcacctgccagcaccacagtgccaggccttagtgaggaatctaccaccttctacagcagcccaggctcaactgaaaccacagcgttttctcacagcaacacaatgtccattcatagtcaacaatctacacccttccctgacagcccaggcttcactcacacagtgttacctgccaccctcacaaccacagacattggtcaggaatcaacagccttccacagcagctcagacgcaactggaacaacacccttacctgcccgctccacagcctcagaccttgttggagaacctacaactttctacatcagcccatcccctacttacacaacactctttcctgcgagttccagcacatcaggcctcactgaggaatctaccaccttccacaccagtccaagcttcacttctacaattgtgtctactgaaagcctggaaaccttagcaccagggttgtgccaggaaggacaaatttggaatggaaaacaatgcgtctgtccccaaggctacgttggttaccagtgcttgtcccctctggaatccttccctgtagaaaccccggaaaaactcaacgccactttaggtatgacagtgaaagtgacttacagaaatttcacagaaaagatgaatgacgcatcctcccaggaataccagaacttcagtaccctcttcaagaatcggatggatgtcgttttgaagggcgacaatcttcctcagtatagaggggtgaacattcggagattgctcaacggtagcatcgtggtcaagaacgatgtcatcctggaggcagactacactttagagtatgaggaactgtttgaaaacctggcagagattgtaaaggccaagattatgaatgaaactagaacaactcttcttgatcctgattcctgcagaaaggccatactgtgctatagtgaagaggacactttcgtggattcatcggtgactccgggctttgacttccaggagcaatgcacccagaaggctgccgaaggatatacccagttctactatgtggatgtcttggatgggaagctggcctgtgtgaacaagtgcaccaaaggaacgaagtcgcaaatgaactgtaacctgggcacatgtcagctgcaacgcagtggcccccgctgcctgtgcccaaatacgaacacacactggtactggggagagacctgtgaattcaacatcgccaagagcctcgtgtatgggatcgtgggggctgtgatggcggtgctgctgctcgcattgatcatcctaatcatcttattcagcctatcccagagaaaacggcacagggaacagtatgatgtgcctcaagagtggcgaaaggaaggcacccctggcatcttccagaagacggccatctgggaagaccagaatctgagggagagcagattcggccttgagaacgcctacaacaacttccggcccaccctggagactgttgactctggcacagagctccacatccagaggccggagatggtagcatccactgtgtgagccaacgggggcctcccaccctcatctagctctgttcaggagagctgcaaacacagagcccaccacaagcctccggggcgggtcaagaggagaccgaagtcaggccctgaagccggtcctgctctgagctgacagacttggccagtcccctgcctgtgctcctgctggggaaggctgggggctgtaagcctctccatccgggagcttccagactcccagaagcctcggcacccctgtctcctcctgggtggctccccactctggaatttccctaccaataaaagcaaatctgaaagctca

SEQ ID NO: 62890 - DNA, 16321 bp, Artificial Sequence
  derived and/or modified sequence
atgctggtgatctggattctgacgctggctctccggctctgcgcgtccgttactacagtgacaccaggctcaacagtaaacaccagtattggaggtaatacaacttctgcatccacacccagttcaagcgacccttttaccacctttagtgactatggggtgtcagtcacatttatcacgggctcaactgcaacaaaacacttccttgacagctccacaaactcaggccacagtgaggaatcaacagtatcccacagcggcccaggtgcaactggaacaacactcttcccttcccactctgcaacctcagtttttgttggagaacctaaaacctcacccatcacttcagcctcaatggaaacaacagcgttacctggcagtaccacaacagcaggcctgagtgagaaatctaccaccttctacagtagccccagatcaccagacagaacactctcacctgcccgcacgacaagctcaggcgtcagtgaaaaatcaaccacctcccacagccgaccaggcccaacgcacacaatagcgttccctgacagtaccaccatgccaggcgtcagtcaggaatctacagcttcccacagcatccccggctccacagacacaacactgtcccctggcactaccacaccatcatcccttggtccagaatctactaccttccacagcagcccaggctacactaaaacaacacgcttacctgacaacaccacaacctcaggcctccttgaagcatctacgcccgtccacagcagcactggatcgccacacacaacactgtccccttccagctctacaacccatgagggagaacctaccaccttccagagctggccaagctcaaaggacacttcgcctgcaccttctggtaccacatcagcctttgttaaactatctacaacttatcacagcagcccgagctcaactccaacaacccacttttctgccagctccacaaccttgggccatagtgaggaatcgacaccagtccacagcagcccagttgcaactgcaacaacacccccacctgcccgctccgcgacctcaggccatgttgaagaatctacagcctaccacaggagcccgggctcaactcaaacaatgcacttccctgaaagctccacaacttcaggccatagtgaagaatcagcaactttccacggcagcacaacacacacaaaatcttcaactcctagcaccacagctgccctagcacatacaagctaccacagcagcctgggctcaactgaaacaacacacttccgtgatagctccacaatctcaggccgtagtgaggaatcaaaagcatcccacagcagcccagatgcaatggcaacaacagtcttacctgccggctctacaccctcagttcttgttggagactcgacgccctcacccatcagttcaggctcaatggaaaccacagcgttacccggcagtaccacaaaaccaggcctcagtgagaaatctaccactttctacagtagccccagatcaccagacacaacacacttacctgccagcatgacaagctcaggcgtcagtgaagaatccaccacctcccacagccgaccaggctcaacacacacaacagcattccctggcagtaccaccatgccaggcctcagtcaggaatctacagcttcccacagcagcccaggccccacagacacaacattgtcccctggcagtaccacagcatcatcccttggtccagaatatactaccttccacagccgcccaggctccactgaaacaacactcttacctgacaacaccacagcctcaggactccttgaagcatctatgcccgtccacagcagcaccagatcgccacacacaacactgtcccctgccggctctacaacccgtcagggagaatctaccacattccatagctggccaagctcaaaggacactaggcctgcacctcctactaccacatcagcctttgttgagccatctacaacctcccacggcagcccgagctcaattccaacaacccacatttctgcccgctccacaacctcaggcctcgttgaagaatctacgacctaccacagcagcccgggctcaactcaaacaatgcacttccctgaaagcgacacaacttcaggccgtggtgaagaatcaacaacttcccacagcagcacaacacacacaatatcttcagctcctagcaccacatctgcccttgttgaagaacctaccagctaccacagcagcccgggctcaactgcaacaacacacttccctgacagctccacaacctcaggccgtagtgaggaatcaacagcatcgcacagcagccaagacgcaacgggaacaatagtcctacctgcccgctccacaacctcagttcttcttggagaatctacgacctcacccatcagttcaggctcaatggaaacgacagcgttacccggcagtaccacaacgccaggcctcagtgagagatctaccactttccatagtagccccagatcaccagccacaacactctcacctgccagcacgacaagctcaggcgtcagtgaagaatccaccacctcccgcagccgaccaggctcaacgcacacaacagcattccctgacagcaccaccacgccaggcctcagtcggcattctacaacttcccacagcagcccaggctcaacggatacaacactgttacctgccagcaccaccacctcaggccccagtcaggaatcaacaacttcccacagcagctcaggttcaactgacacagcactgtcccctggcagtaccacagccttatcctttggtcaagaatctacaaccttccacagcaacccaggctccactcacacaacactcttccctgacagcaccacaagctcaggcatcgttgaagcatctacacgcgtccacagcagcactggctcaccacgcacaacactgtcccctgccagctccacaagccctggacttcagggagaatctactgccttccagacccacccagcctcaactcacacaacgccttcacctcctagcaccgcaacagcccctgttgaagaatctacaacctaccaccgcagcccaggctcgactccaacaacacacttccctgccagctccacaacttcgggccacagtgagaaatcaacaatattccacagcagcccagatgcaagtggaacaacaccctcatctgcccactccacaacctcaggtcgtggagaatctacaacctcacgcatcagtccaggctcaactgaaataacaacgttacctggcagtaccacaacaccaggcctcagtgaggcatctaccaccttctacagcagccccagatcaccaaccacaacactctcacctgccagcatgacaagcctgggcgtcggtgaagaatccaccacctcccgtagccaaccaggttctactcactcaacagtgtcacctgccagcaccaccacgccaggcctcagtgaggaatctaccaccgtctacagcagcagccgaggctcaactgaaaccacagtgttccctcacagcaccacaacctcagttcatggtgaagagcctacaaccttccacagccggccagcctcaactcacacaacactgttcactgaggacagcaccacctcgggcctcactgaagaatctacagccttccccggcagcccagcctccacccaaacagggttacctgccacactcacaaccgcagacctcggtgaggaatcaactacctttcccagcagctcaggctcaactggaacaaaactctcacctgcccgctccaccacctctggcctcgttggagaatccacaccctcacgcctcagtccaagctcaaccgaaacaacaactttacctggcagtcccacaacaccaagcctcagtgagaaatcaaccaccttctacactagccccagatcaccagatgcaacactctcacctgcaaccacaacaagctcaggcgtcagcgaagaatccagcacatcccacagtcaaccaggctcaacgcacacaacagcattccctgacagcaccaccacctcagacctcagtcaggaacctacaacttcccacagcagccaaggctcaacagaggcaacactgtcccctggcagtaccacagcctcatcccttggtcaacaatctacaaccttccacagcagcccaggcgacactgaaaccacactcttacctgacgacaccataacctcaggcctcgtggaggcatctacacccacccacagcagcactggctcgctacacacaacactgacccctgccagctccacaagcgctggccttcaggaagaatctaccactttccagagctggccaagctcaagtgacacaacaccttcacctcccggcaccacagcagcccctgttgaagtatccacaacctaccacagccgcccgagctcaactccaacaacacacttttctgccagttccacaaccttgggccgtagtgaggaatcaacaacagtccacagcagcccaggtgcaactggaacagcactcttccctacccgctctgcaacctcagttcttgttggagaacctacaacgtcacccatcagttcaggctcaacggaaacaacagcgttacctggcagtaccacaacagcaggcctgagtgagaaatctaccaccttctacagtagccccagatcaccggacacaacactctcacctgccagcacgacaagctcaggcgtcagtgaagaatccaccacctcccacagccgaccaggctcaacgcacacaacagcattccctggcagtaccaccatgccaggcgtcagtcaggaatctacagcttcccacagcagcccaggctccacagacacaacattgtcccctggcagtaccacagcatcatcccttggtccagaatctactactttccacagcagcccaggctccactgaaacaacactcttacctgacaacaccacagcctcaggcctccttgaagcatctacgcccgtccacagcagcactggatcgccacacacaacactgtcccctgccggctctacaacacgtcagggagaatctaccaccttccagagctggccaagctcaaaggacactatgcctgcacctcctactaccacatcagcctttgttgagctatctacaacctcccacggcagcccgagctcaactccaacaacccacttttctgccagctccacaaccttgggccgtagtgaggaatcgacaacagtccacagcagcccagttgcaactgcaacaacaccctcgcctgcccgctccacaacctcaggcctcgttgaagaatctacggcgtaccacagcagcccgggctcaactcaaacaatgcacttccctgaaagctccacagcttcaggtcgtagtgaagaatcaagaacttcccacagcagcacaacacacacaatatcttcacctcctagcaccacatctgcccttgttgaagaacctaccagctaccacagcagcccgggctcaactgcaacaacacacttccctgacagctccacaacctcaggccgtagtgaggaatcaacagcatcccacagcagccaagacgcaacgggaacaatagtcctacctgcccgctccacaacctcagttcttcttggagaatctacgacctcacccatcagttcaggctcaatggaaacgacagcgttacccggcagtaccacaacgccaggcctcagtgagaaatctaccactttccacagtagccccagatcaccagccacaacactctcacctgccagcacgacaagctcaggcgtcagtgaagaatccaccacctcccacagccgaccaggctcaacgcacacaacagcattccctgacagcaccaccacgccaggcctcagtcggcattctacaacttcccacagcagcccaggctcaacggatacaacactgttacctgccagcaccaccacctcaggccccagtcaggaatcaacaacttcccacagcagcccaggttcaactgacacagcactgtcccctggcagtaccacagccttatcctttggtcaagaatctacaaccttccacagcagcccaggctccactcacacaacgctcttccctgacagcaccacaagctcaggcatcgttgaagcatctacacgcgtccacagcagcactggctcaccacgcacaacactgtcccctgccagctccacaagccctggacttcagggagaatctaccgccttccagacccacccagcctcaactcacacgacgccttcacctcctagcaccgcaacagcccctgttgaagaatctacaacctaccaccgcagcccaggctcgactccaacaacacacttccctgccagctccacaacttcgggccacagtgagaaatcaacaatattccacagcagcccagatgcaagtggaacaacaccctcatctgcccactccacaacctcaggtcgtggagaatctacaacctcacgcatcagtccaggctcaactgaaataacaacgttacctggcagtaccacaacaccaggcctcagtgaggcatctaccaccttctacagcagccccagatcaccaaccacaacactctcacctgccagtatgacaagcctaggcgtcggtgaagaatccaccacctcccgtagccaaccaggttctactcactcaacagtgtcacctgccagcaccaccacgccaggcctcagtgaggaatctaccaccgtctacagcagcagcccaggctcaactgaaaccacagtgttccctcgcacccccacaacctcagttcgtggtgaagagcctacaaccttccacagccggccagcctcaactcacacaacactgttcactgaggacagcaccacctcgggcctcactgaagaatctacagccttccccggcagcccagcctccacccaaacagggttacctgccacactcacaaccgcagacctcggtgaggaatcaactacctttcccagcagctcaggctcaactggaacaacactctcacctgcccgctccaccacctctggcctcgttggagaatccacaccctcacgcctcagtccaagctcaaccgaaacaacaactttacccggcagtcccacaacaccaagcctcagtgagaaatcaaccaccttctacactagccccagatcaccagatgcaacactctcacctgcaaccacaacaagctcaggcgtcagtgaagaatccagcacatcccacagtcaaccaggctcaacgcacacaacagcattccctgacagcaccaccacgccaggcctcagtcggcattctacaacttcccacagcagcccaggctcaacggatacaacactgttacctgccagcaccaccacctcaggccccagtcaggaatcaacaacttcccacagcagcccaggttcaactgacacagcactgtcccctggcagtaccacagccttatcctttggtcaagaatctacaaccttccacagcagcccaggctccactcacacaacactcttccctgacagcaccacaagctcaggcatcgttgaagcatctacacgcgtccacagcagcactggctcaccacgcacaacactgtcccctgccagctccacaagccctggacttcagggagaatctaccaccttccagacccacccagcctcaactcacacgacgccttcacctcctagcaccgcaacagcccctgttgaagaatctacaacctaccaccgcagcccaggctcgactccaacaacacacttccctgccagctccacaacttcgggccacagtgagaaatcaacaatattccacagcagcccagatgcaagtggaacaacaccctcatctgcccactccacaacctcaggtcgtggagaatctacaacctcacgcatcagtccaggctcaactgaaataacaacgttacctggcagtaccacaacaccaggcctcagtgaggcatctaccaccttctacagcagccccagatcaccaaccacaacactctcacctgccagtatgacaagcctaggcgtcggtgaagaatccaccacctcccgtagccaaccaggttctactcactcaacagtgtcacctgccagcaccaccacgccaggcctcagtgaggaatctaccaccgtctacagcagcagcccaggctcaactgaaaccacagtgttccctcgcagcaccacaacctcagttcgtggtgaagagcctacaaccttccacagccggccagcctcaactcacacaacactgttcactgaggacagcaccacctcgggcctcactgaagaatctacagccttccccggcagcccagcctccacccaaacagggttacctgccacactcacaaccgcagacctcggtgaggaatcaactacctttcccagcagctcaggctcaactggaacaacactctcacctgcccgctccaccacctctggcctcgttggagaatccacaccctcacgcctcagtccaagctcaaccgaaacaacaactttacccggcagtcccacaacaccaagcctcagtgagaaatcaaccaccttctacactagccccagatcaccagatgcaacactctcacctgcaaccacaacaagctcaggcgtcagtgaagaatccagcacatcccacagtcaaccaggctcaacgcacacaacagcgttccctgacagcaccaccacctcaggcctcagtcaggaacctacagcttcccacagcagccaaggctcaacagaggcaacactgtcccctggcagtaccacagcctcatcccttggtcaacaatctacaaccttccacagcagcccaggcgacactgaaaccacactcttacctgacgacaccataacctcaggcctcgtggaggcatctacacccacccacagcagcactggctcgctacacacaacactgacccctgccagctccacaagcgctggccttcaggaagaatctaccactttccagagctggccaagctcaagtgacacaacaccttcacctcccggcaccacagcagcccctgttgaagtatccacaacctaccacagccgcccgagctcaactccaacaacacacttttctgccagttccacaaccttgggccgtagtgaggaatcaacaacagtccacagcagcccaggtgcaactggaacagcactcttccctacccgctctgcaacctcagttcttgttggagaacctacaacgtcacccatcagttcaggctcaacggaaacaacagcgttacctggcagtaccacaacagcaggcctgagtgagaaatctaccaccttctacagtagccccagatcaccggacacaacactctcacctgccagcacgacaagctcaggcgtcagtgaagaatccaccacctcccacagccgaccaggctcaacgcacacaacagcattccctggcagtaccaccatgccaggcgtcagtcaggaatctacagcttcccacagcagcccaggctccacagacacaacactgtcccctggcagtaccacagcatcatcccttggtccagaatctactaccttccacagcggcccaggctccactgaaacaacactcttacctgacaacaccacagcctcaggcctccttgaagcatctacgcccgtccacagcagcactggatcgccacacacaacactgtcccctgccggctctacaacccgtcagggagaatctaccaccttccagagctggcctaactcgaaggacactacccctgcacctcctactaccacatcagcctttgttgagctatctacaacctcccacggcagcccgagctcaactccaacaacccacttttctgccagctccacaaccttgggccgtagtgaggaatcgacaacagtccacagcagcccagttgcaactgcaacaacaccctcgcctgcccgctccacaacctcaggcctcgttgaagaatctacgacctaccacagcagcccgggctcaactcaaacaatgcacttccctgaaagcgacacaacttcaggccgtggtgaagaatcaacaacttcccacagcagcacaacacacacaatatcttcagctcctagcaccacatctgcccttgttgaagaacctaccagctaccacagcagcccgggctcaactgcaacaacacacttccctgacagctccacaacctcaggccgtagtgaggaatcaacagcatcccacagcagccaagacgcaacgggaacaatagtcctacctgcccgctccacaacctcagttcttcttggagaatctacgacctcacccatcagttcaggctcaatggaaacgacagcgttacccggcagtaccacaacgccaggcctcagtgagaaatctaccactttccacagtagccccagatcaccagccacaacactctcacctgccagcacgacaagctcaggcgtcagtgaagaatccaccacctcccacagccgaccaggctcaacgcacacaacagcattccctgacagcaccaccacgccaggcctcagtcggcattctacaacttcccacagcagcccaggctcaacggatacaacactgttacctgccagcaccaccacctcaggctccagtcaggaatcaacaacttcccacagcagctcaggttcaactgacacagcactgtcccctggcagtaccacagccttatcctttggtcaagaatctacaaccttccacagcagcccaggctccactcacacaacactcttccctgacagcaccacaagctcaggcatcgttgaagcatctacacgcgtccacagcagcactggctcaccacgcacaacactgtcccctgccagctccacaagccctggacttcagggagaatctaccgccttccagacccacccagcctcaactcacacgacgccttcacctcctagcaccgcaacagcccctgttgaagaatctacaacctaccaccgcagcccaggctcgactccaacaacacacttccctgccagctccacaacttcgggccacagtgagaaatcaacaatattccacagcagcccagatgcaagtggaacaacaccctcatctgcccactccacaacctcaggtcgtggagaatctacaacctcacgcatcagtccaggctcaactgaaataacaacgttacctggcagtaccacaacaccaggcctcagtgaggcatctaccaccttctacagcagccccagatcaccaaccacaacactctcacctgccagtatgacaagcctaggcgtcggtgaagaatccaccacctcccgtagccaaccaggttctactcactcaacagtgtcacctgccagcaccaccacgccaggcctcagtgaggaatctaccaccgtctacagcagcagcccaggctcaactgaaaccacagtgttccctcgcagcaccacaacctcagttcgtcgtgaagagcctacaaccttccacagccggccagcctcaactcacacaacactgttcactgaggacagcaccacctcgggcctcactgaagaatctacagccttccccggcagcccagcctccacccaaacagggttacctgccacactcacaaccgcagacctcggtgaggaatcaactacctttcccagcagctcaggctcaactggaacaaaactctcacctgcccgctccaccacctctggcctcgttggagaatccacaccctcacgcctcagtccaagctcaaccgaaacaacaactttacccggcagtcccacaacaccaagcctcagtgagaaatcaaccaccttctacactagccccagatcaccagatgcaacactctcacctgcaaccacaacaagctcaggcgtcagcgaagaatccagcacatcccacagtcaaccaggctcaacgcacacaacagcgttccctgacagcaccaccacctcaggcctcagtcaggaacctacaacttcccacagcagccaaggctcaacagaggcaacactgtcccctggcagtaccacagcctcatcccttggtcaacaatctacaaccttccacagcagcccaggcgacactgaaaccacactcttacctgacgacaccataacctcaggcctcgtggaggcatctacacccacccacagcagcactggctcgctacacacaacactgacccctgccagctccacaagcactggccttcaggaagaatctaccactttccagagctggccaagctcaagtgacacaacaccttcacctcccagcaccacagcagtccctgttgaagtatccacaacctaccacagccgcccgagctcaactccaacaacacacttttctgccagttccacaaccttgggccgtagtgaggaatcaacaacagtccacagcagcccaggtgcaactggaacagcactcttccctacccgctctgcaacctcagttcttgttggagaacctacaacgtcacccatcagttcaggctcaacggaaacaacagcgttacctggcagtaccacaacagcaggcctgagtgagaaatctaccaccttctacagtagccccagatcaccggacacaacactttcacctgccagcacgacaagctcaggcgtcagtgaagaatccaccacctcccacagccgaccaggctcaatgcacacaacagcattccctagcagtaccaccatgccaggcgtcagtcaggaatctacagcttcccacagcagcccaggctccacagacacaacactgtcccctggcagtaccacagcatcatcccttggtccagaatctactaccttccacagcagcccaggctccactgaaacaacactcttacctgacaacaccacagcctcaggcctccttgaagcatctacacccgtccacagcagcactggatcgccacacacaacactgtcccctgccggctctacaacccgtcagggagaatctaccaccttccagagctggccaaactcgaaggacactacccctgcacctcctactaccacatcagcctttgttgagctatctacaacctcccacggcagcccgagctcaactccaacaacccacttttctgccagctccacaacattgggccgtagtgaggaatcgacaacagtccacagcagcccagttgcaactgcaacaacaccctcgcctgcccgctccacaacctcaggcctcgttgaagaatctacgacctaccacagcagcccgggctcaactcaaacaatgcacttccctgaaagcaacacaacttcaggccgtggtgaagaatcaacaacttcccacagcagcacaacacacacaatatcttcagctcctagcaccacatctgcccttgttgaagaacctaccagctaccacagcagcccgggctcaactgcaacaacacacttccctgacagctccacaacctcaggccgtagtgaggaatcaacagcatcccacagcagccaagacgcaacgggaacaatagtcctacctgcccgctccacaacctcagttcttcttggagaatctacgacctcacccatcagttcaggctcaatggaaacgacagcgttacccggcagtaccacaacgccaggcctcagtgagaaatctaccactttccacagtagcccgagctcaactccaacaacccacttttctgccagctccacaaccttgggccgtagtgaggaatcgacaacagtccacagcagcccagttgcaactgcaacaacaccctcgcctgcccgctccacaacctcaggcctcgttgaagaatctacggcgtaccacagcagcccgggctcaactcaaacaatgcacttccctgaaagctccacagcttcaggtcgtagtgaagaatcaagaacttcccacagcagcacaacacacacaatatcttcacctcctagcaccacatctgcccttgttgaagaacctaccagctaccacagcagcccgggctcaattgcaacaacacactttcctgagagctccacaacctccggccgtagtgaggaatcaacagcatcccacagcagcccagatacaaatggaatcacacccttacctgcccattttactacctcaggccgcattgcagaatctaccaccttctatatctctccaggctcaatggaaacaacattagccagcactgccacaacaccaggcctcagtgcaaaatctaccatcctttacagtagctccagatcaccagaccaaacactctcacctgccagcatgacaagctccagcatcagtggagaacccaccagcttgtatagccaagcagagtcaacacacacaacagcgttccctgccagcaccaccacctcaggcctcagtcaggaatcaacaactttccacagtaagccaggctcaactgagacaacactgtcccctggcagcatcacaacttcatcttttgctcaagaatttaccacccctcatagccaaccaggctcagctctgtcaacagtgtcacctgccagcaccacagtgccaggccttagtgaggaatctaccaccttctacagcagcccaggctcaactgaaaccacagcgttttctcacagcaacacaatgtccattcatagtcaacaatctacacccttccctgacagcccaggcttcactcacacagtgttacctgccaccctcacaaccacagacattggtcaggaatcaacagccttccacagcagctcagacgcaactggaacaacacccttacctgcccgctccacagcctcagaccttgttggagaacctacaactttctacatcagcccatcccctacttacacaacactctttcctgcgagttccagcacatcaggcctcactgaggaatctaccaccttccacaccagtccaagcttcacttctacaattgtgtctactgaaagcctggaaaccttagcaccagggttgtgccaggaaggacaaatttggaatggaaaacaatgcgtctgtccccaaggctacgttggttaccagtgcttgtcccctctggaatccttccctgtagaaaccccggaaaaactcaacgccactttaggtatgacagtgaaagtgacttacagaaatttcacagaaaagatgaatgacgcatcctcccaggaataccagaacttcagtaccctcttcaagaatcggatggatgtcgttttgaagggcgacaatcttcctcagtatagaggggtgaacattcggagattgctcaacggtagcatcgtggtcaagaacgatgtcatcctggaggcagactacactttagagtatgaggaactgtttgaaaacctggcagagattgtaaaggccaagattatgaatgaaactagaacaactcttcttgatcctgattcctgcagaaaggccatactgtgctatagtgaagaggacactttcgtggattcatcggtgactccgggctttgacttccaggagcaatgcacccagaaggctgccgaaggatatacccagttctactatgtggatgtcttggatgggaagctggcctgtgtgaacaagtgcaccaaaggaacgaagtcgcaaatgaactgtaacctgggcacatgtcagctgcaacgcagtggcccccgctgcctgtgcccaaatacgaacacacactggtactggggagagacctgtgaattcaacatcgccaagagcctcgtgtatgggatcgtgggggctgtgatggcggtgctgctgctcgcattgatcatcctaatcatcttattcagcctatcccagagaaaacggcacagggaacagtatgatgtgcctcaagagtggcgaaaggaaggcacccctggcatcttccagaagacggccatctgggaagaccagaatctgagggagagcagattcggccttgagaacgcctacaacaacttccggcccaccctggagactgttgactctggcacagagctccacatccagaggccggagatggtagcatccactgtgtgagccaacgggggcctcccaccctcatctagctctgttcaggagagctgcaaacacagagcccaccacaagcctccggggcgggtcaagaggagaccgaagtcaggccctgaagccggtcctgctctgagctgacagacttggccagtcccctgcctgtgctcctgctggggaaggctgggggctgtaagcctctccatccgggagcttccagactcccagaagcctcggcacccctgtctcctcctgggtggctccccactctggaatttccctaccaataaaagcaaatctgaaagctcagaatgagaagtga

SEQ ID NO: 62891 - DNA, 16437 bp, Artificial Sequence
  derived and/or modified sequence
atgctggtgatctggatcctgaccctggccctgcggctgtgcgccagcgtgacaaccgtgactcctgagggcagcgccgtacataaggctattagtcaacagggcactctctggacaggggaagtgctggaaaaacagaccgtggaacagggcaagtctacattacggcggcagaagaaccactttcaccgctctgccggggaactgcgatgtaggaacgccctcaaggatgagggtgcgtcagctggatggtctgtgatgtttgccggggaatcagttgtggtcctagtccatctgtggatgacaggcgccagggttaagaacttgggactggtagagttcgcctcccccggtgatgacggcgatggccgagcggaaggattcagcttgggtctgccactgtcagagcaggcgcgcgctgctggcgcacgagagaaggaaaggcaggaaaccgtcatcaaccacagtaccttcagtgggttctcacagatcaccggtagcacagtgaacacctcaatcggcggcaatacaacttcagcgagcacccccagcagtagtgatccgttcacaactttttcagattatggtgtgagcgtgacgttcataacagggagtacagccacgaagcactttctcgattcctcgaccaacagcggtcatagcgaggagagcacggtgtctcattctgggcctggggcaactggcactaccttgttcccgtcccacagtgccaccagcgtctttgttggcgaacccaagacatcaccaataaccagcgcatccatggagaccaccgcccttcccggctccaccaccacagccgggctgtcagagaagtctactacattctactcttcccctcgcagccctgatcgaactttgagtccagcaaggacaacgagctcaggggtgtcggagaagtcaaccactagccactctagacccggaccaacgcacacaattgcctttccagatagtacaactatgcctggtgtctcgcaggagtcgaccgcgtcacactctattccaggaagcaccgatactaccctatctcctggtacaacaacaccctcttctctcggcccagaatccactaccttccacagcagtcccggctacacaaaaactactaggctgccagacaacacaaccacatctgggctgcttgaggcctcgacacccgtgcatagtagcacaggttcacctcatactaccctgagcccttcgagttctacgacacatgagggcgaacctaccacctttcagagttggccatccagtaaggacacctcacccgcacctagtggcacaacatctgcattcgttaagctgtcaaccacctaccacagttctccaagcagtactcccaccacacacttcagtgcatcttccaccactctcggccattcagaggagtccactccagtgcactcatccccagtcgctacggcaaccacaccacctccggccaggagcgccaccagcgggcacgttgaagaatcaacggcgtatcacagaagccctggtagtacccagactatgcattttcctgagagctccaccacatctggccactccgaggagtctgcaacatttcatgggtccacaactcacaccaagagctctacaccttccactaccgccgctcttgcccacacctcctaccatagcagccttgggtctaccgagacaacccactttcgggactcttctacgattagcgggcgcagtgaggagtccaaggcatcccattcttctcctgacgctatggccacaacggtcctgcctgctgggagtacaccttcagtccttgtaggggatagcacacccagtccaatttcctcaggttccatggagaccactgcgctaccaggcagcaccactaagcctggattgtccgagaagtctactacattctactcaagtccgaggagccctgatactacacatctcccggcatccatgacgtcaagcggagttagcgaagagagtacgacctcacattcacgccctgggagtacacacacaacagcctttcccgggtctacaacaatgcctggcctgagccaggagtcaaccgcctctcactcctctcctggtcctacggacacgacgctcagccctggttctacaaccgcatcaagcctgggcccagagtataccacttttcactctcgccccgggtcaaccgagacaacacttctcccagacaatactactgcatcaggtctgctagaggcctccatgcccgtccatagcagtacaaggtcaccccacaccaccctgagcccagctggaagcaccactcgtcagggcgaatctactacttttcactcttggccttctagtaaggacactagacccgcccctcctacaactacatctgcctttgtggagcctagtacaacatctcacgggtcacccagcagcattccaactacccatattagtgccaggtcaacaacttccggtttggtggaagaatccaccacttaccactcctcaccaggttctacccagacgatgcacttccccgagtctgacaccaccagcggaagaggcgaagaaagtaccacatctcactcttccacgactcatactatcagctctgccccttctacaacaagtgcattggtggaggaaccgactagctaccatagctcaccagggtcgaccgccactacccacttcccagatagcagtactacaagtgggcgatcggaggaatcaacagctagtcacagcagccaggatgcaactgggaccatcgtactccctgcgcgttccacaacaagcgtgctcctcggcgaatccacaacttccccaatctcgtccgggagcatggaaaccaccgccctgccaggatcaaccactacccccggcttatctgagcgttctaccaccttccatagctcccccaggtcgcctgctactacgctgagcccagcatccactactagctctggggtgtccgaggaatcgaccaccagccgttcccgacctggatctacacatacaaccgccttccccgactcaacaaccacgcctgggctctctaggcactcaactaccagccactcttcgcccgggtccactgataccactctactgcccgcttccaccaccaccagtggcccgtctcaggaatcaactaccagccattcatcttccggcagcaccgacactgcactgtctccggggagcaccactgcactgagcttcgggcaggagagcacaacattccatagcaacccaggtagcacccacacaacactcttcccagatagtactacaagcagtgggattgtggaagcctccacaagggttcacagctcaactggatccccgaggaccaccctatctcctgcctcgtccacatcccctgggttgcagggggagagtaccgcattccagacccatccagcctcaacacacactacaccttccccacccagtacagccactgctccggtggaggagagtaccacgtaccatagaagtccgggctccactccaacaactcactttccggcaagctcgactaccagtggacactcggagaagagtacaattttccacagttctcccgatgcaagcggcactactccaagtagcgctcactccacgacatccgggcgcggcgagagcacaacaagcaggatcagtcctggctctacagagatcacaaccctgcctggcagtaccacaactccggggctgagcgaggcttctacaacattttactcttccccacgctcccccactactacactgtcgcctgcctcaatgacgtcgctgggagtgggcgaggaatccactacctcccgttctcagccaggcagcactcactcgaccgtctcccctgcctccactactactcctggcctctctgaagaatctaccaccgtttatagtagcagcagaggatcaaccgaaacaacagtgtttccccatagcacaaccacctcagttcatggagaggagcccacaacgttccatagccggccagcttctacccacaccacacttttcaccgaggattcaactacatctggactgacagaggagtcaacggccttccccggttctccagcatcaacccagactggcctgcccgccactctgacgactgccgacctgggagaagaatctaccaccttcccaagctcctcaggctcaaccggcacaaagctgagccccgctcggtcaactacctctggactggtgggagaatctacaccctctaggttaagccccagttcgacagagactacaaccctcccaggctccccaacaacgccttctttaagcgagaagagcacaaccttctatacctccccacgaagcccagatgcaacccttagccctgcgaccactacaagttctggcgtcagcgaagagtcatcaacttcacattcccagcccgggagtacccacactaccgcgttcccagattctacaactacttccgaccttagtcaagaacctaccacctcccactcttcacagggatccacagaggctaccctctcacctggttctacaactgccagttccttgggtcagcagagcacgacattccacagcagtcccggtgacaccgagaccacactgctacccgatgataccatcacttctgggttagtggaagcttctactcccactcactcatctacaggtagcctgcacacaacactgacccccgcaagcagcacctctgccggcctacaggaagaaagtacaaccttccagtcctggcctagtagctcagataccacacccagtccacctgggaccacagccgcccctgtagaagtttctactacctaccactcacgcccatctagcacacccactacccatttcagtgcttccagcactacactgggtcgcagcgaagagtccacaaccgtgcatagctcccccggcgccacaggtactgctttgtttcctaccaggagcgctacctctgtcttggtcggcgagcccacgacctcacccatttcttctgggtctacagagacgacggcgctaccagggtccactacgactgcggggttgagtgagaagtccactactttctactcctctcccagatcccccgataccactctgagtcccgcctctactacatcgtctggcgtttcagaggagtctacaaccagccactctagacccgggagcacacacaccacagcattccctgggtctacaacaatgcctggggtgtcacaggagtccacggctagtcattctagccctggcagcacggataccaccttgagtcccggtagcactacagcctcatccctgggccctgaatctacaacttttcattcatcccccgggagcaccgaaacgacgctgctgccggacaacacaaccgccagcgggctgctcgaagcatccaccccggtgcattccagcaccgggtccccacatacgaccttgagccccgccggttccacaacgcggcagggggaaagcaccacctttcaatcctggccctccagcaaggatactatgccggcgcctcccaccacaacatctgcctttgtagagcttagtactacatcccacggatcacccagttccactccgaccacccacttctctgcctcttccacaaccctggggcgctctgaagagtccaccaccgttcacagttctccggtggccaccgcgaccaccccttctccggcaaggagtactacctccggactggttgaagaaagtaccgcctaccactcctcccctggcagtacccagacgatgcactttccagaatcttctaccgcttcagggagatccgaggagtctcgaacttcacatagttcaacaacgcacactataagctctccgccgtccaccacctccgccctggtagaggagcccacatcctaccattcgtcgcctggttcaaccgctacaacccatttcccagatagtagcaccacctcaggcagatcggaggagagtactgcatctcattcatcacaggatgctaccggaacgatagtccttcctgctcgatctactaccagcgtgttgctgggggaatctacaacctcccccattagctccggttctatggaaacgacagcattacctgggagtaccactacgccaggcctgagtgagaaatctactaccttccactctagcccccggtcccccgcgactacactctctccagcttccacaacatcaagcggagtctccgaagaaagcaccacttcccatagtagacccgggtcgacacacaccacagcatttccagattcaaccaccacaccaggactgtcacgccactctacaacaagtcattcttcacctggcagcaccgatactacattattacccgcatcgactacgacctcgggtccatcacaggaatcaacaacatcccactcatcacctggttcgaccgacaccgccttgagccccggaagtacgacagccttaagctttggacaggagtccacaacttttcatagctctccgggcagcacccataccacattattccctgactctaccacttccagcggtatcgtcgaggctagcacgagggtccacagcagcactggttctccaaggacaaccctatccccagccagttctactagccctggactacaaggggagtctacagctttccaaacccatccggctagcacacatactactccctcacccccatcaaccgcaaccgctcccgtggaggagtcaacaacttaccataggagcccagggagcactcccactacacactttccagccagcagtaccacaagcggccactccgaaaaatctaccatattccatagtagccctgacgcaagtgggacaactccctcatctgcacattccactaccagcggacggggagagtccacaacatctaggatttcgcccggcagcactgagattaccaccctgcccggatccaccaccactcccgggttatctgaagcttcaacaacattttacagtagcccaagaagcccaaccactaccctctcccccgcctccatgacaagcctgggggtcggcgaagaaagcactacctcccgatcgcagccagggtctacccacagcactgtctctcccgcctccacaaccacacctggacttagcgaagagtccacaaccgtatatagttccagtcctggttcaaccgagactacggtgtttcccagaactccaactaccagcgtcaggggcgaggagccaaccacctttcattctagacctgctagcacccacaccacccttttcacagaggactcaactacgtccgggttgaccgaagaaagcacggcatttcccgggagtcccgccagcacacagactggattgcctgccactctgaccaccgccgacctcggcgaggaatctactacctttccctccagtagcgggtcaacaggcaccaccctgtcacctgccagatccaccacaagcgggttggttggggagagcaccccgtctagactctcccccagctcaacagagacaactactctgcctggatctcctaccacccctagtctatcagagaaaagtaccacattttacacctcgccccgctccccagatgctaccctatctcctgccacaacaacttcatccggagtctcggaggagtctagcacaagccattctcagcccgggtctacacacaccacggcttttcctgactccacgacaacacccgggctgtcacgacatagcaccacttcacatagtagcccagggagcaccgacaccactcttcttccagcttctacgaccacttctggtccatctcaggagtctacaacctcacattcttccccgggatccactgatacagcgctgagccccggatcgacaactgccctctctttcgggcaggagtctactacattccactccagccccggatcaacccatacaaccctgtttcccgattcaaccacttcctctggcatcgtggaagccagtactcgagtgcactcgtctacgggctccccacggactactctcagcccagcctcaagtacaagtccaggtctgcaaggggaaagcacgacctttcagacacatccagcatcgacccacacaaccccgtctcctccaagcacagcaaccgctcctgttgaagagagtaccacctaccacagatctcctggttcgacaccaaccacccattttcccgccagctcaactacatcaggccatagcgagaagtcaacaatattccacagcagccctgatgcctccgggactacgccatcgagcgcccatagtacgacgtcaggacggggcgaatcaactacctccagaatatcacctggctccacggaaattacaacactgcctggtagcacaacaacacctggccttagtgaagcatcaacaacattttactcctccccccgtagcccaacaactacgctctctcctgcatctatgacaagcctgggagttggcgaggagtctactacgtctcgatcacagcctgggagcacacactctacagtgagcccagcctccaccaccacccctgggctctccgaggaaagtaccacggtttatagctcatctcctggcagtacagagactactgtgttccctcgctctaccaccacaagcgtaagaggcgaggagcctaccacgtttcactcacggccagcttctacacatacaacactgtttaccgaggatagcacgacttccggactgaccgaggagtcaacggcttttccgggtagcccagcaagcacccagaccgggttgccggccacactgacaacagctgatctcggggaagagagcacgacttttccaagctccagcggctcaaccgggactactctctccccagcccgctcaacaactagtggactggttggggagtccacacctagcaggcttagcccctcctcaactgagactactaccctgccaggcagtcccaccacacctagtttaagtgagaagtcgactacgttctacacctctcctagaagcccagacgctacgctgagccccgccaccaccactagctccggcgtcagcgaagagtcctcaacatcacactcgcagcccggatctacccatactacagcgtttcccgacagcaccacgacttctggtctatcacaagaacccacagcaagtcacagctcacagggttcaactgaggcgaccttgagcccaggaagcactaccgctagcagtcttggccagcaatccactacctttcattcctctcctggcgatacagagactacactccttcccgatgataccatcacgtcgggactggtggaagcctctactccgacccattcctctaccggctctctgcacacgacgctgacccctgcctcatctacatctgctgggctgcaggaggagagcaccacgtttcagtcatggccttcctcatctgatacaacaccgtccccaccggggactacagccgccccagttgaagtgtctacaacatatcacagccgtccaagttccacgcccactacccacttctcagcgagtagtactactttgggccgctctgaggagagtaccacagttcacagctctcccggagcaaccgggacggctttgttccctacaagaagtgccacatcagtgcttgtgggcgaaccaacaacttcacctatatcatcgggatctaccgagacaactgctctgcctggctctaccactaccgcgggtctctccgaaaagtccaccactttttacagctcccctcggagtccggacaccactctgtctcctgcttccaccacttccagcggggtgtctgaagagtcaaccacttcccactccaggcctggtagtacacacaccacagcatttcctgggagtaccactatgccaggcgtcagccaggaatctacagcatcacactcctcaccggggtctactgataccactctcagcccgggttctaccaccgcgtcctcactaggaccggaatcgaccacttttcacagtggtcccggcagcaccgaaacaaccctgctgcctgataacaccacagccagcggcctgctggaagcttctacccccgtgcacagctcgaccggatctccccataccaccctatcacctgcaggctcaaccactcggcaaggagaatccaccacattccagtcttggccaaattccaaagatacaactcccgcacccccaactaccacatctgccttcgtggagttatcaactacttcccacggctcacccagctctactccaacaactcactttagcgcctcttcaacaaccctcgggaggtctgaggaatccacaaccgttcactcgagtccggtggctacagcaaccaccccctcccctgccagaagtaccacatctgggttagtggaagaatccacaacatatcacagcagcccaggcagtacacagaccatgcactttccggagagcgacaccacctccggccgcggggaagagtctacgacaagccattcttcaacaacccacaccatctcctcagcaccatcaaccacttccgccctggtggaggagcctacctcctaccatagttcccctggatcaaccgccacgacgcattttcctgattcaagtactacctcagggagatctgaggagtccactgcctcgcacagtagccaggatgccaccggcaccatcgtactacccgcccgaagtacgacctcagttctgttaggtgagtctactacctcacccatttctagcgggtccatggaaaccaccgccctccctggaagcacaaccacacctggactgtccgagaagtcgaccacgtttcactcttccccgcgctctccggcaacaactctcagtccagcttctactaccagtagcggcgtgtcggaagagtcgactacctcacacagtagaccaggaagcacacatacaactgccttcccagactcaaccactactccaggactctcacgccactctacgacatcccactcaagcccaggttctacagatactaccctcctccccgcttccaccactacaagcggttcttctcaggaatcaactacctcgcattcctcttctggttctaccgataccgccctgtcacctgggagcactactgcgctgtcattcggccaggaaagtacgaccttccactcctcgcccgggtcaactcacactacgttgtttcctgattctacaacatctagcgggatagtggaagccagtacaagagtccactcctccactggatcccccagaaccaccctgagcccagcatctagcacctcaccaggattgcagggcgagtccaccgcctttcaaacccatccagcgtcaacacatactaccccgtcacccccctccaccgcgacggctccagtcgaagaaagcactacctatcataggtcgcctggatccactcccactacccacttcccggcctcaagcacaacctccgggcattcggaaaaatccacaatcttccatagctccccagacgcttcgggcacaacacccagcagcgcccactcgacaacatctggccggggagagtccaccaccagccgcatatctcctggctccacagagattactactctcccaggaagtaccacaacgccaggattgtccgaagcttcgaccactttttatagcagccctaggagtccaacaacaacgctgtcccccgccagcatgacttctcttggagtgggagaggagagcactaccagtcggagtcagcctggcagtacccatagcaccgtgtctcccgccagcactacgacaccagggctgagtgaggagtctacaacagtctatagcagctcacctggctctaccgaaaccaccgtgtttcctcggtctaccactacatcagtaaggagggaagagcccacaacctttcacagtcggcccgccagcacccacaccacactgttcaccgaagacagcacaacctcaggcctgaccgaagagtctaccgcctttccggggtcacccgcctcaactcagacagggctgccagccacactcacaaccgcagacctgggggaagaatctacaaccttcccctcgtcatcaggctccacaggcaccaagctctcccctgcaagaagtaccaccagcgggctcgtaggagaatccaccccatctcggttatcccctagtagcacagagaccaccacactgccgggcagcccgaccacaccttcattgtctgagaagtcaacaaccttctatacctccccgaggtcccctgacgctaccctgagccccgcgaccaccacctcaagtggcgtctccgaagagtccagtacgtcccattcccaacctggcagcacacatacaactgctttccccgactctactactacctctggcttatcccaagagccaaccacctcgcattcgagtcaagggtcaactgaggccacgctgtcacctggatctaccactgccagtagcttaggccagcagtccactacttttcacagcagccccggtgacactgaaaccacgctgcttcctgatgataccattactagtggcctggtcgaggcttcaacccccactcattctagcactgggagcctgcataccacactgactccagcaagctccaccagtacaggcctacaggaggagtccaccacatttcagagctggccgtctagctcagacaccacacctagtcctccttccaccaccgccgttccagtcgaagtgtcaacaacctatcacagccggccatccagcactccgacaacacacttctccgcctcttccacgaccttagggcgcagtgaagaatctaccacggtacacagctcaccgggcgcaactggaacagcccttttccctacacgcagcgctacaagtgtgttagtgggagagcccactacttcccctatctcttcaggctccactgagacaacggccctgccaggatcgacaactacggcaggcttgagcgagaagtctactacattctatagttcaccaagatctcctgacacaaccttgtctcctgcctctaccaccagctctggcgtttccgaagaatccacgacaagtcattctcgaccaggatccatgcatactactgcttttcccagtagcaccaccatgcctggggtatcacaagaatcaactgcgtcacatagctccccaggatctactgacacaactttgtcaccgggctctacaactgcaagctcactcggaccagagtcaaccacctttcactccagccctggttccactgaaacgactttattgccagataacactacggctagcggtctgctggaggccagcaccccggttcattcaagcaccgggtcgccacatacaacactcagcccagccggaagcaccacacggcagggggagagtacaacgttccagtcgtggccaaattccaaagatacgacccctgctccccccaccaccacctctgcctttgtggaactgagcaccaccagtcacggtagcccatctagcaccccgaccactcacttttccgcctcttcgacaactcttgggagaagcgaggaatcaaccaccgttcattcctctccagtcgccaccgcaactacgcccagccccgcccgctctactacatctggcttagtcgaggagagtacgacctatcactcatctcccggatctacccagaccatgcattttcccgagagcaatacaacctccggaagaggcgaggaatcgaccacatcccatagtagcaccactcatactatttcttcagccccttccaccactagtgccctggtagaggagccgacttcttatcactcaagtcctggcagtacagcaacaacgcactttcccgacagttccactacgtccgggcgcagcgaagagagcacggcaagtcattcatctcaggacgctacaggaactattgtactcccggccagaagcactacctcagtactcctcggcgaaagtacaaccagccctatatcctctggttcaatggagaccaccgcattgcccggctccaccactacccccgggttgtcagaaaaaagcacaacgttccactcatcacctagctccactccaacaacccacttcagcgcctcctctaccacactgggccgaagtgaggagagtactaccgtccattctagtccggtagccacggcaaccactcctagcccagcccgcagcacaactagtgggttagtggaagagagcactgcttatcactcctccccgggctcaacacaaacaatgcacttccccgagtcttcgaccgccagtgggcggagtgaggaaagtagaacctctcatagcagcaccacccataccatcagctcaccccccagcacaaccagtgcgctggtcgaggagcccaccagctatcactctagccccggctctattgctacgacacatttccctgagtcttccactaccagtggcaggtccgaggagtctacggcctcccatagctccccagatacaaatggcataacacccctgcctgctcacttcacaacaagcgggcgaatcgccgagtccaccactttctatatcagccccgggtctatggagacaaccctggcttcaactgcaaccacaccaggtctctctgccaagtctaccatcctctattcttcctcacgttcaccggaccagaccctgtccccggcctctatgactagctcatcgatctctggtgagcccacttccctgtacagtcaggctgaatctacacacacgactgcgtttcccgcctctaccaccacaagtggcctgagccaggagtctaccacattccatagcaaacctggctcaacagagacaacactgtcgccaggctccataacaacctcaagctttgcacaagagtttactaccccacatagccaacctggatcggccttgagtactgtctctccagccagtacaacggtgcctggactctccgaggagtccaccacattctattcttccccgggcagtactgagacaaccgccttttcacattcaaatacaatgagtatccatagccagcaatcaaccccttttccagacagtccaggcttcacccatacagtcctccctgcaacacttactactaccgacattggccaggaaagcaccgctttccactcatcttcagatgctacagggacaacaccattgcccgctcgcagcactgcttctgacctggtcggcgagcctaccactttctatatctcgccatcccctacgtataccacactctttcctgcatcttccagcacttctgggctgacagaggaaagtacaaccttccacacatccccgagtttcacgtcaacaatagtatctacagagtcccttgaaacactggcccccgggctttgccaggaggggcaaatttggaacggcaaacagtgcgtctgtcctcagggctatgtggggtaccaatgccttagccccttggaaagtttcccagtggagacccctgagaaactcaacgctaccctcggaatgacagtgaaagtgacttatcgtaattttactgaaaagatgaacgatgcatcgtctcaggagtaccagaacttctccacgctcttcaagaatagaatggacgtggtcctgaaaggcgataacttaccacagtacaggggcgtaaatattcggcgattgcttaacggaagcattgtcgtgaaaaatgacgtcatcctcgaggcggactacactctcgaatacgaggaactgttcgaaaatctggccgaaattgtcaaggcaaagataatgaatgagacacgaacaaccctgctcgaccccgattcatgcagaaaggctatcctttgttactcagaggaagataccttcgtagattcaagtgtaactcctggcttcgactttcaggagcagtgtacccaaaaagctgcggaaggatacacccagttctactacgttgatgttctggatggtaaattggcatgcgttaacaagtgcaccaaggggactaagtcccagatgaactgcaacttgggaacctgccaacttcagcgctctggaccccgttgcctgtgtcccaacacaaacacacactggtattggggtgagacgtgtgaatttaacatcgctaagtcactagtgtatgggatcgtgggcgcagtcatggcagtccttttgttggctctgatcatactgatcatcctcttctccctcagccagaggaaaaggcaccgggagcagtatgatgtgcctcaggagtggcggaaagagggtacacctgggattttccaaaaaactgctatttgggaagatcaaaatttacgggagtcacggtttggcctggagaacgcttacaacaattttcgcccgaccctagagaccgtcgactccggcaccgagcttcacatccagagacccgaaatggttgccagcactgtttag

SEQ ID NO: 62892 - DNA, 16008 bp, Artificial Sequence
  derived and/or modified sequence
atgctggtgatctggatcctgaccctggccctgcggctgtgcgccagcgtgaccaccgtaacgcccggcagcaccgtcaatactagcattggaggcaatactactagtgcttcaaccccgtcaagtagcgatcccttcactacatttagtgactatggcgtgagcgtcaccttcatcaccggctcaactgccactaaacactttctcgattcctccaccaacagcggtcactccgaggaatcaaccgtcagccactcaggaccaggtgctaccggcacgaccctcttcccaagtcacagcgccacctctgtgttcgtgggagagccaaaaaccagccccattacctccgcatccatggaaacgactgcacttcctggctccaccactaccgccggcctctcggagaagtcaacaaccttctactcgtctcccaggagtcccgacagaaccctgagtccagcccggaccacttcaagcggagtgagtgagaaatcaacgacgtctcatagtagaccgggacccacacatacaatcgcctttcctgacagtacgaccatgcccggggtgtcccaggagtcgaccgcctcccacagcattcccgggtccacagacactaccctgagccctggaaccacaacgccatcatccttagggccagagtcaacgaccttccactcatcccctgggtatacgaagacaacccgacttccggataacacgaccacgtctgggcttctcgaagcctctacgccggtgcactcttcaacgggcagcccacataccactctcagtccctcctcctctactactcatgagggtgaacccacaacttttcaatcttggccctctagtaaagacacatctcccgccccaagcggcactacaagtgccttcgtcaaactcagcaccacatatcacagcagcccttcttcaaccccgaccacccacttttccgcttcttcaacaactctgggacactccgaagagtccacccctgttcattcctcacccgtggccactgccacaaccccaccacccgcaagatctgcgacctccggccacgtggaggaatcgactgcataccaccggagccccggttcaacgcagacaatgcacttcccagaatcaagtacaacttcgggtcacagcgaggagtctgccacctttcatggatccacaactcacacaaaatcgtccacaccttcaaccaccgcagcgctcgcccacacatcttaccacagctcacttgggtctacagagacaactcatttcagagactcctccaccatctctgggcggtccgaagagtctaaggccagccactcatccccagatgccatggcaaccacagtattgccagccggatcaacccctagtgtcctcgtgggggactctacgccgtctccgatctcaagtggctccatggagactacggcgctgccaggttcaactactaagcccggtctgagtgagaaatctaccactttttactcctctcccaggtcacctgacactacgcatctgccagcctcaatgacttccagcggtgttagtgaagaatccaccactagccacagccggcctggctctactcatacaacggcctttcctggcagtacgacaatgcccggtctatcccaagagtctacagcttcacattcctcaccaggaccaactgacaccacactgtcccccggctccacgacggcgtcttctttggggcctgagtacacaacattccattccaggcccggtagcaccgaaactaccctacttccagacaacacaaccgcctctggtctgttagaggcttccatgccagtgcatagtagtacccgcagcccccacaccactctcagtcccgctggcagtacaacccgtcaaggcgaaagcaccacctttcattcctggcctagctccaaagatacacggcccgcacctccgaccacgacctctgcctttgtcgagccttcgactacctcacatggctccccctcctctattccaacaacccacatatcagccagatctaccacttcaggcttagtggaggaatccacaacctatcattcttcacctggaagtacacagaccatgcatttccccgaatcagacactacttccggcaggggcgaggagtctactacctctcactcttccactacgcacaccatctcaagcgccccgtcgacaacctcggcccttgtagaggagccaaccagctatcactccagccccggctcaaccgccacaacccacttcccggatagctccactacctcaggcagatccgaggagtccaccgcatcccactccagtcaggatgccaccggtaccatcgtcctcccagccagaagcaccactagcgtcttgttgggcgagagcacgacgagtcctatttcatctgggtcaatggagactaccgcgttgcccggctctactactaccccagggctgtccgaacgatccacaacgttccattccagcccgagatcaccagcgactaccctgagtcccgcaagcacaacctcgagcggcgtgagcgaagaatccaccacatcacggtcacgacccggttctacccataccactgcgttcccggattccaccaccacgcccggactttcccggcacagcactacaagccacagcagcccagggagtacggacaccacactgctgccagcgtccacaaccactagtggaccctcccaggaaagcacaacatcacactcatcctcgggatctactgatactgctctgagccctgggagcactaccgccctctcattcggccaggaatcaaccacgttccactccaatccgggatctactcacactacactgttccctgattcaacaacttctagcggcatcgtggaggcttccactagggtacacagctcgacaggatctcccagaactactttgtctccagcctcctctacttccccggggctccaaggcgaatccacagcgtttcagacgcatccggcatctacccacacaacaccctctccgccctctactgccacggctcctgtggaggagtctactacttaccacagaagtcctggatccacgcccactacgcatttcccagcatcgtcaaccacctcagggcatagtgaaaagagtaccatatttcatagctccccggacgcaagcggtactacgccaagcagcgcccactcaaccacttcaggccgaggagagtctaccaccagccggatcagcccaggatcaacagagatcacaactctgccaggctctactacaactccaggcctctccgaggcctcaacaaccttctatagctcccctagaagccctaccactactctgagcccggctagtatgacctctcttggcgttggcgaggagtccactacaagtcgttctcaaccaggcagcacacattccaccgtgtcacctgcaagcacaacaactcctggtctgagtgaagaaagcactaccgtgtactcgtccagccgtggttcgacagagacaaccgttttccctcactccacgaccacttctgtccatggggaagagcctacaacattccactctaggccagccagcacacatacaactctttttacagaagacagcaccaccagcggacttaccgaagaaagcactgcttttcccggctcacccgcctcaacccagacagggctccccgctacactgaccacagccgatcttggtgaagagtctacaactttcccttccagcagtggctccacaggaaccaaactgagtccagctaggtcgacaacctcagggctggtcggcgagtctacacccagtcgtctatccccaagctccaccgagaccactactctgcccgggagcccaaccactccatcattatccgagaaaagcacaacgttttacactagtccacggagtcctgatgctaccctgagcccagcaaccaccacgtcctctggggtgtccgaggaatcctcaactagccattcccaaccaggctctacgcataccaccgccttcccagatagcaccaccacttcagatctgtcccaggagcctaccacctcccacagcagccaaggctctacggaagcgaccttgtccccgggaagtaccacagcctcaagcctaggacagcagtcaacaacctttcactcctcccctggtgataccgaaacgactctccttcccgacgatactattacatcagggctggttgaagcatccacccccacgcactcctcaaccggctccctccacacaacactgaccccagcatcaagcaccagtgccgggctgcaggaagagtcaacaactttccagtcctggccttcttctagtgatacaacgccaagtccacctgggacaactgccgccccagtggaggtgagcaccacataccactcccgtccctctagtaccccaacaacacacttttcagccagctctaccacactgggcaggtccgaggagtcaactacggtgcactcaagtcccggagccactgggactgctctgtttccgacccgatccgccacatcagttctggttggggagccaacaactagtccaatttcttcgggctcaaccgagactactgctctccccggctctacgacaaccgctggactctcagagaaaagtacaacattctactctagccccaggtcgccagataccacactcagccccgcatctacgacctcctcgggagtgtctgaggagtccacaacatctcactcccgtcctggttctacacacaccaccgctttccccgggtccacaactatgccaggcgtcagccaggagtccaccgcttcccattcttcacctggatctacagacaccactctatcgcctggctccacaacagcttcctcactcggtccagagagtacaaccttccattccagccccggctctacggaaactactctgctccccgacaacaccaccgccagcgggctcctggaggctagcacccctgtacactcctccactgggtccccccataccaccctgtctccggcagggtcaacaacccgacagggagaaagcacaacattccagtcgtggcctagcagtaaagatacaatgccagcacctcctacaaccacttcggccttcgtggagttgagcacaacgtcccacggtagcccatctagtaccccgacaacgcacttttctgcctctagcactaccctaggccgtagcgaggagagcaccaccgttcactctagccctgtggccactgccacgaccccaagcccagctcggagcactacttccggtctcgtcgaggagtctaccgcttatcacagctccccaggttctacccaaacaatgcatttccccgaatcttcaacggcatctggaaggtccgaggagtcacgcacatctcatagcagcacaactcacaccattagctccccacctagtacaacaagtgcactcgttgaggaaccgacttcttatcactcctcccccggttctactgcaactacccatttccccgactcttccactaccagtgggaggtcagaggaatccacagcctcacactcatcccaggacgcaacggggaccattgtcctgcctgcacgtagcaccacatcggttttactgggcgagagcacaacatccccgatctcatccggtagcatggagactaccgcattgcccggtagtactacgacacccggactgagcgagaaatcaactacattccacagttcccccaggtcccccgccacaacactatccccagcttctaccactagctccggcgtatcggaagagtccacaacgtcccactctaggcctggatccacacacacaacagccttccccgactcaaccacaacgccaggactttctaggcattccacgaccagtcacagcagtccaggttcaacagacactacccttctgcctgctagcacaaccacctccggcccaagccaggaatctacaacgtcgcacagctctcctggaagtacagacaccgcattatcacctggatccaccacagcactgtccttcgggcaggagtccacaacattccactcctcccccggctcaacccataccactctgttccctgattccaccacatcatccggaatcgtagaggcctcaacacgagtccatagctctaccggctctccccgcacgaccctttctcctgctagttccacgagcccaggattgcaaggtgagtctaccgcatttcagacccatcccgcttccacccacacaacaccatctcccccctctactgctactgccccagtagaggaaagcacaacataccacaggagcccgggaagtactcctactacacattttcctgcctcaagcaccacttccgggcactccgaaaagtctactatttttcacagcagccccgatgcgtccggcacgacaccgagctctgcgcacagtaccacgtctgggaggggtgagagcaccacctcacggatttccccgggaagcaccgagatcaccaccttgccaggcagcactacaacacccggactaagcgaagcgtccactactttttattcatcacctaggagtcctactaccaccctatcacccgcctcaatgacgtctctgggagtgggtgaggagagtactacaagtcgcagccagcccggttcaacgcactctacagtgtctccagccagcaccactactccgggtctgtccgaggagtctacaacagtgtatagtagttccccaggaagcaccgaaacaactgtcttcccccgaaccccgacaacttcagtgcggggggaagaacctacaacatttcactctagacctgccagcacccataccaccctgtttaccgaagactcaacaacttctgggctgaccgaggagagtaccgcttttccaggctcgcctgcatcgacacagactgggctccccgcaaccctcactactgccgatctgggagaggaaagcaccaccttcccgtcatcaagcgggtctactggcactaccctgagtccggcacggtctaccaccagcggactggttggcgaaagcactccttcacgcctttcaccatctagtactgagacaaccacattacctggatcccctactactccgagtctctccgaaaagtccactaccttttacacaagtccccgatccccggacgccaccctgtccccagctactacaacctccagcggcgtgtcagaggagtcatccacctctcactctcagccaggctcgactcatacaacagctttccccgatagcactacgacaccagggctgtccagacattcgacaaccagccactcatcacctggctccacagatactacactgctgcccgcctctacgactacatcaggtccaagtcaggagtccaccacctctcacagtagtccaggatctacagatacagcactgagtcctggctcaacgaccgctttgagttttggccaggagagcactacgtttcacagtagtcccggatccacgcatacaacactgttccctgactctacaacatcatccggcatcgtggaggcttccacaagagtgcactccagtaccggctcaccccgcactactctgtctcctgccagcagcaccagtcctgggcttcaaggggagagcacgacattccaaacacatccggcctccacacatacaacaccctcacccccttcaacagccactgctcccgtcgaggagagcacaacttaccaccggagtcctggatccacgcctaccacccattttcctgcatcttctaccacctctggacacagcgagaagtcaaccatcttccacagctcccccgatgcgtctggcaccacccctagctctgcccatagcacgacttcaggcaggggcgagtctaccacgagccgaataagtccaggaagcaccgagattacaactctgcccggcagcacaaccacccccggactgtcagaggcttcgacaaccttctactcttcaccccgcagtccgaccaccacccttagtccagccagcatgacatccttgggcgtaggggaagagagcaccacatctcggagccagcccggctctacccatagcactgttagtccggccagtacgacgactccaggattgtcagaggagtcaaccactgtctattcctcctctcctggaagcaccgaaaccactgtattccctcgtagtactacgacatccgtgagaggcgaggaacccactacattccactcacgacccgcaagtacccacacaacactctttacagaagattccactacctctggcttgaccgaggaaagtacagcttttcccgggagcccggcttccacacagactgggctgcctgccactctgactaccgccgacctcggtgaggagagcacgacattccccagcagctccgggtcaacagggactacgctatcgcccgcccgatccactacgagcggcttagtgggtgaatcaacaccgtcccggctgagtcccagttcgactgagactactaccctgcccggctcgccaactaccccaagcctgtctgagaagagcactactttttacacttctcctaggtcccccgacgccaccctctcacctgctaccaccacatcatccggtgtgtcagaagaatcttctacctcccatagtcagccaggctccacacacactaccgcattccctgactccaccaccacatctggacttagccaggaacccacggcttcacatagctcacagggaagcaccgaagctactctgtccccaggatctaccaccgcctcctccctgggtcaacagtcaactactttccactcaagtcctggagacacagagactacactccttccagacgataccatcacaagtggtttggtggaggcctccactcccacccacagttccactggttctctgcacacaacattgaccccggcaagttccacttctgcaggcttacaggaggaaagcactaccttccagagctggcctagctcgagtgacacaaccccatctccacccggcaccactgctgccccggtggaggtgagcaccacctatcactctcgacctagcagcactccaactacccatttcagtgccagttccacaaccttagggcgcagcgaagaaagcacaactgttcattcctcgccaggggccacaggcaccgcactcttccccacacggagtgcaacgagtgtactggtgggggagcctacgacctcccctatatcctcgggcagcacagaaactactgccctgcctggcagcactacaaccgccggtctgagtgagaagtccactactttctatagctcacctcggagccctgacactaccttgagccctgccagcaccactagctccggcgtatccgaggagtctaccacctcccatagtagacctggctctacacacactacggcgtttcccggaagcacgacaatgccgggggtcagccaagagtccaccgcatcccacagcagccccggatcaacagacacaaccctctcccctggatcaacaactgcctcttcattgggtcctgagagcaccacctttcattcgggccccgggagcaccgagactactctcctgccagataacaccaccgcctcaggtttgctcgaagcctccacccctgtgcattctagcacaggtagccctcacacaaccctgagccccgcaggatccaccacacgacagggggaatctaccacctttcagtcctggccgaattccaaagatactacgcctgcccccccgaccacaaccagtgcttttgtggaattatcaacaacctcacacgggtctccgagcagcacccctaccactcacttttctgcctccagcacaacgttgggaaggagtgaagaatccacaaccgtccattcttcgcctgtagccacagcaactactccctcccctgcccggtcaaccacctccggactagtggaagagtccacaacatatcactccagcccaggatcaactcagacaatgcactttcccgaaagtgacaccacttccggtcgcggagaggaaagtacgactagtcattcatccactacccatactatcagctccgctccctccacaacatctgcgcttgtagaggagccaacctcttaccattcctcccccgggagcaccgctacaacccactttcctgattcttctaccaccagcggaagaagcgaagagagcaccgcctcacattctagtcaggacgcaaccggaactatcgtgctcccggcgcgctcaaccactagtgtgctcctcggagagagcacgacctccccaatctcctcaggttctatggagaccactgccctgcctgggtctaccaccactcccggcctaagcgaaaaaagtactactttccacagtagtcccagatcaccagcgacaactttaagccctgcatcgaccacctcttcaggggtgtcagaggagtcaacaacctcccattctaggcctggatctacacacaccaccgccttccccgatagtaccacgaccccgggacttagcagacacagcactacgagtcactccagcccgggatctacagacaccacactgttgcctgccagtacaactaccagcggatccagccaggaatcaacgacatcccacagcagctctggctcaactgataccgccttgtcccctggcagcaccaccgctctgagtttcgggcaggaaagtacaaccttccactcgtccccagggtctactcatactaccttattccctgattccactacgtcatctgggattgttgaggccagtactcgggtgcattcttccactggttctcccagaacaacgctctccccggcaagttcaacttcaccgggactgcaaggagagtcaaccgctttccagacccacccagcctcgacccacaccactccatccccaccctcaaccgccaccgccccagtggaggagagtactacttatcacaggtcacccggaagcacccccaccacccacttcccggcttcctctactactagtggacattccgagaaaagcacaattttccactcatcccccgatgcgagtggtaccaccccctcatccgcccactccaccacgagcgggcggggcgagtcgactactagcagaatttcccctggatccacagagataacaaccttgcccggatctaccaccaccccagggctgagtgaggcctccacgacgttttacagttcgcctcgctcccccaccacgacgttatcaccagccagcatgacctcgcttggagtgggagaggagtctacaacttctcgctcccagcccggctcaacccatagtacagtgtctcctgcgagcaccacgacgcccggcttgtctgaagagtccactaccgtttacagcagttctccgggcagcaccgagacaaccgtgttcccacggagcactaccaccagcgtacgtagagaagaacctactacatttcactctcgtccagcctctactcataccactctgttcactgaagactcaaccacatcaggactaacagaggagagtactgcgttcccaggatctcctgcttcaacgcagacgggcttaccagccacattaacaaccgctgaccttggggaagaatccacgacgtttccttccagtagtggcagcacaggaaccaaactcagtcccgcgaggtctaccacatctggtttggtgggggaatccaccccttcacggctctcaccctcctctacagaaacaactacactgcccggtagcccgactactcctagcctgtccgagaagtccaccacgttttatacttctccgagatcccctgacgcaaccctcagccctgcaacaactacgtcctccggagtgagcgaggagagtagcacctctcacagtcaacctggctcaacccacactacagccttcccggattccaccaccacaagcgggctgagtcaggagcccacaactagtcattcctctcagggctctactgaggcaacactttcacctgggtctaccacagcctcttccctgggccagcagtctaccacattccacagcagtccaggtgacaccgagactaccttgctgcctgacgacaccattacgagcggtcttgtagaggcgtccaccccaacacattcgtcaactggtagcctgcacactacattgacccccgctagtagtacctcaacaggcctgcaggaagaaagcaccacgtttcagtcttggcctagctcttctgacactaccccaagcccaccttccacaaccgccgttcccgttgaggtgagcactacttatcatagccgcccctcaagcacaccaacaactcacttttccgcaagcagcaccacactggggaggtctgaggaatcgaccacagtgcattcttcacctggagccacggggaccgccctctttccaacgaggagtgctactagcgtgctggtgggcgagccaacaacatcgcctatatccagcggctccaccgaaaccaccgcgttgcccggttctactactacagcaggcctgagtgagaagtctaccaccttctattccagtccacgcagcccagacacaacactttcccccgcttcaacgacttctagcggtgtgagcgaggaatctacaacctctcactctcggcctggatccatgcatactacagctttcccgtctagcactactatgcccggcgtgagccaggaatccacggccagtcacagctctccaggcagcacagacaccacattgtcacccggctcaacaacagctagttcattgggcccagagtctaccaccttccattctagcccaggctccaccgagaccaccctcctgcccgataatacaaccgcgagcggcctgctcgaagcaagcacccccgtccactcctctaccggttccccccacaccacgctgtcgcctgccggtagtaccactcggcagggggagagcactacctttcagagctggcctaactccaaggatactactccagcaccccctaccaccacgtcagctttcgtggaactctcaactacctcccacggatccccctcaagcactcccactactcacttttccgctagtagcactacacttggccgctctgaggagagtactaccgtgcattccagcccagtcgccaccgccacaacaccttcacctgctaggagtacaaccagcggcctggtggaagaaagcacaacctatcattcaagtcccggcagtactcagaccatgcattttcccgagtcaaatacaacttctggacgaggcgaggagtccactacatcccacagcagtacaactcatactatcagctccgctccttctaccaccagcgcactggtggaggagccaacctcctatcattcatcgccaggcagcacagccacaactcatttccccgacagcagcaccacgtcaggcagatcagaagaaagtacggcttctcattcaagtcaagacgccacgggcaccattgtgctgcctgcgcgttcaactacatccgttctgctgggggagagcaccacaagccctattagctccgggtctatggaaaccacagctctccccggcagcactaccactcctggtctgtcagaaaagagtacgacattccatagcagcccatcctccaccccaacgactcatttttctgcctccagcacaacattaggacgatcggaagagtccacaacagtgcactctagccccgtggcgactgctaccaccccctctccagcccggagtacaacctctggccttgtcgaggagtccaccgcataccactcatcccctggctcaacccagaccatgcactttccagagagcagcacagccagcggaaggtccgaggaatcacgtactagccatagctccactacacataccatctcctcacctccttctaccacgagcgccttggtcgaagaacccacaagttatcattcgtctcccggatccatcgccactacgcactttcccgaatcatccacaacatctggaagatctgaagagagcacagcgtctcactcaagcccagacaccaatgggattacgccacttcccgcccactttactacatctgggcgcattgcggagtccaccacattttatatcagccctggcagcatggagacaacattggcatcgacggctacgacccctggattgtctgcgaagagcactatcctgtattctagtagtcgttccccagatcagactctctccccggcctctatgacctcatccagcatttccggagaaccgacttctctgtattcccaggcagagtccacgcatacaactgcatttcctgcatctactaccacaagcggcctgtcccaggaatccacaacatttcatagtaaacctggttccacggagaccaccctgagtcctggatctattaccacaagttctttcgcgcaagaatttactactccacactcacagcccggatcagcactgtcgaccgtcagtcccgcgtcgacaacagtgcctggtctgtccgaggagagcactacgttctacagtagccccggatcaacagagactaccgccttctcccacagtaatacaatgtctattcattctcaacagtctaccccgtttcccgactcccctggcttcacacacacagtgctaccggccactcttacaacaaccgatattggccaggagtccaccgccttccattcgtcctccgatgctacaggtacaactcccctgccggcccgttctacagcatctgacttagtgggggagcctacaaccttttatatcagtccgtcacccacgtacaccaccctcttccccgctagctcttccacttccggcctcaccgaggaatctactacatttcacactagtccctcattcacgtctacaatcgttagcaccgagagtttggagacactggcacccggactttgccaggaaggccagatctggaacggaaaacagtgtgtctgcccgcaggggtatgttgggtaccagtgtctgtctccgttggagagcttccctgtggaaaccccagagaagctgaacgctaccctgggcatgaccgtgaaggtgacctataggaactttacagagaagatgaatgacgcttcatcacaggagtaccaaaacttctctacactattcaaaaaccgaatggacgtggttctcaaaggcgataatctgccacagtaccggggcgtgaacataagacggctcttgaacgggagtatcgtcgtcaagaatgatgtgattctcgaggccgactataccctggagtacgaggaattgttcgagaatctagccgaaattgttaaagcgaagatcatgaatgagacgagaacgaccctgctagatcccgactcctgcaggaaagcaattctatgctacagcgaggaggatacctttgttgactcgtcagttacaccaggcttcgatttccaagaacagtgtacacagaaggccgcagagggatacactcagttttactacgtggacgttctggacggcaagctagcatgcgtgaacaaatgtaccaagggcacgaagtcacagatgaattgtaatctcggcacatgccagcttcaaagatctgggcccaggtgtctctgtcctaacactaacacgcattggtattggggggagacctgtgagtttaacatcgccaagtctctcgtctacggaattgttggggcagtgatggccgtgctactgctcgccctaattattctcattatcctattcagtctgtcccaacgcaagaggcaccgggagcaatatgacgtcccacaggagtggaggaaagagggcacaccgggcatctttcaaaagaccgcaatctgggaagatcagaatctgagagaaagccgctttggcctggagaatgcttacaataacttccgacctactctggagactgttgatagtggtactgagttgcatattcagagacccgagatggttgcttctactgtttag

SEQ ID NO: 62893 - DNA, 16437 bp, Artificial Sequence
  derived and/or modified sequence
atgttagtcatttggattttgacactggcattaagactctgtgctagcgtgacaactgttacaccagaaggatccgctgtccacaaggcgatttctcaacagggaacactgtggacaggggaggtgctcgaaaaacaaaccgtggagcaaggtaaaagcacactgaggagacagaagaaccactttcatcgatccgctggtgaactgcgctgcagaaatgcattgaaggacgaaggggcttcagcaggttggtctgttatgtttgcaggcgagtccgtggtggttctggtccatctatggatgacgggcgctagagtcaagaacctcggactcgtcgagttcgctagtccaggagatgatggagacggccgagccgaggggttttctctgggcctccccttgagcgagcaggcacgggcagccggtgccagagagaaggaaagacaagagaccgtgatcaatcatagtaccttcagtgggttctcccaaatcacaggttctaccgtgaacacatccatcgggggtaacacaacatctgccagcacaccttcctcctcagatcccttcactaccttctctgactatggggtgtcagtgactttcataaccgggagcaccgcaactaaacactttctcgattctagcaccaactccgggcattccgaagagtccacagtttcccactcaggacctggagctactgggactaccctgttcccgagccactccgccacctcagtttttgtcggagagccaaaaacatccccaatcacctccgcctcaatggagaccaccgcactccctggttcaacaactacagccggactgagcgaaaaaagcactactttttatagttctccccgttcccccgatcgcaccctgagccccgcacgaacgaccagttccggcgtctcagaaaagagtaccacctctcacagcaggcctggcccaacgcataccatcgcctttcccgattcaaccaccatgccaggcgtgtcacaggaaagtaccgccagccacagcataccaggttccacagataccacgttaagtccaggaacaaccactccctcctccctgggccctgaatcaacaactttccactcgtcccccggatacacgaagactacgcgactcccggataacacgaccacgagcggactgttggaagctagcacacctgtccatagtagcactggcagcccacacaccacactctctcctagctccagcactactcatgaaggcgagcccaccactttccaaagttggccgagctccaaggatacgtcacctgcaccatcagggactactagcgcattcgtgaaactgtcaaccacttaccactcgtctccgtcatcgactcctactacgcatttttcggcatcctccaccactttaggacactcagaggagtcaacccccgtgcattcttcacctgtcgccacagccaccacccctccccctgctcgaagtgcaacctctgggcacgtggaggagagcaccgcttaccacagatctccgggaagtacccagaccatgcatttccctgagtctagcaccacaagcggtcactccgaggaatccgctacctttcacggaagcacaacccataccaaatcctccacccccagcacaacagccgcactggcccacacaagctaccacagctcactgggcagcactgaaacaacccactttcgggattcctccactatttctggcagaagcgaggagagcaaagcatcacattcatctccagacgcgatggccaccacggtccttccagccggtagcactccttccgtactggtgggggatagcacaccatcacccatttcatctggctccatggaaaccacggcgttacctggatcaactaccaagcctggcctcagtgagaagagcaccacattttattcctctcccagatcacccgacaccacccatcttcctgcttctatgacttcctcaggggtctctgaggaaagcacaacctcccattccagaccaggtagcacccacaccacagctttccctggtagcacgaccatgcccggactgtcccaggagagcacagcaagccacagtagccctggtccaaccgacacaaccttatcccctgggtctaccactgcatcatcactcgggcctgaatacactactttccacagtcggcctggaagcacagaaacaaccctgttgccagataacaccactgcgagcggcctgctggaagcttctatgccggtacactccagtaccagaagccctcacaccactctgtcccccgctggctctaccactcgccaaggggagtctacaaccttccactcatggcctagctcaaaggacacgcgcccagcaccgcctactaccactagcgcctttgtggagccctctacaacctcgcatggctccccttctagtatccccactacacatatctcagccaggtcaacaacgagcgggctggttgaggaatccactacatatcattcttcccctgggtctacccagaccatgcacttccccgagtctgacactacctcaggacgcggagaggaatccaccacaagccacagttcaacgacgcatacaatatcatctgctccgtcgacaacctctgcccttgtcgaagagccaacatcataccacagctccccaggatcaaccgctaccacccatttcccagattcaagcactaccagcggaaggtctgaggaatctactgctagccatagcagccaggatgctaccggaaccattgtgttgcctgcacgaagcacgacatcagtcttgctaggagagagtaccacttccccaatctcctccggctcaatggaaaccaccgcccttccaggctccactaccacaccgggactgtccgagcgctccactaccttccactcttctccaaggagccctgccacgaccctgtcgcctgcctccaccacatctagcggggttagtgaggaaagcaccacatctcgctcccggcctggaagtacacatactactgcgtttccggatagcaccactacgccaggtctgtctcgacattccacgacttcacactccagccctgggtccacagatactactctgctcccggcttccaccacaaccagcggtccgagccaggagtcaactactagccatagttcctccggttccactgatacggcgctttcccccggtagcacgaccgccttgtcctttggacaagagagtactacatttcattctaatcctggtagcacccataccaccctcttccccgatagcaccactagttctgggattgtggaagcctcaaccagggtccatagtagcaccggatctcccagaaccactttaagtccagcgtcttcaacctcccctggtcttcagggcgaatccacggcattccagacccatcctgctagtacacatactactccaagcccccctagtaccgcaactgcgcctgtagaggaatccacaacctaccacagatcacccggatcaacacctacaacccactttccggctagctccacaacttctggtcactcggagaaatcaactatttttcattcctctcccgatgcctccggaaccactcccagcagtgcgcactccacaacctcaggaaggggcgaatccaccacctctcggatttctcccggaagcacggagatcacaaccctcccaggatctacaaccactcctggcttgtccgaggcatctacgacgttctactcttcaccacgcagtccaacgactactctcagtcccgcatctatgacctccctcggcgttggggaggaaagcaccacgtcccggagccaacccggttcaacccactccaccgtctccccggcttcaacgactactcccggactgtccgaggaaagcaccaccgtatactcatcaagcagaggcagcaccgagacgacagtcttcccacatagtacaacaaccagtgtgcacggggaggagcctacaacattccattctcgcccagcaagcacccatactacactgttcaccgaagacagtacaacatctggtctcaccgaagaatccacagccttccctggctcccctgctagtacacagaccgggttgcccgcaactctgacgactgctgatcttggagaggaaagcacaacttttcccagctcgtctggatccaccgggacaaagctcagccccgctcggtctaccacttctggcctggtgggcgagagcacacctagcaggctcagtccctccagcaccgagaccacaaccctgccaggtagcccaacaaccccctccctaagtgaaaaatcaactactttctacacttcacctcgctcacccgatgccacgctctcacccgctacaacaaccagttccggggtgtcagaagagtctagcaccagtcactctcagcctgggagtacacataccactgctttcccggattctaccactactagtgatctgagtcaggaacctaccacatcgcatagttcgcaaggcagcaccgaagcaacactatccccaggctccaccacagccagcagcttaggtcagcagagcaccacttttcacagctctccaggagataccgagactactctgctgcccgacgacacaatcacctcgggactcgttgaggccagtacaccgacacacagctctacaggctctctgcacaccacgctcacacctgcttccagcactagtgccggactgcaggaagaatcaacaactttccagagttggccaagctcttccgacacaactcccagtcctcccggaacaacagccgctcctgtggaggtttccactacctaccactcccgcccttcttccacccccacgacacacttttcagccagcagtaccactctgggcaggtccgaggagtctacaaccgtgcattcttcccccggagcaactggcacagccctgtttccgacccgctctgccactagcgttcttgtgggcgagcctactacaagtcccatatcttctggtagcacagagacaactgcactgcctggatcaactaccacagccggactttctgaaaaaagcaccaccttctactcatctcctcgatcccccgacactactctgagccccgctagtacgacaagcagcggggtgtctgaggagtcaacaacatctcattctaggccgggttctacccacaccacagccttccccggatctacaaccatgcccggtgtgtctcaggagtctacagcctcccacagtagccccggtagtaccgacacaactttatccccagggtcgaccacagcttccagtctcggtcctgagtccaccaccttccattcatctcctgggagtaccgagacaacgttactgccagacaatacaactgcgtctggactcttggaggcctctacacctgttcactcttcaaccggctcaccacacacaacgttgtctccagccggttccacgacccgccaaggcgagtcgacgacctttcaatcttggccgagctctaaggataccatgccagctccgcctacaaccaccagcgcatttgtagaactctctacaacaagtcatggatcccctagctccacgcctaccactcacttttccgcttcatctacaaccctgggcagatctgaggaatctactaccgtccactcatctccggtcgccacagccaccacacccagccccgctagaagtaccacatcaggactcgttgaggaatccacggcctatcactcaagtcccggatcaacgcagactatgcacttccccgagagcagcacggctagcggcagatcagaggagtccagaacctcccactcctcaacgacacacaccatttccagcccaccatcaactaccagcgccctcgtggaggaaccaaccagttaccattcctcgccgggaagcacagccaccacccacttccctgactccagcacgacctccggacgaagtgaggagagcacggcttctcactcaagccaggacgctacgggcaccatcgtgctgcccgctcggagcaccactagcgttttgctgggggagagcactaccagccccatctcgagtggaagtatggaaacaacagcgcttcccggatctaccacgacccctggcttatcagagaagtccactacctttcactcaagccctagatctccagctaccacattgagccccgcaagcaccacttcctccggcgtgtcagaagagtcaacaacgtcacattctcgcccaggctcaactcacactaccgcatttcccgattcaacgactacaccaggactgtctcgacatagtaccacatcacactcttcacctggaagcaccgacaccaccttgctcccggcatctaccacgactagtggccctagtcaagaaagcaccacttcccactcatcacccggttctactgatactgccctgtctcctggcagtacaactgcgttgtcgtttggacaagagtccaccacgtttcattctagccctggatctactcacactacactgtttccagactctaccacatcctcgggcatcgttgaggcctcaacgagagtccatagcagtaccggttctcctcggaccacgctgtccccggctagtagcacttctcctggattgcagggggaaagcaccgccttccagactcaccctgcatccacccacacgactccaagcccgcctagcactgctactgctccagtggaagaaagcacaacgtaccatagaagcccaggtagtactcccactacccattttcccgctagttcaacgacctcaggtcacagcgagaagtccactatcttccattcatctcccgatgcgtccgggacaacccccagctctgcacacagcacaacctcaggaagaggcgagagcactacatctagaatcagccctggaagcacggagatcactaccctgccaggatctacaaccacacccggactgagtgaagccagcaccacattctattcctcgcctcggagcccgaccaccactctgtctccggcatctatgacgtcgctgggagtgggagaggaatcaacgacttcaaggtctcaaccagggtccacacattcgacagtatccccagctagcactacaaccccgggactatccgaggaaagtaccacggtctattcaagcagtcctgggtcaacagagacgacggtttttcccaggacccccaccaccagcgtgcgtggtgaggagcctaccaccttccacagtcggccagccagtacccacacgacactctttacagaggattccactacctcagggctgacagaggagagtacagcgttccccggatcgcccgcatccacccagacagggcttccagctaccctcacaacggccgacctgggcgaagaaagtaccaccttcccatcctcgtccggcagcaccggcacaacactcagcccagcccgtagcacaacctctgggctggtaggcgaatccacccctagtagattatctcccagtagtacggagacaacgaccctccccggatcacctaccacccccagcctgtcagaaaagtccacaacattctacaccagcccacggtcgcccgacgccactttgagccccgctactaccacgtcgagtggcgtttcagaagaatcttctacatcccattcccagcccggatcaacccataccaccgcatttcctgattcaaccacgacccccggtctgagtaggcactcgaccacctcacatagttctccaggttcgacagataccacactgcttccggctagcacgactacgtcaggaccatcacaggagtccacgacttcccattcctcccccggaagcactgacaccgcgctgagtccaggttctaccaccgctctgtccttcgggcaggagtctactaccttccacagttcaccgggatcaactcatacaactttatttcctgacagtacaactagctctggtatcgtagaagcctctacgcgcgtgcatagctccacagggagtcctcgtactacactgagcccagctagttccactagccctggattacagggcgagagtacgacttttcaaacccatccggcaagcacacacacaacaccgtctccacctagtaccgcaacagcacccgtggaagagtcaacgacctatcaccgaagccctggcagcactccaaccacacatttccctgcgtcatccactacaagcggacattccgagaaaagtactatttttcattccagccctgatgccagtggaaccactccatccagcgcccacagcaccacaagcggcaggggtgaaagcacaacatcccgcatttcacctgggtctacagagataaccacattaccaggtagtacaaccacgcccggactcagtgaggcttccacgacattctatagttctccacgaagccctacaaccactctatcccccgctagcatgacgtccctgggcgtcggagaagagtccaccacatccaggagtcaacccggaagcacccactctaccgtctctccggcttcaaccaccacacccggtctcagcgaggagagtaccacagtctatagtagctcacctggctctacagagactactgtgtttcctagatcgactactacttctgtgcggggtgaggagcctacaacgtttcactctaggccggcaagcactcacactacactgtttactgaggactccactaccagcggactcacagaagaatccaccgctttccctgggagcccagcttcgacccagactggtctacctgcgaccctgacaacggctgaccttggcgaggagtccacaacattcccctcgtcctctggatctacaggcaccactctgagtcccgcacggagcactacttctggcctcgtgggagagtcaacaccctctcggctgagcccgtcgagtaccgagactactacacttcccggtagccctactacaccaagtttaagcgagaagtccacgaccttctacacaagccccagaagtccggacgctacattgtcccctgctactaccacaagttctggagtgagcgaagagtcctcgacaagccattctcagccagggagcacgcatacgacagcctttccggatagtacaacaactagcgggctatcccaggagccgactgccagccacagctcacaagggagcacagaagcaaccctatctccagggtcaacaaccgctagctcattgggacagcaatctactaccttccacagctcacccggtgataccgaaacaaccttattgccagacgacacaatcacgtctggccttgtcgaggcatcaactccaacacacagttctaccggaagccttcacacaactctgactcctgcctccagcacctcggctgggcttcaggaggagagtacaacattccaatcctggccttcctcttccgacacgacaccttctccaccaggaacaacagccgcacctgtggaggtgtccaccacctaccattctagaccaagttcaactcccacaacgcatttcagcgctagttcaaccacgctcgggagatccgaggagagtactaccgtgcatagcagtcccggtgcaaccggcacagcactcttccctactcggtccgccacatctgtcctcgtgggcgagccaaccaccagcccgatctccagtgggagtacagaaaccacagcactgccgggttccaccacaaccgctggactatccgagaagtccactacgttctattccagtcctaggagcccagacacgacgctgtctcccgcttcaacaacatcctcaggagtgagtgaggagagcactacatcccattccagacccggttcaacccacactacagcgtttcccggatcaacaaccatgcccggagtctctcaggagtccactgcaagtcattcatcccccggatcaactgacacgactctgtccccaggaagtaccaccgcctcttctctggggccagagtccactaccttccacagtggtcccggatccaccgagaccaccctcttaccagataacaccacagcttccggtcttctcgaggcctccactcccgtacacagctctacaggcagcccgcacacaacccttagccctgcagggagcacaacccggcagggagagtcaactacgtttcaatcgtggcccaactcaaaagatacaacaccggctccccctactaccacatccgcctttgtggagctgtcaaccacttctcacggaagtccgtcatctacaccgactactcacttctcagctagcagtaccactctgggacgcagtgaggaatccacaacggtgcactcaagtcccgtcgccaccgcaaccacgccatccccggctcgctcaacaacatctgggcttgttgaggagtccactacataccatagcagccccggatctacacagactatgcactttcccgagtcagacacaacatccggtagaggggaggagtctactactagccactctagcacaactcacacaatttcgagtgcgccaagtactacgagtgctctcgtggaagaaccaacctcctaccattctagccctggatctaccgccactacccattttcctgattccagcaccacttcgggtcggagcgaagaatccaccgcgtctcattcatcgcaggacgccaccggaaccatcgttttgccggcacgatcaacaacgtccgtgttgctgggcgagtctaccacctctccgatctcttcaggctctatggaaactacagcactgccaggctctacaaccaccccgggactgagtgaaaagtccaccactttccacagttcccccaggtcccccgctaccacactctcccctgccagtaccacttcctcaggggtctccgaagaatccactactagccacagtcgtcccggaagcactcacacaacagcctttcccgattctacgacgacacccggtctctccaggcatagtaccaccagtcatagtagccctggaagcacagatactacattgctgcctgcatcgactaccacctctggctcatctcaggagagcacaactagccactcctcatcaggcagcaccgatacagcactgagcccaggttcgaccacagccctaagtttcggccaagagtcaaccactttccatagctcacctggctcaacacatactaccttatttcccgactccactacttccagcgggattgttgaggcttccactcgggtgcacagctccaccggatcaccacgcaccactttgtcgcctgcttccagcacatcacccggactgcagggagaatccacggccttccagacgcacccagcctcgacccataccaccccttcacctccctccacggccaccgccccagttgaggaatctacgacatatcaccggtctcccggttcgacacccaccacccatttcccagccagcagcaccacctcgggacactccgaaaaatctacaatcttccacagctctccagacgcctcaggcaccacgccatcatccgcacattctaccacgagtggacgaggagaaagtaccacatcccggattagcccgggaagtactgaaatcactacactgcctggctccactactaccccaggacttagtgaggcttcaactaccttttatagttcgccaagaagtcccaccaccactctgagcccagcttccatgacaagccttggtgtgggagaggagagtactacaagccgctcgcagccgggaagtacccatagcacggtatcccctgcatctacaactacgcctggacttagcgaagaaagcaccactgtgtactcttcatctccgggaagcactgagaccactgtcttccccaggagcacaaccacttccgtgcggagggaggagcccaccacgttccattcacgccctgcttccacgcatacaacactctttaccgaagacagcaccacatccggtcttacagaggagagtaccgcttttcctgggtctccagcttccacccaaactggcctgccagctacattaacaaccgccgacttgggcgaagagagcaccaccttcccctcttcttcaggatctacagggaccaagctgtcacctgctcgcagcacaacaagcggactcgtcggtgaaagtacaccaagtcgcctgtcccccagctctaccgaaaccacaacactcccaggatctcctactactccttcccttagcgagaagagcacaactttctacacgagtccgaggagccccgacgcgacactcagccccgctacaaccacatcttccggagtgagtgaggaaagcagcacctctcacagtcagccaggatccacccacacgactgcattcccggacagcacaactacgtctgggctttcccaggaacccactacatcccactcatctcaggggagtaccgaggccaccctgagtcctgggtccaccacagcgtcctctttggggcaacagtcaacaacattccatagcagtcccggtgataccgagacaaccctattaccggacgacaccattacaagcgggctggtggaggcttcgacccccacgcatagctcgactggatcgctccatacaacactaacacccgcatccagcacgagcacaggcttgcaggaagaaagcactacctttcagtcctggcctagctccagcgatacaactccctcccccccatctacaactgcagttccagttgaagtgtccaccacgtatcatagcaggccgtccagcactcctaccacccatttttctgcgtcatcaacgacgctgggtcgctccgaagagagcaccactgtgcattccagccctggagctaccggcaccgctctgttccccacaagatccgccacgagtgtactggttggggaacctacaacaagcccaatctcttccggctctaccgagactacagccctgcctggatcaacgaccaccgcaggactgtctgaaaaaagcaccacgttttacagctcccctagaagtccggacacgacactgagccctgctagcactactagctcgggcgtcagtgaagagtctactactagccacagccgtcccggttccatgcatactactgccttcccttcatctacaaccatgcctggcgtgagtcaagagtcaactgcctctcatagtagccccggttcaaccgatacaaccctgtctcctggcagcaccactgcttccagccttggaccagagtcgactactttccattcctcaccaggtagcactgaaactaccttgcttccagataataccacggctagcggactgttagaagcgtcgacacctgtgcacagcagtaccgggtcaccgcataccaccctgtcgcccgcaggctcaaccaccaggcagggagaaagtacaacctttcaatcttggcccaacagcaaagatacgacgccagctcctcccacaactacaagcgcttttgtggaactctccactacatcccacgggtctccatcaagtactccaacaacccatttttcagcgtcctctacaacacttggtcggtccgaggaatccactactgtgcattcctcacccgtggccaccgctactaccccttccccagctcggagtacaacctccgggcttgttgaggagtccactacctaccatagttccccaggcagtacacaaacaatgcattttccagaatcaaataccacatctggcagaggtgaggagagcaccacctcgcactcttctacaacacataccatcagctcagcaccctctaccaccagcgccctggtggaggagccaacaagttatcacagctcacccggatccacagcgactacgcacttcccagattcaagtacaaccagcgggcgaagtgaggaaagcaccgccagtcactcaagccaggacgctactggaacaatcgttttgccagctcggtctacgacctccgttctgctcggagagtcgacaacatctccgatctctagtggaagcatggagacaactgcgctgcctggctcgacaactacacctggactgtcagaaaagtccaccacctttcattcttcacccagttcaacacccaccacccacttcagtgctagtagcaccaccctggggaggagcgaggagtctaccacggtccattcaagtcctgtggctaccgctacgaccccatcccccgcacgcagcacaacttcagggctcgtcgaagagtcaacagcttatcactcaagccccggatcaactcaaaccatgcattttcccgagtccagcaccgcctctggcaggtcggaggagagtcgaaccagccattcttcaacaacccacactatatcctccccgccaagtacgactagtgcactggtagaggagcctacgtcctaccacagttccccgggttcgatcgccacgacccactttccagagagctctacgacttcgggcagatctgaagagagcactgcttctcacagctctcctgacactaacgggatcactcctctgcccgcacacttcactaccagcgggaggattgccgagtccaccacattctacatttctccaggtagtatggagaccacacttgcctcaaccgcaacaactcccggactatctgccaaaagcaccatcttatattcctcctcacgctctccggaccaaacactgtctcccgctagcatgaccagtagcagtatatcgggagagcctacctccctgtactcccaggccgaaagcactcatacaacagcttttccagcctctaccaccacgagtggcctgtcccaggagagtacaacattccactctaagccaggctccaccgagacaaccttgtctcctggctccattactacttctagtttcgcccaggaattcaccacaccccattctcagcctgggagcgcattatctaccgtgtcacctgcatccaccacggttccagggctctctgaggaatccaccacattctattctagccctggctctaccgaaacgactgcattcagtcacagcaacacgatgtccatccatagccagcagtccacccctttccctgattccccaggctttactcatacagtgctgcctgccactcttactaccactgacattggacaggaatcgaccgccttccactcaagctcggatgcaaccggcacaactccactcccagcgcgatctaccgcatccgacctggtgggagagccaacaactttttacatttctccatcacccacttatacgaccctgttccctgcatcttctagtacctcagggctgacagaggaatcgaccacctttcatacttcaccttccttcacttctactattgtcagcaccgagtcacttgagacgctggctcctgggctgtgtcaggaggggcagatttggaacggcaagcagtgtgtgtgcccccagggttacgtggggtaccagtgcttgtcccccctagagagctttcctgtggagaccccggagaagctcaatgctacccttggcatgaccgttaaggtgacctaccgcaatttcacggagaagatgaatgacgcctcctcccaggagtatcagaattttagcacgttgttcaagaatcgtatggacgttgtacttaagggtgacaacttacctcaataccgaggagtgaatatccgccgactccttaacggcagtatcgtggtgaagaatgacgtgatcctagaggccgactacactttggaatatgaggagctcttcgagaacctcgcagagatagttaaggcaaagataatgaatgagacgagaactaccctgctagatccagactcctgtcggaaagcgatcttatgctactccgaggaagatacattcgtggatagctccgtaacccccggattcgactttcaggagcagtgtacccagaaagcggctgagggctacacccagttttactacgtggacgtgctggatggaaaattggcgtgcgtcaataaatgcacgaaggggaccaagtcccagatgaattgtaacctgggaacgtgccagttacagaggagtgggcctaggtgcttgtgccctaatactaacacacactggtactggggcgaaacctgcgagtttaacattgccaagtcattggtttatggcatcgtcggcgcagtgatggcagttctactcctggcacttattatcttgatcatcctattttccctgtcccagcggaaaaggcaccgcgagcagtatgacgtgccacaagagtggaggaaagaggggacaccagggattttccagaagaccgccatttgggaggaccagaatttgagagagagtaggttcggactggaaaacgcgtataacaattttagaccgacgctggagacagtggactctgggacggagcttcatattcagcgccctgagatggtggcttccacagtttaa

SEQ ID NO: 62894 - DNA, 16008 bp, Artificial Sequence
  derived and/or modified sequence
atgctggtcatctggatccttacactcgcactgcggctttgcgctagcgtcaccacggtcactcctggctcaaccgtgaatacatccatcgggggtaacacaacctcggcgagcacgccctctagttccgatccttttactacttttagtgattatggagtctctgtcaccttcattaccggttctactgccaccaaacatttcctagatagctcgaccaacagtggtcactctgaggaatctacagtgagtcattcgggcccaggcgcaaccggcactaccctcttcccaagtcattcggctacaagtgtgtttgtgggagaacccaaaaccagtccaattacaagtgcttcaatggaaaccaccgcactgcctggttcgaccacaaccgccggtctcagcgagaagagtacgacattttactccagtccgagatccccggacagaaccttgagtcccgctaggaccacatcatctggcgtgtctgaaaagagcactacctctcactcacgtcccggacctacacataccattgcttttcccgatagcaccaccatgccaggagtgtcgcaagaaagtactgcgagtcattctattcctgggtccactgacactactttgtctcccggaacaaccacaccttctagcttgggtcctgaatcgactacgtttcactcatcccctggctatactaagactacaagattacccgataatacaaccacttcagggctattggaagccagtacacccgtgcacagtagtaccggctcaccacacaccacactttcaccttcaagtagcactactcacgagggagagcctaccactttccagtcttggccgagttccaaagatacctctccagcgccatccggcacgacgtcagcctttgtgaaactcagtaccacatatcacagttcaccctctagtacgccaacgacacacttctccgcgagctctacaacgttgggacatagcgaagagagcaccccagtgcactcaagtccagttgctaccgctacaacacctcccccagctcggtccgccactagtggccatgtcgaggagtccaccgcttatcataggagtccgggatcgacgcagacaatgcattttccagagtcatccacgacctccggccactcagaagagagtgccacctttcacggaagcacaacccacacgaaatcttcgacccctagcactaccgcggctctggcacatacatcttatcactcttccctaggctctactgagactacccacttccgggattctagcaccatatccggtcgctcggaagaaagcaaggcttcacatagctcacccgatgctatggcaacaaccgtcctcccagccggttctacaccatctgtcctggtgggcgattccaccccgagccctataagttccggcagcatggaaactaccgccttaccaggttccaccacaaaaccaggtctgtccgaaaaatcaacaactttttattcgtccccacgcagccccgacactacacacctgccagcttctatgacttcatccggggtctcagaggaatccacaacgtctcactccaggccgggatccactcatacaacggcttttccaggttctaccacaatgccaggcctatctcaggagtctacagcatctcatagtagtccgggaccaacggacaccactttgtcacccggaagtaccacagcgagttctttgggcccagagtatactacttttcactcccgccctggctcaacggaaaccaccctgctgcctgataacaccactgcttcaggcctgctggaagctagcatgccagttcattcttccacccgtagtccccatacaacacttagtccggctgggtctaccacacggcagggcgagagtaccaccttccactcatggccttctagcaaagacaccaggccggctcctcctaccactacgagcgcgtttgtggagccctccactacttctcacggatctccatcttcaatacctacaacgcatatctctgccagatccacaacttccgggctggttgaagaatcgaccacctatcactcctctcccggaagcacccaaacgatgcattttcccgaatcagatacaacctctggcagaggcgaagagtctacaacttctcactccagcaccacacataccattagtagcgccccatctaccacgtcagccttagtagaagagccgacatcctaccattccagtccgggaagcacagccactacacactttcctgatagctccaccactagcggacggtctgaagaaagtaccgcctctcactcttcccaggacgccaccggtacaatcgtgctgccggctcgaagtacgacaagtgtcctgctgggtgagtctacgacgtcccctatttccagcgggtccatggagacgacggccctgccaggtagcaccacaacaccgggactgtccgagcgctccaccacttttcatagctcacctcggagccctgcaaccactctgagcccagcgagcactactagctcaggcgtgagtgaagagtccaccacaagtaggagcaggccagggtctacacacaccactgcgttcccagactctaccactactcccggtctgagccggcatagtactaccagtcactcatctcctggctcgacagacacaacacttctcccagccagcactacaaccagcgggccttctcaggaatcaactaccagccattcctcctccgggtccacagacaccgctctgtctcctggtagtactacagcactctcttttggccaggagtctacaacattccacagcaatcccggaagtacccacacgactctgttcccggacagtacaacgtcgagcgggatcgtggaggcctccaccagggtacactcatccacaggcagccccagaaccacactgagtcctgcctctagtacaagtcccggactgcaaggcgaatccactgcctttcaaacgcacccagcctccacccatactacgcctagccctccttccactgccaccgctccggttgaagaatcaaccacataccacagaagccccggtagcacacccactacccactttcccgcaagttcaaccacttccggtcactcagaaaaatccacaattttccatagctctcccgacgctagcggaactacaccatcttcagcccacagtaccacttctggtcgcggtgagtccacaacctccagaatctctcctggaagcactgaaattactactttacctgggtccactacaacccccggactctcagaagccagtaccacgttctactcaagcccaaggagtcctaccaccaccttgagcccagcatctatgacttccctgggcgtgggcgaagagtctaccaccagccggtcccaacccggtagcacccactcaaccgtgagtcctgcctcaactaccacacctggcctcagcgaggaatccacaactgtgtacagctccagccgagggagcaccgagacaaccgtgttccctcattccacgactaccagtgtgcatggcgaggagcccaccacttttcactcaaggcccgcttctacccatacaactctctttaccgaggactctactaccagcgggctgaccgaagagtctacagccttccctggaagtcctgcttctacacagacaggactgccagcaaccctgacaaccgccgacctgggagaagaaagtaccacttttccctcgtcaagtgggtctaccggcacgaagttgtctcccgctcggtctaccacatccgggctggtaggcgagagtactccttcaagactttcaccatctagtaccgagacaaccacgttacccggttcacccaccactccatccctgtccgagaaaagcactaccttctacacctcacccagaagccccgatgcgacactttcccctgccaccaccacaagtagcggcgtctcagaggaaagctctacgagccattctcagcccggatctacgcatactactgcatttcccgatagtacaaccacctctgacttatctcaagaaccaacaacctcccactcaagtcagggctcgacggaggcaaccctatctcccggttcaacaacagccagcagcctagggcagcagagcaccacctttcactcctctccaggagatactgaaaccacactcctgccggatgacactattaccagcggacttgtggaggcttctacccctacccactcaagcaccggctcccttcacactacgttgacccccgcaagtagcacatccgctggacttcaggaagagtcgacaactttccagagttggcccagctctagcgatacaactccatctccccctgggaccacagctgctccggtcgaggtgagcaccacttaccactcgcgcccttccagtacacccaccacacatttctccgcgtcatcaactacgttgggcagatcagaggaaagcaccacagtccacagtagtcccggtgctaccggcaccgccctgttcccgacgagaagtgccacatccgtcctcgttggcgaaccaaccaccagccccattagctctgggtccactgagactacagccctccccggtagtacaacgaccgcagggcttagcgagaagagtactacattctactcgtcacctcgcagcccagacaccacactgtcacccgcatcaacgacaagtagcggagtaagtgaggaatctacaacctctcactcccgacccggttcaacccatacaacagccttccccggttcaacaaccatgcctggagtgagccaggaatcgaccgccagtcattcttctccgggttcgactgacacaacactcagccccggatctaccaccgcgtcatcccttgggcctgaaagtacaacgttccattccagtcctggatccacggagaccactctgctgcccgataatacgactgcctccggactgcttgaggcctctacccccgtccattcatcgaccggcagccctcacaccacactttccccggctggctctacaactagacaaggcgaaagcaccaccttccagtcttggcctagctccaaagataccatgccggcacctccgacgacaacatcagccttcgttgagttatcgactacatcccacgggagcccatcgagtacacccacaacacacttctctgcttcgtccaccacgctggggagatccgaagagagcacaaccgtgcactccagtcctgtggccaccgctaccacgccttcccctgcacgcagcactactagcggccttgttgaagaaagcactgcttaccactcctcacccggatctactcagacaatgcacttccccgaaagctctacggcctctgggaggtccgaagagtcccgtacttcacactccagcacaactcacactatttcttctcccccttccacaacttctgccttagttgaggagcccacttcctatcacagttcaccaggatctacggcaacaacacattttccggacagcagcacaacatccggcaggagcgaagagagcactgcctcccactcatcgcaagatgccaccggtactatagtgctgcctgcccgtagcacgacctctgtcctgttgggcgagtctacaacaagtcctatcagttccggttctatggagactactgccctaccaggctccactacaacccctggtctgagcgagaaatccaccactttccatagctctcctcgatcacctgctaccacactgagtcccgctagtaccacatcctctggagtcagtgaagagtcaaccacaagtcactcgcgtccagggtccacccacactacagcctttcctgatagcacgacaacccctgggctgagtcgccatagtacaacttcccacagtagccctgggagcactgacacaacattgctgcccgcttctaccaccacctctggtccgtctcaagaatccacaacatcacattccagccctgggagcacggatactgctttgtccccagggagcaccaccgccctgtcttttggacaagaaagtaccaccttccactcctcacccggttctacacataccacactgtttcctgacagcaccacgtctagcggcatcgtagaggcaagtactagggtacattccagtaccggcagcccgcgtaccactctgtccccagcatcttcaaccagtcccggactgcaaggagaatcgacagcttttcagactcaccccgcttccacccatacaaccccttcgcccccaagcacagcaaccgctcctgttgaagaaagtacgacataccatcgctccccaggatctacacctaccacgcatttccctgcctcttcgacgactagcggccacagtgagaagtccacaatattccacagctctcccgacgcatctgggaccacacctagctcagctcatagtaccacttcaggtagaggcgaatcaaccacctcccgaatttccccgggaagtacagaaattaccactcttcctgggagtacaactaccccaggcctctctgaggccagcaccaccttttacagtagccctcggtccccgacaactactctgtcaccagcttcaatgaccagcctcggagtgggcgaggagagcacaactagccgttcgcaaccgggtagcacccactcgacagtatcccccgcttcaaccacaacccccggactgagcgaggaatctaccaccgtctactccagctcacctgggtccacggagacaaccgtatttcctaggacgcctacgacttctgtgcgaggcgaggagcctactacttttcactcgcggccagcatccactcacacgaccttatttaccgaagactctaccactagcggtctcacggaggaaagcaccgcttttcccggtagcccagctagcacacaaactggcctgcctgcgacacttaccacagctgacctgggagaggagagcactaccttcccctccagctccggatctactggaacaacactcagccctgcgaggagtacaacctcaggacttgtaggtgagagtactccctctcggctgagcccctcaagcacggagacaaccactctccccggttcccccactacccctagtctttcagagaaatcaaccacattttacacgtcccccagatctccagatgctacactgagccccgctactacaacgtcctctggggtgtctgaagaaagttccacaagccatagccagccagggagcacccatactacagcctttccggactccaccacgacacccggactttcccgccatagtaccacctcccacagcagtccaggctccaccgacacaactctgctacccgcttccactacgacctccggaccttcgcaggagagcactaccagtcacagttcccctggttctactgacactgctctttctcccggttccactaccgccctcagcttcgggcaggagagtactacctttcacagcagtcccggatctacacacaccactctcttcccggactctaccactagttccggaatcgtggaggcaagtacccgcgtgcactcgtctaccggatcccctcggactaccctgtccccagcgtcttccactagcccagggctgcagggagagagcacaacattccaaacgcatcctgcaagtacccatactaccccctccccccctagcaccgccacagcgccagtggaggaatctacaacataccacaggtcacccggatctacccccactacccacttcccagcttctagtacaactagcggccattcagaaaaatctaccatcttccattcttctccggatgcctctgggacaaccccttcaagcgcacatagtactacaagcggaagaggcgaaagcaccaccagccggatctcaccgggaagcacagaaatcacaactctacccggatccaccaccaccccagggttatcggaagcaagtaccactttctactcctcccctcggagccccaccactactctctcccctgcctctatgacctccctcggggttggcgaggagtctactacgagccggtctcagcccggtagtactcattctaccgtgagtcccgcttccacaacgacgcccggactgtcagaagagtctactaccgtatatagttctagcccaggttctaccgaaacaacagtctttcccaggtccacgacaacctcagtgcggggagaggagcccaccacctttcatagtaggcccgcatccactcacactactttgttcaccgaagacagcaccactagcggcctgaccgaagaatcaaccgcgttcccagggagcccagccagcacacagacggggctgcccgctactctgaccaccgcagatctaggcgaggagtccacaaccttcccttcctcatctgggtccactggcaccacactctcccccgcaagatccaccacgagcggactggtgggtgagagtacaccgagtaggctgtctccaagtagcaccgagacaaccaccctgccaggcagcccaaccacgcccagtctttcagagaagagtacaactttttacacgtctccaagatccccagacgcaaccctcagtcctgctacaacaacaagcagcggggtaagtgaagaaagcagcacttcccactcacaacccggtagtactcacacaacagcctttcctgattccacaactacgtccgggttaagtcaggaacccaccgcatcacactcatctcaaggctcaacggaggccactttgtcccctggatccacgacggcctcctctctcggccaacagagcaccacttttcactccagtccaggggataccgaaacgacccttctgccagacgataccataaccagtggtctcgttgaagcctctacccccacccacagttccacaggatccctccacacgaccctcactccagccagttctaccagcgctggtctgcaagaggaaagcactacattccagtcgtggcctagttcctcagatacaaccccttcccccccaggcaccaccgcagcccctgtggaagtttctaccacgtaccactccaggccctcatccaccccaacgactcacttttctgctagcagcaccacactggggcgtagcgaggaatctactaccgtccattcatctcctggcgctacgggaacagctctcttcccgacacgcagcgcaacttccgtgctcgtgggtgagccgactacttcccctatcagttctgggtcaactgagacgacggcattgcccggttctacaaccaccgcaggcctttcagaaaaaagtactacgttctactcatccccgaggagtcctgacactactctgtcgccggcttctacgaccagcagcggcgtctctgaggagtccacaacttctcacagccggcctgggtccactcacacaacagctttcccaggcagcactaccatgcctggtgtctctcaagaatccacagcatctcacagttctcctgggagcactgacaccacgttgtctcccggaagtacaactgctagttcgttagggcctgagtcgaccacatttcactcaggacccggttccaccgaaaccaccctgctaccagataacactacggcctccggcctgctggaggcttccaccccagtacattccagtacgggaagcccacacacgaccctgagtccggcaggctctacaacaaggcaaggcgaaagtaccactttccagtcctggcctaattcgaaggataccacacccgcaccccctacaactacctccgcttttgtggaacttagtacaaccagccacggctcgcccagtagtacccctacgactcacttttcagcttccagcaccacactggggagaagcgaggagagcacaactgtccactccagccccgtagccaccgccacaacgccatcaccagctagatcaaccactagcgggctggtggaagagtctactacctatcactcctctccagggtctacgcagaccatgcattttccagagagcgataccacatctgggagaggggaggaatccacaacaagccacagcagtactactcacaccattagcagcgccccaagtactactagtgcgctggtggaagagcccacctcttaccattccagtcccggaagtactgctacaacgcacttccccgacagctcaaccacgagtggtcgctcggaggagagcaccgcctcccattctagccaggatgcaaccggaaccatcgtactgcccgctcggtccacgaccagcgttctgctaggagagagcacgacgtcaccaatctcttcaggatccatggagaccaccgctttacccggatccactactacccctggcctttctgaaaagagtaccaccttccactcgtcacctcgtagtcccgcaaccacactatcccctgcaagcacgacgtcatcaggcgtgagtgaggagtcgacaacttcccattcaaggccgggatccactcatactacagcattcccagattcaacaaccacccccggtctgtctcggcactcaacaacgtcccattcgtctcccggatctaccgacactactctgctccctgcaagcactaccacttcaggtagctcccaggaaagcaccacgagccattcctcgagcggatccacggacacggcattgtcccccggtagcaccactgcgctcagtttcgggcaggaaagcacaactttccacagctccccaggctccacgcatactacactatttccggattctactacatcttctggcatcgtggaggccagtacacgagtgcactcctccaccgggagcccaagaacgactctctcgccagcttccagcactagccccggtttgcagggcgaatctacagcctttcagacccatcctgcgtccacccatactacgccatctcctccaagtacagcaactgctccagtggaggaaagcactacctatcacaggtcccccggatccacgccaacgactcacttccccgcatcttctacgactagtggtcattccgaaaaatctacgatctttcacagttctcctgatgcttctggcaccacaccaagcagcgcccacagcactacttccgggagaggcgagagtaccacttcacgcatttctcctggaagcaccgagatcaccacgcttcccggttctacaaccacacctggactctctgaggcttccacgactttttactctagcccccgatcgccgacaaccaccctgtcgcccgcttccatgactagccttggtgtcggagaggaaagcaccactagtcgatcccaacctggctcaacacactctaccgtcagtccggcatctaccacaacgccaggtctgtcggaagaaagcacaaccgtctactccagctctcccggaagcaccgaaaccacagtgtttccacgcagcactaccacctctgttcgccgagaagagccaaccacatttcacagcaggcccgcttccacccataccaccctgttcaccgaggactcgacgacctccggactgacggaagaaagcacggcttttccaggcagccccgcaagtacacaaactggcctgcctgctacactgacaacagcggaccttggagaagagtccactacttttccctcctcgtcagggtctaccggaaccaagcttagcccagcaagatccaccacttctggactcgttggtgagtcaacaccttctcgcctctccccaagctctacagagaccaccacgctgccagggtctcctacgacaccctcgctctccgagaaaagtaccacattttacacttctccacgctctccagatgcaaccttaagccctgccactactacctcctctggggtgtccgaggaaagctctacaagtcatagccagccaggcagcacacatactaccgctttccctgatagtactaccacatccggtctgtcgcaggagcccactacgtcacacagcagccagggctcaaccgaggcaactttatcacctgggagcaccacagcaagctccctgggtcagcaatcaacgaccttccactccagccccggagataccgagacaactttactgcctgacgacaccattacgtccggcttagtagaggcttccactcccactcactccagtactggatccctacatacaacactaaccccagcaagcagcacatctacaggactgcaggaggagagcaccaccttccagagctggcccagttcttcagacactactccctctccaccttccaccacagccgttcccgttgaggtctctaccacataccatagtagaccaagctcgacccctactacacacttttctgcttcctcaacaacccttggcagatccgaagagtccactacagttcacagcagtcctggagccactgggacagcgctttttccgacacgatccgctacctcagtactggtgggcgaacccaccacatcccccataagctcagggagcaccgagacgacagctctgcctgggagcaccacaacagcaggcctgtcagagaagtcaaccaccttctactctagtccacgaagtccggataccacgctgagtccggcaagcacgaccagttccggcgtatctgaggaatctaccacatcccattcacgccctgggtccatgcatactacagcatttccaagtagcaccacgatgccaggagtcagccaggaatctaccgcgtcacattcctcccccggatcaacagataccaccctgtcacccggatctaccactgccagcagtcttggacctgagagcaccacctttcattccagcccagggtcgacagaaactactctcttgcctgataacactacagcctctgggctccttgaagcatccacccccgtgcactcttccacgggttctccccataccacgctctcacccgcagggagtactaccagacagggggagagtaccacctttcaatcttggccaaattctaaagacacaactccggctccgccaaccactacctctgccttcgtggagctatccaccaccagtcacggctcccctagctctacacccaccacccatttcagtgctagcagcactaccctgggtcgctccgaagaatctacaaccgtccactccagtcctgtggctaccgccacgacccccagcccagcccgaagcactactagcggtctcgtcgaagaaagcacaacgtaccattcttcccccggatcgacacagactatgcacttccctgagtccaacacgacctcgggtagaggggaggaatctacaacctcacactcaagcaccacacacacgatttccagcgctccttccaccacctcagcgcttgtcgaggaacccaccagttatcactcttcccccggatctacggccacaactcattttcccgatagtagtacgaccagcggaaggagcgaggagtctacagcctcacactcaagccaggacgctaccggcaccatcgtgctccccgcacgttccacgaccagcgtcttgcttggggaaagcacgacatctcccattagctctggttctatggagaccacggctttgcccggttccaccaccactcccggactttcagagaaaagcactacctttcattcttcacccagttcgacacccacaactcacttttcagcctcctcaacaactctgggacgttcagaagagagtaccacagtgcactcctcccctgtggccaccgcgaccactccatcccctgccagatcgacaacctccgggctagtggaagagagtaccgcgtaccactcatcccccggatcgacccagaccatgcatttcccagaatcaagtacagcgtccggaaggtctgaggaatctaggactagtcactcctcaacgacacatacaatttctagcccgccttccaccacctccgctcttgtggaggagccaacgagctaccactcctctcccggttccatcgcaacaacacacttcccagagtcttccacaacctcgggtagaagcgaggagtccaccgcctcacattctagtcccgataccaatggcattactcccctccctgcccactttaccacttctggtcgcatcgccgaaagcacgaccttttatatcagcccaggatcaatggagactacgttagcgagtaccgccacaacgcccggactcagcgctaagtccacgatactgtactcctcttcacgcagccctgaccaaacgttgtcacccgctagcatgacatcctcatcaatatctggcgagcccactagcctgtactcacaggccgagagcacccacaccactgcttttcctgcatccacaacaactagcggtctgagtcaggaatctaccacattccatagcaagcctggctctaccgagaccactttatcacctgggtcaataacaacctcttcctttgcccaggagtttacaacacctcactcccagcccggtagtgctctctccacagttagccctgcaagcaccacagttccaggactgtccgaggagagtacgaccttttactcaagtccaggcagtactgaaacgactgcattcagccacagtaataccatgagtattcacagccaacagtctacacccttcccggattcaccgggattcacccacactgtcctgccagccaccctgacaacaacggatattggacaggaatccacagcctttcactccagttctgacgctacaggaactactcctctccccgctaggtctaccgcttccgatcttgtgggtgagcccaccaccttttatatcagtccctctccaacctacaccacgctcttccctgccagctcaagcacttcaggcctgaccgaggaatccaccaccttccacactagcccatcctttacatccacaatcgtgtccactgaaagtctggaaactcttgctccgggactgtgtcaagaaggtcagatatggaatggcaaacagtgcgtgtgtccgcaaggctacgtaggctaccagtgcctgagcccgctcgaatctttccccgtcgagacccccgagaagctgaatgcaacactggggatgactgtcaaggttacatatagaaattttaccgagaagatgaacgatgcctcctcccaggaatatcagaatttcagcaccttgtttaagaatcggatggatgtggttctgaagggggataatcttccacagtaccggggtgtcaatatcaggcgccttcttaatgggagtatcgtagtcaaaaacgacgtaattctcgaggccgattatactcttgagtatgaggaactttttgagaacctggccgaaattgtgaaagccaagatcatgaatgaaaccaggacaaccttgctggatccagacagctgtcgcaaggcaattctgtgctactccgaagaggatacgtttgtggattcttctgtgaccccaggatttgattttcaggagcaatgcacacaaaaagctgctgaggggtacacccagttttattatgttgacgtgttggacggaaagcttgcctgcgttaacaagtgcacaaagggcaccaagagccagatgaattgcaacctgggcacctgccagctgcaaaggtcgggcccacgttgcctgtgtcccaataccaacacacactggtattggggcgaaacctgcgagttcaatattgctaagagccttgtgtatgggatcgtcggggcagtgatggccgtgctcctgttggcactgattattctcatcatcctgttctcactgagccagcgcaagcgacacagagagcagtacgatgttccccaagagtggcgtaaggagggcaccccagggattttccagaagacagcgatctgggaggaccaaaatttacgggaatccagatttggtttagagaatgcgtataataattttaggccgaccctggaaaccgttgactctggcaccgagctgcacattcagcgcccagaaatggtcgctagcaccgtttac

SEQ ID NO: 62895 - DNA, 16437 bp, Artificial Sequence
  derived and/or modified sequence
atgctggtgatctggatcctgaccctggccctgagactgtgcgccagcgtgaccaccgtgacccccgagggcagcgccgtgcacaaggccatcagccagcagggcaccctgtggaccggcgaggtgctggagaagcagaccgtggagcagggcaagagcaccctgagaagacagaagaaccacttccacagaagcgccggcgagctgagatgcagaaacgccctgaaggacgagggcgccagcgccggctggagcgtgatgttcgccggcgagagcgtggtggtgctggtgcacctgtggatgaccggcgccagagtgaagaacctgggcctggtggagttcgccagccccggcgacgacggcgacggcagagccgagggcttcagcctgggcctgcccctgagcgagcaggccagagccgccggcgccagagagaaggagagacaggagaccgtgatcaaccacagcaccttcagcggcttcagccagatcaccggcagcaccgtgaacaccagcatcggcggcaacaccaccagcgccagcacccccagcagcagcgaccccttcaccaccttcagcgactacggcgtgagcgtgaccttcatcaccggcagcaccgccaccaagcacttcctggacagcagcaccaacagcggccacagcgaggagagcaccgtgagccacagcggccccggcgccaccggcaccaccctgttccccagccacagcgccaccagcgtgttcgtgggcgagcccaagaccagccccatcaccagcgccagcatggagaccaccgccctgcccggcagcaccaccaccgccggcctgagcgagaagagcaccaccttctacagcagccccagaagccccgacagaaccctgagccccgccagaaccaccagcagcggcgtgagcgagaagagcaccaccagccacagcagacccggccccacccacaccatcgccttccccgacagcaccaccatgcccggcgtgagccaggagagcaccgccagccacagcatccccggcagcaccgacaccaccctgagccccggcaccaccacccccagcagcctgggccccgagagcaccaccttccacagcagccccggctacaccaagaccaccagactgcccgacaacaccaccaccagcggcctgctggaggccagcacccccgtgcacagcagcaccggcagcccccacaccaccctgagccccagcagcagcaccacccacgagggcgagcccaccaccttccagagctggcccagcagcaaggacaccagccccgcccccagcggcaccaccagcgccttcgtgaagctgagcaccacctaccacagcagccccagcagcacccccaccacccacttcagcgccagcagcaccaccctgggccacagcgaggagagcacccccgtgcacagcagccccgtggccaccgccaccacccccccccccgccagaagcgccaccagcggccacgtggaggagagcaccgcctaccacagaagccccggcagcacccagaccatgcacttccccgagagcagcaccaccagcggccacagcgaggagagcgccaccttccacggcagcaccacccacaccaagagcagcacccccagcaccaccgccgccctggcccacaccagctaccacagcagcctgggcagcaccgagaccacccacttcagagacagcagcaccatcagcggcagaagcgaggagagcaaggccagccacagcagccccgacgccatggccaccaccgtgctgcccgccggcagcacccccagcgtgctggtgggcgacagcacccccagccccatcagcagcggcagcatggagaccaccgccctgcccggcagcaccaccaagcccggcctgagcgagaagagcaccaccttctacagcagccccagaagccccgacaccacccacctgcccgccagcatgaccagcagcggcgtgagcgaggagagcaccaccagccacagcagacccggcagcacccacaccaccgccttccccggcagcaccaccatgcccggcctgagccaggagagcaccgccagccacagcagccccggccccaccgacaccaccctgagccccggcagcaccaccgccagcagcctgggccccgagtacaccaccttccacagcagacccggcagcaccgagaccaccctgctgcccgacaacaccaccgccagcggcctgctggaggccagcatgcccgtgcacagcagcaccagaagcccccacaccaccctgagccccgccggcagcaccaccagacagggcgagagcaccaccttccacagctggcccagcagcaaggacaccagacccgccccccccaccaccaccagcgccttcgtggagcccagcaccaccagccacggcagccccagcagcatccccaccacccacatcagcgccagaagcaccaccagcggcctggtggaggagagcaccacctaccacagcagccccggcagcacccagaccatgcacttccccgagagcgacaccaccagcggcagaggcgaggagagcaccaccagccacagcagcaccacccacaccatcagcagcgcccccagcaccaccagcgccctggtggaggagcccaccagctaccacagcagccccggcagcaccgccaccacccacttccccgacagcagcaccaccagcggcagaagcgaggagagcaccgccagccacagcagccaggacgccaccggcaccatcgtgctgcccgccagaagcaccaccagcgtgctgctgggcgagagcaccaccagccccatcagcagcggcagcatggagaccaccgccctgcccggcagcaccaccacccccggcctgagcgagagaagcaccaccttccacagcagccccagaagccccgccaccaccctgagccccgccagcaccaccagcagcggcgtgagcgaggagagcaccaccagcagaagcagacccggcagcacccacaccaccgccttccccgacagcaccaccacccccggcctgagcagacacagcaccaccagccacagcagccccggcagcaccgacaccaccctgctgcccgccagcaccaccaccagcggccccagccaggagagcaccaccagccacagcagcagcggcagcaccgacaccgccctgagccccggcagcaccaccgccctgagcttcggccaggagagcaccaccttccacagcaaccccggcagcacccacaccaccctgttccccgacagcaccaccagcagcggcatcgtggaggccagcaccagagtgcacagcagcaccggcagccccagaaccaccctgagccccgccagcagcaccagccccggcctgcagggcgagagcaccgccttccagacccaccccgccagcacccacaccacccccagcccccccagcaccgccaccgcccccgtggaggagagcaccacctaccacagaagccccggcagcacccccaccacccacttccccgccagcagcaccaccagcggccacagcgagaagagcaccatcttccacagcagccccgacgccagcggcaccacccccagcagcgcccacagcaccaccagcggcagaggcgagagcaccaccagcagaatcagccccggcagcaccgagatcaccaccctgcccggcagcaccaccacccccggcctgagcgaggccagcaccaccttctacagcagccccagaagccccaccaccaccctgagccccgccagcatgaccagcctgggcgtgggcgaggagagcaccaccagcagaagccagcccggcagcacccacagcaccgtgagccccgccagcaccaccacccccggcctgagcgaggagagcaccaccgtgtacagcagcagcagaggcagcaccgagaccaccgtgttcccccacagcaccaccaccagcgtgcacggcgaggagcccaccaccttccacagcagacccgccagcacccacaccaccctgttcaccgaggacagcaccaccagcggcctgaccgaggagagcaccgccttccccggcagccccgccagcacccagaccggcctgcccgccaccctgaccaccgccgacctgggcgaggagagcaccaccttccccagcagcagcggcagcaccggcaccaagctgagccccgccagaagcaccaccagcggcctggtgggcgagagcacccccagcagactgagccccagcagcaccgagaccaccaccctgcccggcagccccaccacccccagcctgagcgagaagagcaccaccttctacaccagccccagaagccccgacgccaccctgagccccgccaccaccaccagcagcggcgtgagcgaggagagcagcaccagccacagccagcccggcagcacccacaccaccgccttccccgacagcaccaccaccagcgacctgagccaggagcccaccaccagccacagcagccagggcagcaccgaggccaccctgagccccggcagcaccaccgccagcagcctgggccagcagagcaccaccttccacagcagccccggcgacaccgagaccaccctgctgcccgacgacaccatcaccagcggcctggtggaggccagcacccccacccacagcagcaccggcagcctgcacaccaccctgacccccgccagcagcaccagcgccggcctgcaggaggagagcaccaccttccagagctggcccagcagcagcgacaccacccccagcccccccggcaccaccgccgcccccgtggaggtgagcaccacctaccacagcagacccagcagcacccccaccacccacttcagcgccagcagcaccaccctgggcagaagcgaggagagcaccaccgtgcacagcagccccggcgccaccggcaccgccctgttccccaccagaagcgccaccagcgtgctggtgggcgagcccaccaccagccccatcagcagcggcagcaccgagaccaccgccctgcccggcagcaccaccaccgccggcctgagcgagaagagcaccaccttctacagcagccccagaagccccgacaccaccctgagccccgccagcaccaccagcagcggcgtgagcgaggagagcaccaccagccacagcagacccggcagcacccacaccaccgccttccccggcagcaccaccatgcccggcgtgagccaggagagcaccgccagccacagcagccccggcagcaccgacaccaccctgagccccggcagcaccaccgccagcagcctgggccccgagagcaccaccttccacagcagccccggcagcaccgagaccaccctgctgcccgacaacaccaccgccagcggcctgctggaggccagcacccccgtgcacagcagcaccggcagcccccacaccaccctgagccccgccggcagcaccaccagacagggcgagagcaccaccttccagagctggcccagcagcaaggacaccatgcccgccccccccaccaccaccagcgccttcgtggagctgagcaccaccagccacggcagccccagcagcacccccaccacccacttcagcgccagcagcaccaccctgggcagaagcgaggagagcaccaccgtgcacagcagccccgtggccaccgccaccacccccagccccgccagaagcaccaccagcggcctggtggaggagagcaccgcctaccacagcagccccggcagcacccagaccatgcacttccccgagagcagcaccgccagcggcagaagcgaggagagcagaaccagccacagcagcaccacccacaccatcagcagcccccccagcaccaccagcgccctggtggaggagcccaccagctaccacagcagccccggcagcaccgccaccacccacttccccgacagcagcaccaccagcggcagaagcgaggagagcaccgccagccacagcagccaggacgccaccggcaccatcgtgctgcccgccagaagcaccaccagcgtgctgctgggcgagagcaccaccagccccatcagcagcggcagcatggagaccaccgccctgcccggcagcaccaccacccccggcctgagcgagaagagcaccaccttccacagcagccccagaagccccgccaccaccctgagccccgccagcaccaccagcagcggcgtgagcgaggagagcaccaccagccacagcagacccggcagcacccacaccaccgccttccccgacagcaccaccacccccggcctgagcagacacagcaccaccagccacagcagccccggcagcaccgacaccaccctgctgcccgccagcaccaccaccagcggccccagccaggagagcaccaccagccacagcagccccggcagcaccgacaccgccctgagccccggcagcaccaccgccctgagcttcggccaggagagcaccaccttccacagcagccccggcagcacccacaccaccctgttccccgacagcaccaccagcagcggcatcgtggaggccagcaccagagtgcacagcagcaccggcagccccagaaccaccctgagccccgccagcagcaccagccccggcctgcagggcgagagcaccgccttccagacccaccccgccagcacccacaccacccccagcccccccagcaccgccaccgcccccgtggaggagagcaccacctaccacagaagccccggcagcacccccaccacccacttccccgccagcagcaccaccagcggccacagcgagaagagcaccatcttccacagcagccccgacgccagcggcaccacccccagcagcgcccacagcaccaccagcggcagaggcgagagcaccaccagcagaatcagccccggcagcaccgagatcaccaccctgcccggcagcaccaccacccccggcctgagcgaggccagcaccaccttctacagcagccccagaagccccaccaccaccctgagccccgccagcatgaccagcctgggcgtgggcgaggagagcaccaccagcagaagccagcccggcagcacccacagcaccgtgagccccgccagcaccaccacccccggcctgagcgaggagagcaccaccgtgtacagcagcagccccggcagcaccgagaccaccgtgttccccagaacccccaccaccagcgtgagaggcgaggagcccaccaccttccacagcagacccgccagcacccacaccaccctgttcaccgaggacagcaccaccagcggcctgaccgaggagagcaccgccttccccggcagccccgccagcacccagaccggcctgcccgccaccctgaccaccgccgacctgggcgaggagagcaccaccttccccagcagcagcggcagcaccggcaccaccctgagccccgccagaagcaccaccagcggcctggtgggcgagagcacccccagcagactgagccccagcagcaccgagaccaccaccctgcccggcagccccaccacccccagcctgagcgagaagagcaccaccttctacaccagccccagaagccccgacgccaccctgagccccgccaccaccaccagcagcggcgtgagcgaggagagcagcaccagccacagccagcccggcagcacccacaccaccgccttccccgacagcaccaccacccccggcctgagcagacacagcaccaccagccacagcagccccggcagcaccgacaccaccctgctgcccgccagcaccaccaccagcggccccagccaggagagcaccaccagccacagcagccccggcagcaccgacaccgccctgagccccggcagcaccaccgccctgagcttcggccaggagagcaccaccttccacagcagccccggcagcacccacaccaccctgttccccgacagcaccaccagcagcggcatcgtggaggccagcaccagagtgcacagcagcaccggcagccccagaaccaccctgagccccgccagcagcaccagccccggcctgcagggcgagagcaccaccttccagacccaccccgccagcacccacaccacccccagcccccccagcaccgccaccgcccccgtggaggagagcaccacctaccacagaagccccggcagcacccccaccacccacttccccgccagcagcaccaccagcggccacagcgagaagagcaccatcttccacagcagccccgacgccagcggcaccacccccagcagcgcccacagcaccaccagcggcagaggcgagagcaccaccagcagaatcagccccggcagcaccgagatcaccaccctgcccggcagcaccaccacccccggcctgagcgaggccagcaccaccttctacagcagccccagaagccccaccaccaccctgagccccgccagcatgaccagcctgggcgtgggcgaggagagcaccaccagcagaagccagcccggcagcacccacagcaccgtgagccccgccagcaccaccacccccggcctgagcgaggagagcaccaccgtgtacagcagcagccccggcagcaccgagaccaccgtgttccccagaagcaccaccaccagcgtgagaggcgaggagcccaccaccttccacagcagacccgccagcacccacaccaccctgttcaccgaggacagcaccaccagcggcctgaccgaggagagcaccgccttccccggcagccccgccagcacccagaccggcctgcccgccaccctgaccaccgccgacctgggcgaggagagcaccaccttccccagcagcagcggcagcaccggcaccaccctgagccccgccagaagcaccaccagcggcctggtgggcgagagcacccccagcagactgagccccagcagcaccgagaccaccaccctgcccggcagccccaccacccccagcctgagcgagaagagcaccaccttctacaccagccccagaagccccgacgccaccctgagccccgccaccaccaccagcagcggcgtgagcgaggagagcagcaccagccacagccagcccggcagcacccacaccaccgccttccccgacagcaccaccaccagcggcctgagccaggagcccaccgccagccacagcagccagggcagcaccgaggccaccctgagccccggcagcaccaccgccagcagcctgggccagcagagcaccaccttccacagcagccccggcgacaccgagaccaccctgctgcccgacgacaccatcaccagcggcctggtggaggccagcacccccacccacagcagcaccggcagcctgcacaccaccctgacccccgccagcagcaccagcgccggcctgcaggaggagagcaccaccttccagagctggcccagcagcagcgacaccacccccagcccccccggcaccaccgccgcccccgtggaggtgagcaccacctaccacagcagacccagcagcacccccaccacccacttcagcgccagcagcaccaccctgggcagaagcgaggagagcaccaccgtgcacagcagccccggcgccaccggcaccgccctgttccccaccagaagcgccaccagcgtgctggtgggcgagcccaccaccagccccatcagcagcggcagcaccgagaccaccgccctgcccggcagcaccaccaccgccggcctgagcgagaagagcaccaccttctacagcagccccagaagccccgacaccaccctgagccccgccagcaccaccagcagcggcgtgagcgaggagagcaccaccagccacagcagacccggcagcacccacaccaccgccttccccggcagcaccaccatgcccggcgtgagccaggagagcaccgccagccacagcagccccggcagcaccgacaccaccctgagccccggcagcaccaccgccagcagcctgggccccgagagcaccaccttccacagcggccccggcagcaccgagaccaccctgctgcccgacaacaccaccgccagcggcctgctggaggccagcacccccgtgcacagcagcaccggcagcccccacaccaccctgagccccgccggcagcaccaccagacagggcgagagcaccaccttccagagctggcccaacagcaaggacaccacccccgccccccccaccaccaccagcgccttcgtggagctgagcaccaccagccacggcagccccagcagcacccccaccacccacttcagcgccagcagcaccaccctgggcagaagcgaggagagcaccaccgtgcacagcagccccgtggccaccgccaccacccccagccccgccagaagcaccaccagcggcctggtggaggagagcaccacctaccacagcagccccggcagcacccagaccatgcacttccccgagagcgacaccaccagcggcagaggcgaggagagcaccaccagccacagcagcaccacccacaccatcagcagcgcccccagcaccaccagcgccctggtggaggagcccaccagctaccacagcagccccggcagcaccgccaccacccacttccccgacagcagcaccaccagcggcagaagcgaggagagcaccgccagccacagcagccaggacgccaccggcaccatcgtgctgcccgccagaagcaccaccagcgtgctgctgggcgagagcaccaccagccccatcagcagcggcagcatggagaccaccgccctgcccggcagcaccaccacccccggcctgagcgagaagagcaccaccttccacagcagccccagaagccccgccaccaccctgagccccgccagcaccaccagcagcggcgtgagcgaggagagcaccaccagccacagcagacccggcagcacccacaccaccgccttccccgacagcaccaccacccccggcctgagcagacacagcaccaccagccacagcagccccggcagcaccgacaccaccctgctgcccgccagcaccaccaccagcggcagcagccaggagagcaccaccagccacagcagcagcggcagcaccgacaccgccctgagccccggcagcaccaccgccctgagcttcggccaggagagcaccaccttccacagcagccccggcagcacccacaccaccctgttccccgacagcaccaccagcagcggcatcgtggaggccagcaccagagtgcacagcagcaccggcagccccagaaccaccctgagccccgccagcagcaccagccccggcctgcagggcgagagcaccgccttccagacccaccccgccagcacccacaccacccccagcccccccagcaccgccaccgcccccgtggaggagagcaccacctaccacagaagccccggcagcacccccaccacccacttccccgccagcagcaccaccagcggccacagcgagaagagcaccatcttccacagcagccccgacgccagcggcaccacccccagcagcgcccacagcaccaccagcggcagaggcgagagcaccaccagcagaatcagccccggcagcaccgagatcaccaccctgcccggcagcaccaccacccccggcctgagcgaggccagcaccaccttctacagcagccccagaagccccaccaccaccctgagccccgccagcatgaccagcctgggcgtgggcgaggagagcaccaccagcagaagccagcccggcagcacccacagcaccgtgagccccgccagcaccaccacccccggcctgagcgaggagagcaccaccgtgtacagcagcagccccggcagcaccgagaccaccgtgttccccagaagcaccaccaccagcgtgagaagagaggagcccaccaccttccacagcagacccgccagcacccacaccaccctgttcaccgaggacagcaccaccagcggcctgaccgaggagagcaccgccttccccggcagccccgccagcacccagaccggcctgcccgccaccctgaccaccgccgacctgggcgaggagagcaccaccttccccagcagcagcggcagcaccggcaccaagctgagccccgccagaagcaccaccagcggcctggtgggcgagagcacccccagcagactgagccccagcagcaccgagaccaccaccctgcccggcagccccaccacccccagcctgagcgagaagagcaccaccttctacaccagccccagaagccccgacgccaccctgagccccgccaccaccaccagcagcggcgtgagcgaggagagcagcaccagccacagccagcccggcagcacccacaccaccgccttccccgacagcaccaccaccagcggcctgagccaggagcccaccaccagccacagcagccagggcagcaccgaggccaccctgagccccggcagcaccaccgccagcagcctgggccagcagagcaccaccttccacagcagccccggcgacaccgagaccaccctgctgcccgacgacaccatcaccagcggcctggtggaggccagcacccccacccacagcagcaccggcagcctgcacaccaccctgacccccgccagcagcaccagcaccggcctgcaggaggagagcaccaccttccagagctggcccagcagcagcgacaccacccccagcccccccagcaccaccgccgtgcccgtggaggtgagcaccacctaccacagcagacccagcagcacccccaccacccacttcagcgccagcagcaccaccctgggcagaagcgaggagagcaccaccgtgcacagcagccccggcgccaccggcaccgccctgttccccaccagaagcgccaccagcgtgctggtgggcgagcccaccaccagccccatcagcagcggcagcaccgagaccaccgccctgcccggcagcaccaccaccgccggcctgagcgagaagagcaccaccttctacagcagccccagaagccccgacaccaccctgagccccgccagcaccaccagcagcggcgtgagcgaggagagcaccaccagccacagcagacccggcagcatgcacaccaccgccttccccagcagcaccaccatgcccggcgtgagccaggagagcaccgccagccacagcagccccggcagcaccgacaccaccctgagccccggcagcaccaccgccagcagcctgggccccgagagcaccaccttccacagcagccccggcagcaccgagaccaccctgctgcccgacaacaccaccgccagcggcctgctggaggccagcacccccgtgcacagcagcaccggcagcccccacaccaccctgagccccgccggcagcaccaccagacagggcgagagcaccaccttccagagctggcccaacagcaaggacaccacccccgccccccccaccaccaccagcgccttcgtggagctgagcaccaccagccacggcagccccagcagcacccccaccacccacttcagcgccagcagcaccaccctgggcagaagcgaggagagcaccaccgtgcacagcagccccgtggccaccgccaccacccccagccccgccagaagcaccaccagcggcctggtggaggagagcaccacctaccacagcagccccggcagcacccagaccatgcacttccccgagagcaacaccaccagcggcagaggcgaggagagcaccaccagccacagcagcaccacccacaccatcagcagcgcccccagcaccaccagcgccctggtggaggagcccaccagctaccacagcagccccggcagcaccgccaccacccacttccccgacagcagcaccaccagcggcagaagcgaggagagcaccgccagccacagcagccaggacgccaccggcaccatcgtgctgcccgccagaagcaccaccagcgtgctgctgggcgagagcaccaccagccccatcagcagcggcagcatggagaccaccgccctgcccggcagcaccaccacccccggcctgagcgagaagagcaccaccttccacagcagccccagcagcacccccaccacccacttcagcgccagcagcaccaccctgggcagaagcgaggagagcaccaccgtgcacagcagccccgtggccaccgccaccacccccagccccgccagaagcaccaccagcggcctggtggaggagagcaccgcctaccacagcagccccggcagcacccagaccatgcacttccccgagagcagcaccgccagcggcagaagcgaggagagcagaaccagccacagcagcaccacccacaccatcagcagcccccccagcaccaccagcgccctggtggaggagcccaccagctaccacagcagccccggcagcatcgccaccacccacttccccgagagcagcaccaccagcggcagaagcgaggagagcaccgccagccacagcagccccgacaccaacggcatcacccccctgcccgcccacttcaccaccagcggcagaatcgccgagagcaccaccttctacatcagccccggcagcatggagaccaccctggccagcaccgccaccacccccggcctgagcgccaagagcaccatcctgtacagcagcagcagaagccccgaccagaccctgagccccgccagcatgaccagcagcagcatcagcggcgagcccaccagcctgtacagccaggccgagagcacccacaccaccgccttccccgccagcaccaccaccagcggcctgagccaggagagcaccaccttccacagcaagcccggcagcaccgagaccaccctgagccccggcagcatcaccaccagcagcttcgcccaggagttcaccaccccccacagccagcccggcagcgccctgagcaccgtgagccccgccagcaccaccgtgcccggcctgagcgaggagagcaccaccttctacagcagccccggcagcaccgagaccaccgccttcagccacagcaacaccatgagcatccacagccagcagagcacccccttccccgacagccccggcttcacccacaccgtgctgcccgccaccctgaccaccaccgacatcggccaggagagcaccgccttccacagcagcagcgacgccaccggcaccacccccctgcccgccagaagcaccgccagcgacctggtgggcgagcccaccaccttctacatcagccccagccccacctacaccaccctgttccccgccagcagcagcaccagcggcctgaccgaggagagcaccaccttccacaccagccccagcttcaccagcaccatcgtgagcaccgagagcctggagaccctggcccccggcctgtgccaggagggccagatctggaacggcaagcagtgcgtgtgcccccagggctacgtgggctaccagtgcctgagccccctggagagcttccccgtggagacccccgagaagctgaacgccaccctgggcatgaccgtgaaggtgacctacagaaacttcaccgagaagatgaacgacgccagcagccaggagtaccagaacttcagcaccctgttcaagaacagaatggacgtggtgctgaagggcgacaacctgccccagtacagaggcgtgaacatcagaagactgctgaacggcagcatcgtggtgaagaacgacgtgatcctggaggccgactacaccctggagtacgaggagctgttcgagaacctggccgagatcgtgaaggccaagatcatgaacgagaccagaaccaccctgctggaccccgacagctgcagaaaggccatcctgtgctacagcgaggaggacaccttcgtggacagcagcgtgacccccggcttcgacttccaggagcagtgcacccagaaggccgccgagggctacacccagttctactacgtggacgtgctggacggcaagctggcctgcgtgaacaagtgcaccaagggcaccaagagccagatgaactgcaacctgggcacctgccagctgcagagaagcggccccagatgcctgtgccccaacaccaacacccactggtactggggcgagacctgcgagttcaacatcgccaagagcctggtgtacggcatcgtgggcgccgtgatggccgtgctgctgctggccctgatcatcctgatcatcctgttcagcctgagccagagaaagagacacagagagcagtacgacgtgccccaggagtggagaaaggagggcacccccggcatcttccagaagaccgccatctgggaggaccagaacctgagagagagcagattcggcctggagaacgcctacaacaacttcagacccaccctggagaccgtggacagcggcaccgagctgcacatccagagacccgagatggtggccagcaccgtgtag

SEQ ID NO: 62896 - DNA, 16008 bp, Artificial Sequence
  derived and/or modified sequence
atgctggtgatctggatcctgaccctggccctgagactgtgcgccagcgtgaccaccgtgacccccggcagcaccgtgaacaccagcatcggcggcaacaccaccagcgccagcacccccagcagcagcgaccccttcaccaccttcagcgactacggcgtgagcgtgaccttcatcaccggcagcaccgccaccaagcacttcctggacagcagcaccaacagcggccacagcgaggagagcaccgtgagccacagcggccccggcgccaccggcaccaccctgttccccagccacagcgccaccagcgtgttcgtgggcgagcccaagaccagccccatcaccagcgccagcatggagaccaccgccctgcccggcagcaccaccaccgccggcctgagcgagaagagcaccaccttctacagcagccccagaagccccgacagaaccctgagccccgccagaaccaccagcagcggcgtgagcgagaagagcaccaccagccacagcagacccggccccacccacaccatcgccttccccgacagcaccaccatgcccggcgtgagccaggagagcaccgccagccacagcatccccggcagcaccgacaccaccctgagccccggcaccaccacccccagcagcctgggccccgagagcaccaccttccacagcagccccggctacaccaagaccaccagactgcccgacaacaccaccaccagcggcctgctggaggccagcacccccgtgcacagcagcaccggcagcccccacaccaccctgagccccagcagcagcaccacccacgagggcgagcccaccaccttccagagctggcccagcagcaaggacaccagccccgcccccagcggcaccaccagcgccttcgtgaagctgagcaccacctaccacagcagccccagcagcacccccaccacccacttcagcgccagcagcaccaccctgggccacagcgaggagagcacccccgtgcacagcagccccgtggccaccgccaccacccccccccccgccagaagcgccaccagcggccacgtggaggagagcaccgcctaccacagaagccccggcagcacccagaccatgcacttccccgagagcagcaccaccagcggccacagcgaggagagcgccaccttccacggcagcaccacccacaccaagagcagcacccccagcaccaccgccgccctggcccacaccagctaccacagcagcctgggcagcaccgagaccacccacttcagagacagcagcaccatcagcggcagaagcgaggagagcaaggccagccacagcagccccgacgccatggccaccaccgtgctgcccgccggcagcacccccagcgtgctggtgggcgacagcacccccagccccatcagcagcggcagcatggagaccaccgccctgcccggcagcaccaccaagcccggcctgagcgagaagagcaccaccttctacagcagccccagaagccccgacaccacccacctgcccgccagcatgaccagcagcggcgtgagcgaggagagcaccaccagccacagcagacccggcagcacccacaccaccgccttccccggcagcaccaccatgcccggcctgagccaggagagcaccgccagccacagcagccccggccccaccgacaccaccctgagccccggcagcaccaccgccagcagcctgggccccgagtacaccaccttccacagcagacccggcagcaccgagaccaccctgctgcccgacaacaccaccgccagcggcctgctggaggccagcatgcccgtgcacagcagcaccagaagcccccacaccaccctgagccccgccggcagcaccaccagacagggcgagagcaccaccttccacagctggcccagcagcaaggacaccagacccgccccccccaccaccaccagcgccttcgtggagcccagcaccaccagccacggcagccccagcagcatccccaccacccacatcagcgccagaagcaccaccagcggcctggtggaggagagcaccacctaccacagcagccccggcagcacccagaccatgcacttccccgagagcgacaccaccagcggcagaggcgaggagagcaccaccagccacagcagcaccacccacaccatcagcagcgcccccagcaccaccagcgccctggtggaggagcccaccagctaccacagcagccccggcagcaccgccaccacccacttccccgacagcagcaccaccagcggcagaagcgaggagagcaccgccagccacagcagccaggacgccaccggcaccatcgtgctgcccgccagaagcaccaccagcgtgctgctgggcgagagcaccaccagccccatcagcagcggcagcatggagaccaccgccctgcccggcagcaccaccacccccggcctgagcgagagaagcaccaccttccacagcagccccagaagccccgccaccaccctgagccccgccagcaccaccagcagcggcgtgagcgaggagagcaccaccagcagaagcagacccggcagcacccacaccaccgccttccccgacagcaccaccacccccggcctgagcagacacagcaccaccagccacagcagccccggcagcaccgacaccaccctgctgcccgccagcaccaccaccagcggccccagccaggagagcaccaccagccacagcagcagcggcagcaccgacaccgccctgagccccggcagcaccaccgccctgagcttcggccaggagagcaccaccttccacagcaaccccggcagcacccacaccaccctgttccccgacagcaccaccagcagcggcatcgtggaggccagcaccagagtgcacagcagcaccggcagccccagaaccaccctgagccccgccagcagcaccagccccggcctgcagggcgagagcaccgccttccagacccaccccgccagcacccacaccacccccagcccccccagcaccgccaccgcccccgtggaggagagcaccacctaccacagaagccccggcagcacccccaccacccacttccccgccagcagcaccaccagcggccacagcgagaagagcaccatcttccacagcagccccgacgccagcggcaccacccccagcagcgcccacagcaccaccagcggcagaggcgagagcaccaccagcagaatcagccccggcagcaccgagatcaccaccctgcccggcagcaccaccacccccggcctgagcgaggccagcaccaccttctacagcagccccagaagccccaccaccaccctgagccccgccagcatgaccagcctgggcgtgggcgaggagagcaccaccagcagaagccagcccggcagcacccacagcaccgtgagccccgccagcaccaccacccccggcctgagcgaggagagcaccaccgtgtacagcagcagcagaggcagcaccgagaccaccgtgttcccccacagcaccaccaccagcgtgcacggcgaggagcccaccaccttccacagcagacccgccagcacccacaccaccctgttcaccgaggacagcaccaccagcggcctgaccgaggagagcaccgccttccccggcagccccgccagcacccagaccggcctgcccgccaccctgaccaccgccgacctgggcgaggagagcaccaccttccccagcagcagcggcagcaccggcaccaagctgagccccgccagaagcaccaccagcggcctggtgggcgagagcacccccagcagactgagccccagcagcaccgagaccaccaccctgcccggcagccccaccacccccagcctgagcgagaagagcaccaccttctacaccagccccagaagccccgacgccaccctgagccccgccaccaccaccagcagcggcgtgagcgaggagagcagcaccagccacagccagcccggcagcacccacaccaccgccttccccgacagcaccaccaccagcgacctgagccaggagcccaccaccagccacagcagccagggcagcaccgaggccaccctgagccccggcagcaccaccgccagcagcctgggccagcagagcaccaccttccacagcagccccggcgacaccgagaccaccctgctgcccgacgacaccatcaccagcggcctggtggaggccagcacccccacccacagcagcaccggcagcctgcacaccaccctgacccccgccagcagcaccagcgccggcctgcaggaggagagcaccaccttccagagctggcccagcagcagcgacaccacccccagcccccccggcaccaccgccgcccccgtggaggtgagcaccacctaccacagcagacccagcagcacccccaccacccacttcagcgccagcagcaccaccctgggcagaagcgaggagagcaccaccgtgcacagcagccccggcgccaccggcaccgccctgttccccaccagaagcgccaccagcgtgctggtgggcgagcccaccaccagccccatcagcagcggcagcaccgagaccaccgccctgcccggcagcaccaccaccgccggcctgagcgagaagagcaccaccttctacagcagccccagaagccccgacaccaccctgagccccgccagcaccaccagcagcggcgtgagcgaggagagcaccaccagccacagcagacccggcagcacccacaccaccgccttccccggcagcaccaccatgcccggcgtgagccaggagagcaccgccagccacagcagccccggcagcaccgacaccaccctgagccccggcagcaccaccgccagcagcctgggccccgagagcaccaccttccacagcagccccggcagcaccgagaccaccctgctgcccgacaacaccaccgccagcggcctgctggaggccagcacccccgtgcacagcagcaccggcagcccccacaccaccctgagccccgccggcagcaccaccagacagggcgagagcaccaccttccagagctggcccagcagcaaggacaccatgcccgccccccccaccaccaccagcgccttcgtggagctgagcaccaccagccacggcagccccagcagcacccccaccacccacttcagcgccagcagcaccaccctgggcagaagcgaggagagcaccaccgtgcacagcagccccgtggccaccgccaccacccccagccccgccagaagcaccaccagcggcctggtggaggagagcaccgcctaccacagcagccccggcagcacccagaccatgcacttccccgagagcagcaccgccagcggcagaagcgaggagagcagaaccagccacagcagcaccacccacaccatcagcagcccccccagcaccaccagcgccctggtggaggagcccaccagctaccacagcagccccggcagcaccgccaccacccacttccccgacagcagcaccaccagcggcagaagcgaggagagcaccgccagccacagcagccaggacgccaccggcaccatcgtgctgcccgccagaagcaccaccagcgtgctgctgggcgagagcaccaccagccccatcagcagcggcagcatggagaccaccgccctgcccggcagcaccaccacccccggcctgagcgagaagagcaccaccttccacagcagccccagaagccccgccaccaccctgagccccgccagcaccaccagcagcggcgtgagcgaggagagcaccaccagccacagcagacccggcagcacccacaccaccgccttccccgacagcaccaccacccccggcctgagcagacacagcaccaccagccacagcagccccggcagcaccgacaccaccctgctgcccgccagcaccaccaccagcggccccagccaggagagcaccaccagccacagcagccccggcagcaccgacaccgccctgagccccggcagcaccaccgccctgagcttcggccaggagagcaccaccttccacagcagccccggcagcacccacaccaccctgttccccgacagcaccaccagcagcggcatcgtggaggccagcaccagagtgcacagcagcaccggcagccccagaaccaccctgagccccgccagcagcaccagccccggcctgcagggcgagagcaccgccttccagacccaccccgccagcacccacaccacccccagcccccccagcaccgccaccgcccccgtggaggagagcaccacctaccacagaagccccggcagcacccccaccacccacttccccgccagcagcaccaccagcggccacagcgagaagagcaccatcttccacagcagccccgacgccagcggcaccacccccagcagcgcccacagcaccaccagcggcagaggcgagagcaccaccagcagaatcagccccggcagcaccgagatcaccaccctgcccggcagcaccaccacccccggcctgagcgaggccagcaccaccttctacagcagccccagaagccccaccaccaccctgagccccgccagcatgaccagcctgggcgtgggcgaggagagcaccaccagcagaagccagcccggcagcacccacagcaccgtgagccccgccagcaccaccacccccggcctgagcgaggagagcaccaccgtgtacagcagcagccccggcagcaccgagaccaccgtgttccccagaacccccaccaccagcgtgagaggcgaggagcccaccaccttccacagcagacccgccagcacccacaccaccctgttcaccgaggacagcaccaccagcggcctgaccgaggagagcaccgccttccccggcagccccgccagcacccagaccggcctgcccgccaccctgaccaccgccgacctgggcgaggagagcaccaccttccccagcagcagcggcagcaccggcaccaccctgagccccgccagaagcaccaccagcggcctggtgggcgagagcacccccagcagactgagccccagcagcaccgagaccaccaccctgcccggcagccccaccacccccagcctgagcgagaagagcaccaccttctacaccagccccagaagccccgacgccaccctgagccccgccaccaccaccagcagcggcgtgagcgaggagagcagcaccagccacagccagcccggcagcacccacaccaccgccttccccgacagcaccaccacccccggcctgagcagacacagcaccaccagccacagcagccccggcagcaccgacaccaccctgctgcccgccagcaccaccaccagcggccccagccaggagagcaccaccagccacagcagccccggcagcaccgacaccgccctgagccccggcagcaccaccgccctgagcttcggccaggagagcaccaccttccacagcagccccggcagcacccacaccaccctgttccccgacagcaccaccagcagcggcatcgtggaggccagcaccagagtgcacagcagcaccggcagccccagaaccaccctgagccccgccagcagcaccagccccggcctgcagggcgagagcaccaccttccagacccaccccgccagcacccacaccacccccagcccccccagcaccgccaccgcccccgtggaggagagcaccacctaccacagaagccccggcagcacccccaccacccacttccccgccagcagcaccaccagcggccacagcgagaagagcaccatcttccacagcagccccgacgccagcggcaccacccccagcagcgcccacagcaccaccagcggcagaggcgagagcaccaccagcagaatcagccccggcagcaccgagatcaccaccctgcccggcagcaccaccacccccggcctgagcgaggccagcaccaccttctacagcagccccagaagccccaccaccaccctgagccccgccagcatgaccagcctgggcgtgggcgaggagagcaccaccagcagaagccagcccggcagcacccacagcaccgtgagccccgccagcaccaccacccccggcctgagcgaggagagcaccaccgtgtacagcagcagccccggcagcaccgagaccaccgtgttccccagaagcaccaccaccagcgtgagaggcgaggagcccaccaccttccacagcagacccgccagcacccacaccaccctgttcaccgaggacagcaccaccagcggcctgaccgaggagagcaccgccttccccggcagccccgccagcacccagaccggcctgcccgccaccctgaccaccgccgacctgggcgaggagagcaccaccttccccagcagcagcggcagcaccggcaccaccctgagccccgccagaagcaccaccagcggcctggtgggcgagagcacccccagcagactgagccccagcagcaccgagaccaccaccctgcccggcagccccaccacccccagcctgagcgagaagagcaccaccttctacaccagccccagaagccccgacgccaccctgagccccgccaccaccaccagcagcggcgtgagcgaggagagcagcaccagccacagccagcccggcagcacccacaccaccgccttccccgacagcaccaccaccagcggcctgagccaggagcccaccgccagccacagcagccagggcagcaccgaggccaccctgagccccggcagcaccaccgccagcagcctgggccagcagagcaccaccttccacagcagccccggcgacaccgagaccaccctgctgcccgacgacaccatcaccagcggcctggtggaggccagcacccccacccacagcagcaccggcagcctgcacaccaccctgacccccgccagcagcaccagcgccggcctgcaggaggagagcaccaccttccagagctggcccagcagcagcgacaccacccccagcccccccggcaccaccgccgcccccgtggaggtgagcaccacctaccacagcagacccagcagcacccccaccacccacttcagcgccagcagcaccaccctgggcagaagcgaggagagcaccaccgtgcacagcagccccggcgccaccggcaccgccctgttccccaccagaagcgccaccagcgtgctggtgggcgagcccaccaccagccccatcagcagcggcagcaccgagaccaccgccctgcccggcagcaccaccaccgccggcctgagcgagaagagcaccaccttctacagcagccccagaagccccgacaccaccctgagccccgccagcaccaccagcagcggcgtgagcgaggagagcaccaccagccacagcagacccggcagcacccacaccaccgccttccccggcagcaccaccatgcccggcgtgagccaggagagcaccgccagccacagcagccccggcagcaccgacaccaccctgagccccggcagcaccaccgccagcagcctgggccccgagagcaccaccttccacagcggccccggcagcaccgagaccaccctgctgcccgacaacaccaccgccagcggcctgctggaggccagcacccccgtgcacagcagcaccggcagcccccacaccaccctgagccccgccggcagcaccaccagacagggcgagagcaccaccttccagagctggcccaacagcaaggacaccacccccgccccccccaccaccaccagcgccttcgtggagctgagcaccaccagccacggcagccccagcagcacccccaccacccacttcagcgccagcagcaccaccctgggcagaagcgaggagagcaccaccgtgcacagcagccccgtggccaccgccaccacccccagccccgccagaagcaccaccagcggcctggtggaggagagcaccacctaccacagcagccccggcagcacccagaccatgcacttccccgagagcgacaccaccagcggcagaggcgaggagagcaccaccagccacagcagcaccacccacaccatcagcagcgcccccagcaccaccagcgccctggtggaggagcccaccagctaccacagcagccccggcagcaccgccaccacccacttccccgacagcagcaccaccagcggcagaagcgaggagagcaccgccagccacagcagccaggacgccaccggcaccatcgtgctgcccgccagaagcaccaccagcgtgctgctgggcgagagcaccaccagccccatcagcagcggcagcatggagaccaccgccctgcccggcagcaccaccacccccggcctgagcgagaagagcaccaccttccacagcagccccagaagccccgccaccaccctgagccccgccagcaccaccagcagcggcgtgagcgaggagagcaccaccagccacagcagacccggcagcacccacaccaccgccttccccgacagcaccaccacccccggcctgagcagacacagcaccaccagccacagcagccccggcagcaccgacaccaccctgctgcccgccagcaccaccaccagcggcagcagccaggagagcaccaccagccacagcagcagcggcagcaccgacaccgccctgagccccggcagcaccaccgccctgagcttcggccaggagagcaccaccttccacagcagccccggcagcacccacaccaccctgttccccgacagcaccaccagcagcggcatcgtggaggccagcaccagagtgcacagcagcaccggcagccccagaaccaccctgagccccgccagcagcaccagccccggcctgcagggcgagagcaccgccttccagacccaccccgccagcacccacaccacccccagcccccccagcaccgccaccgcccccgtggaggagagcaccacctaccacagaagccccggcagcacccccaccacccacttccccgccagcagcaccaccagcggccacagcgagaagagcaccatcttccacagcagccccgacgccagcggcaccacccccagcagcgcccacagcaccaccagcggcagaggcgagagcaccaccagcagaatcagccccggcagcaccgagatcaccaccctgcccggcagcaccaccacccccggcctgagcgaggccagcaccaccttctacagcagccccagaagccccaccaccaccctgagccccgccagcatgaccagcctgggcgtgggcgaggagagcaccaccagcagaagccagcccggcagcacccacagcaccgtgagccccgccagcaccaccacccccggcctgagcgaggagagcaccaccgtgtacagcagcagccccggcagcaccgagaccaccgtgttccccagaagcaccaccaccagcgtgagaagagaggagcccaccaccttccacagcagacccgccagcacccacaccaccctgttcaccgaggacagcaccaccagcggcctgaccgaggagagcaccgccttccccggcagccccgccagcacccagaccggcctgcccgccaccctgaccaccgccgacctgggcgaggagagcaccaccttccccagcagcagcggcagcaccggcaccaagctgagccccgccagaagcaccaccagcggcctggtgggcgagagcacccccagcagactgagccccagcagcaccgagaccaccaccctgcccggcagccccaccacccccagcctgagcgagaagagcaccaccttctacaccagccccagaagccccgacgccaccctgagccccgccaccaccaccagcagcggcgtgagcgaggagagcagcaccagccacagccagcccggcagcacccacaccaccgccttccccgacagcaccaccaccagcggcctgagccaggagcccaccaccagccacagcagccagggcagcaccgaggccaccctgagccccggcagcaccaccgccagcagcctgggccagcagagcaccaccttccacagcagccccggcgacaccgagaccaccctgctgcccgacgacaccatcaccagcggcctggtggaggccagcacccccacccacagcagcaccggcagcctgcacaccaccctgacccccgccagcagcaccagcaccggcctgcaggaggagagcaccaccttccagagctggcccagcagcagcgacaccacccccagcccccccagcaccaccgccgtgcccgtggaggtgagcaccacctaccacagcagacccagcagcacccccaccacccacttcagcgccagcagcaccaccctgggcagaagcgaggagagcaccaccgtgcacagcagccccggcgccaccggcaccgccctgttccccaccagaagcgccaccagcgtgctggtgggcgagcccaccaccagccccatcagcagcggcagcaccgagaccaccgccctgcccggcagcaccaccaccgccggcctgagcgagaagagcaccaccttctacagcagccccagaagccccgacaccaccctgagccccgccagcaccaccagcagcggcgtgagcgaggagagcaccaccagccacagcagacccggcagcatgcacaccaccgccttccccagcagcaccaccatgcccggcgtgagccaggagagcaccgccagccacagcagccccggcagcaccgacaccaccctgagccccggcagcaccaccgccagcagcctgggccccgagagcaccaccttccacagcagccccggcagcaccgagaccaccctgctgcccgacaacaccaccgccagcggcctgctggaggccagcacccccgtgcacagcagcaccggcagcccccacaccaccctgagccccgccggcagcaccaccagacagggcgagagcaccaccttccagagctggcccaacagcaaggacaccacccccgccccccccaccaccaccagcgccttcgtggagctgagcaccaccagccacggcagccccagcagcacccccaccacccacttcagcgccagcagcaccaccctgggcagaagcgaggagagcaccaccgtgcacagcagccccgtggccaccgccaccacccccagccccgccagaagcaccaccagcggcctggtggaggagagcaccacctaccacagcagccccggcagcacccagaccatgcacttccccgagagcaacaccaccagcggcagaggcgaggagagcaccaccagccacagcagcaccacccacaccatcagcagcgcccccagcaccaccagcgccctggtggaggagcccaccagctaccacagcagccccggcagcaccgccaccacccacttccccgacagcagcaccaccagcggcagaagcgaggagagcaccgccagccacagcagccaggacgccaccggcaccatcgtgctgcccgccagaagcaccaccagcgtgctgctgggcgagagcaccaccagccccatcagcagcggcagcatggagaccaccgccctgcccggcagcaccaccacccccggcctgagcgagaagagcaccaccttccacagcagccccagcagcacccccaccacccacttcagcgccagcagcaccaccctgggcagaagcgaggagagcaccaccgtgcacagcagccccgtggccaccgccaccacccccagccccgccagaagcaccaccagcggcctggtggaggagagcaccgcctaccacagcagccccggcagcacccagaccatgcacttccccgagagcagcaccgccagcggcagaagcgaggagagcagaaccagccacagcagcaccacccacaccatcagcagcccccccagcaccaccagcgccctggtggaggagcccaccagctaccacagcagccccggcagcatcgccaccacccacttccccgagagcagcaccaccagcggcagaagcgaggagagcaccgccagccacagcagccccgacaccaacggcatcacccccctgcccgcccacttcaccaccagcggcagaatcgccgagagcaccaccttctacatcagccccggcagcatggagaccaccctggccagcaccgccaccacccccggcctgagcgccaagagcaccatcctgtacagcagcagcagaagccccgaccagaccctgagccccgccagcatgaccagcagcagcatcagcggcgagcccaccagcctgtacagccaggccgagagcacccacaccaccgccttccccgccagcaccaccaccagcggcctgagccaggagagcaccaccttccacagcaagcccggcagcaccgagaccaccctgagccccggcagcatcaccaccagcagcttcgcccaggagttcaccaccccccacagccagcccggcagcgccctgagcaccgtgagccccgccagcaccaccgtgcccggcctgagcgaggagagcaccaccttctacagcagccccggcagcaccgagaccaccgccttcagccacagcaacaccatgagcatccacagccagcagagcacccccttccccgacagccccggcttcacccacaccgtgctgcccgccaccctgaccaccaccgacatcggccaggagagcaccgccttccacagcagcagcgacgccaccggcaccacccccctgcccgccagaagcaccgccagcgacctggtgggcgagcccaccaccttctacatcagccccagccccacctacaccaccctgttccccgccagcagcagcaccagcggcctgaccgaggagagcaccaccttccacaccagccccagcttcaccagcaccatcgtgagcaccgagagcctggagaccctggcccccggcctgtgccaggagggccagatctggaacggcaagcagtgcgtgtgcccccagggctacgtgggctaccagtgcctgagccccctggagagcttccccgtggagacccccgagaagctgaacgccaccctgggcatgaccgtgaaggtgacctacagaaacttcaccgagaagatgaacgacgccagcagccaggagtaccagaacttcagcaccctgttcaagaacagaatggacgtggtgctgaagggcgacaacctgccccagtacagaggcgtgaacatcagaagactgctgaacggcagcatcgtggtgaagaacgacgtgatcctggaggccgactacaccctggagtacgaggagctgttcgagaacctggccgagatcgtgaaggccaagatcatgaacgagaccagaaccaccctgctggaccccgacagctgcagaaaggccatcctgtgctacagcgaggaggacaccttcgtggacagcagcgtgacccccggcttcgacttccaggagcagtgcacccagaaggccgccgagggctacacccagttctactacgtggacgtgctggacggcaagctggcctgcgtgaacaagtgcaccaagggcaccaagagccagatgaactgcaacctgggcacctgccagctgcagagaagcggccccagatgcctgtgccccaacaccaacacccactggtactggggcgagacctgcgagttcaacatcgccaagagcctggtgtacggcatcgtgggcgccgtgatggccgtgctgctgctggccctgatcatcctgatcatcctgttcagcctgagccagagaaagagacacagagagcagtacgacgtgccccaggagtggagaaaggagggcacccccggcatcttccagaagaccgccatctgggaggaccagaacctgagagagagcagattcggcctggagaacgcctacaacaacttcagacccaccctggagaccgtggacagcggcaccgagctgcacatccagagacccgagatggtggccagcaccgtgtag

SEQ ID NO: 62897 - protein, 404 aa, Artificial Sequence
  derived and/or modified sequence
MPRPGSAQRWAAVAGRWGCRLLALLLLVPGPGGASEITFELPDNAKQCFYEDIAQGTKCTLEFQVITGGHYDVDCRLEDPDGKVLYKEMKKQYDSFTFTASKNGTYKFCFSNEFSTFTHKTVYFDFQVGEDPPLFPSENRVSALTQMESACVSIHEALKSVIDYQTHFRLREAQGRSRAEDLNTRVAYWHSVDTSPGYHESDSKKSEDLSLCNVAEHSNTTEGPTGKQEGAQSVEEMFEEEAEEEVFLKFVILHAEDDTDEALRVQNLLQDDFGIKPGIIFAEMPCGRQHLQNLDDAVNGSAWTILLLTENFLRDTWCNFQFYTSLMNSVNRQHKYNSVIPMRPLNNPLPRERTPFALQTINALEEESRGFPTQVERIFQESVYKTQQTIWKETRNMVQRQFIA

SEQ ID NO: 62898 - protein, 188 aa, Artificial Sequence
  derived and/or modified sequence
MPRPGSAQRWAAVAGRWGCRLLALLLLVPGPGGASEITFELPDNAKQCFYEDIAQGTKCTLEFQVITGGHYDVDCRLEDPDGKVLYKEMKKQYDSFTFTASKNGTYKFCFSNEFSTFTHKTVYFDFQVGEDPPLFPSENRVSALTQMESACVSIHEALKSVIDYQTHFRLREAQGRSRAEDLNTRVAY

SEQ ID NO: 62899 - protein, 82 aa, Artificial Sequence
  derived and/or modified sequence
MPRPGSAQRWAAVAGRWGCRLLALLLLVPGPGGASEITFELPDNAKQCFYEDIAQGTKCTLEFQVITGGHYDVDCRLEDPDG

SEQ ID NO: 62900 - DNA, 1215 bp, Artificial Sequence
  derived and/or modified sequence
atgcccagacccggcagcgcccagagatgggccgccgtggccggcagatggggctgcagactgctggccctgctgctgctggtgcccggccccggcggcgccagcgagatcaccttcgagctgcccgacaacgccaagcagtgcttctacgaggacatcgcccagggcaccaagtgcaccctggagttccaggtgatcaccggcggccactacgacgtggactgcagactggaggaccccgacggcaaggtgctgtacaaggagatgaagaagcagtacgacagcttcaccttcaccgccagcaagaacggcacctacaagttctgcttcagcaacgagttcagcaccttcacccacaagaccgtgtacttcgacttccaggtgggcgaggacccccccctgttccccagcgagaacagagtgagcgccctgacccagatggagagcgcctgcgtgagcatccacgaggccctgaagagcgtgatcgactaccagacccacttcagactgagagaggcccagggcagaagcagagccgaggacctgaacaccagagtggcctactggcacagcgtggacaccagccccggctaccacgagagcgacagcaagaagagcgaggacctgagcctgtgcaacgtggccgagcacagcaacaccaccgagggccccaccggcaagcaggagggcgcccagagcgtggaggagatgttcgaggaggaggccgaggaggaggtgttcctgaagttcgtgatcctgcacgccgaggacgacaccgacgaggccctgagagtgcagaacctgctgcaggacgacttcggcatcaagcccggcatcatcttcgccgagatgccctgcggcagacagcacctgcagaacctggacgacgccgtgaacggcagcgcctggaccatcctgctgctgaccgagaacttcctgagagacacctggtgcaacttccagttctacaccagcctgatgaacagcgtgaacagacagcacaagtacaacagcgtgatccccatgagacccctgaacaaccccctgcccagagagagaacccccttcgccctgcagaccatcaacgccctggaggaggagagcagaggcttccccacccaggtggagagaatcttccaggagagcgtgtacaagacccagcagaccatctggaaggagaccagaaacatggtgcagagacagttcatcgcctag

SEQ ID NO: 62901 - DNA, 1215 bp, Artificial Sequence
  derived and/or modified sequence
atgcctagaccgggatctgcacagcggtgggcagcagtggcaggtcggtggggctgtcgactgcttgctctgctcctcctcgtgccaggccccgggggagcatctgaaatcacatttgagcttccggacaatgctaagcaatgtttttacgaggacattgcccagggtactaagtgtactctcgaatttcaggttattactggcggtcattacgacgtggattgccgcctagaagatccggacggcaaagtcctctacaaggaaatgaagaaacagtacgatagctttacgtttacagcgagtaaaaacggtacatacaaattttgtttctcgaacgagttttccacctttactcacaagacagtttacttcgattttcaggtaggggaggatccacccctgtttcctagtgagaacagagtgtctgcccttacacaaatggagtccgcatgcgtctctatccacgaagcactgaagtccgtgattgattatcagacccacttcagattgagagaggcacaaggacggagtagggcggaagacttgaacacacgggtggcatactggcactctgtggacacttctcccggttaccatgagtcggacagcaaaaaaagcgaggacctgtcactctgcaatgtggcagagcatagcaataccaccgagggacccaccggcaagcaggagggggcacaaagcgtcgaggagatgttcgaggaagaggccgaggaggaagtcttcctcaaatttgtaattctgcatgctgaggacgataccgacgaagctctgagagtacagaacttgttacaggacgatttcggaataaaacccgggatcatcttcgccgagatgccttgcgggaggcagcaccttcagaacctggatgacgctgtcaacggttccgcttggactatcttgctcctaacagaaaattttttgcgcgacacatggtgtaactttcagttctacacgtccttaatgaattccgtgaataggcaacacaaatacaattccgttatccccatgaggcctttgaataaccctctcccacgcgagcgcacaccatttgcactgcagacaattaacgcactggaggaagagtcgagaggctttccaacccaggtagagagaattttccaggagtcagtttataagacgcagcaaaccatttggaaggagacaaggaatatggtgcaacggcaattcatcgcctag

SEQ ID NO: 62902 - DNA, 1215 bp, Artificial Sequence
  derived and/or modified sequence
atgccacggccaggatcggcccagaggtgggccgcagtggctggcagatggggttgtcgactgcttgccctactgctcctcgtgccaggaccaggaggtgcctccgaaattacctttgagcttcccgataatgcaaaacaatgtttttacgaagacatcgcccaagggacaaagtgtaccctcgagtttcaggtcatcacaggtggccactatgacgtcgactgcaggctggaagatccagacggaaaagtgttgtacaaggagatgaaaaagcagtatgattcctttaccttcacagcaagtaaaaacggcacttacaagttctgcttctctaacgagttttccacatttactcataagacagtgtacttcgactttcaggttggcgaagaccctcctctctttcccagcgagaaccgcgtatctgcactcacacagatggagtccgcctgcgtttccattcacgaagctctgaagtccgttatcgactaccaaacccacttcaggctgcgggaagcccagggcagaagccgagcagaagatttaaacacacgggtggcctattggcacagcgttgacacctcaccaggctaccacgagtccgacagcaaaaagtctgaggatctgagcctgtgcaatgtggcagaacactccaatacaaccgagggccctaccggaaagcaggagggtgcacagtcagttgaagagatgttcgaagaggaggcggaggaagaagtttttctgaagtttgtgatcctacatgcggaggacgataccgacgaggctcttagagtccagaaccttttgcaggacgatttcggtattaagcctgggattatttttgcagagatgccttgcggaaggcagcatctccaaaatttggatgatgctgtaaacggttctgcctggaccatattactgctaaccgaaaatttcctccgagatacctggtgcaatttccagttctatacatctctgatgaatagcgtgaataggcagcataagtataactctgtgattccgatgcggcccctgaataatccactgcccagagaacgtactccattcgccttgcagaccataaacgctctcgaggaggagtcccgcggttttccaactcaagtcgaaaggattttccaggaatccgtgtacaagactcagcagacgatctggaaagaaactcgaaatatggtgcagcgccagttcattgcttag

SEQ ID NO: 62903 - DNA, 1215 bp, Artificial Sequence
  derived and/or modified sequence
atgccccggcccggcagcgcccagcgctgggccgctgtggccggccgctggggctgccgcctgctggccctgctgctgctggtgcccggccctggaggagccagcgagatcacctttgagctgcctgacaatgccaagcagtgcttctatgaagatattgcccagggcaccaagtgcaccctggagttccaggtgatcactggaggccactatgatgtggactgccgcctggaggaccctgatggcaaggtgctgtacaaggagatgaagaagcagtatgacagcttcaccttcaccgccagcaagaatggcacctacaagttctgcttcagcaatgagttcagcaccttcacccacaagacagtgtactttgacttccaggtgggggaggaccccccactcttccccagcgagaacagagtgtctgccctgacccagatggagagcgcctgtgtgtccatccacgaggccctgaagagcgtcatcgactaccagacccacttccggctgcgggaggcccagggccgcagcagagctgaggacctgaacaccagggtggcctactggcacagcgtggacaccagccctggctaccatgaaagtgacagcaagaagtctgaggacctgagcctgtgcaatgtggccgagcacagcaacaccacagagggccccaccgggaagcaggagggcgcccagagcgtggaggagatgtttgaggaggaggccgaggaggaggtgttcctgaagtttgtgatcctgcatgctgaagatgacacagatgaggccctgcgggtgcagaacctgctgcaggatgactttggcatcaagccaggcatcatctttgctgagatgccctgtggccggcagcacctgcagaacctggatgatgctgtgaatggaagtgcctggaccatcctgctgctgacagagaacttcctgcgggacacctggtgcaacttccagttctacaccagcctgatgaacagcgtgaaccggcagcacaagtacaacagcgtcatccccatgaggcccctgaacaaccccctgccccgggagaggaccccatttgccctgcagaccatcaatgccctggaggaggagagccggggcttccccacccaggtggagcgcatcttccaggagagcgtgtacaagacccagcagaccatctggaaggagaccaggaacatggtgcagaggcagttcatcgcctag

SEQ ID NO: 62904 - DNA, 1215 bp, Artificial Sequence
  derived and/or modified sequence
atgccccggcccggcagcgcccagcggtgggccgccgtggccggcagatgggggtgtcgcctgctggctctcctgctgctcgtcccaggccctggcggagcttctgaaattacctttgaattacctgacaatgcaaagcagtgcttctacgaagacatcgcacagggaacgaagtgcactcttgaatttcaagtaattaccggcggccattatgacgtcgattgccggctggaggatcccgacggcaaagtgctatataaagagatgaaaaaacagtatgattcctttactttcacagcaagcaagaatggcacgtataagttttgtttttccaacgagttttccacattcacacataagacagtttacttcgatttccaggtcggtgaagaccccccactcttcccttctgagaacagagtgagcgccctgactcagatggaatcggcctgcgtttctattcatgaggccctgaagtccgtgatagattatcagacacattttcggctcagagaggctcagggccgcagccgagctgaggatcttaacaccagggtcgcctattggcactcggtggacacatctccaggttaccacgagtccgactcaaaaaagtcagaagacctgtccctttgtaacgtagccgaacactccaataccaccgagggaccgacgggcaagcaagagggggcacagtctgtggaagagatgtttgaggaggaggcggaggaggaggtctttctgaaatttgtcatactacatgccgaagatgataccgatgaggcactcagagtccagaacctcctgcaggacgattttggaatcaagcctggaattattttcgccgagatgccttgcggtcgacaacatctgcagaatttggacgacgcagtgaatggcagtgcctggactattctgctgctcactgagaactttttaagggatacctggtgcaatttccaattctacacctccctcatgaattccgttaatcgccaacataagtacaactcggtgataccaatgcgcccacttaacaatccactgcctcgtgaacggacgccattcgctctgcagactatcaatgccctggaagaggagtcgaggggttttccgacacaagtcgaacggatcttccaggagagcgtttataaaacacagcagacgatttggaaggaaacgcgcaacatggtgcagagacagtttattgcatag

SEQ ID NO: 62905 - DNA, 1215 bp, Artificial Sequence
  derived and/or modified sequence
atgccccggcccggcagcgcccagcggtgggccgccgtggccggccgctggggctgtcgcctcctggctctgctgctcttagtacccggcccagggggtgcttcagagataacttttgagttgccagataatgccaagcagtgcttttatgaagatattgcccagggaaccaagtgtacccttgagtttcaggtcatcaccgggggtcactatgacgtggactgccggctcgaagaccccgatggtaaagttctgtataaggagatgaagaaacagtacgactcttttacattcaccgcatctaagaatggcacttacaagttttgtttctctaacgagttctcaacctttacccacaagactgtctattttgattttcaagtgggggaagatcctcccctctttcccagtgaaaaccgggtttcagcactgactcaaatggagagcgcctgcgtgtccatccacgaagcccttaagagtgtgatcgattatcagacccacttcagattaagagaggctcagggtcggtcccgagcagaggacctcaacacccgggtcgcctactggcactctgtggatacatcaccagggtatcacgaatcagattcaaagaagtccgaggatctgtccctttgtaatgtagccgagcattctaacacaacggagggacccacgggcaaacaagaaggtgcacagagtgtggaagagatgtttgaagaggaggctgaagaggaagtttttctgaaatttgtgatcctgcacgctgaagacgacacggacgaggcactccgcgttcaaaatcttttacaggacgatttcgggatcaagccaggaattatctttgcagaaatgccatgcggacgacaacatctacagaatctggacgatgccgtaaacggaagcgcctggactatattactgctgaccgaaaacttcttaagggacacctggtgtaactttcaattctacacatcactgatgaattccgtgaacaggcagcacaagtataattccgtgatccctatgcgcccactcaataaccccctaccacgtgaacggacgcctttcgccctgcagaccattaacgccctggaagaggaaagcaggggcttccctacccaggtggaaagaatattccaggagtctgtctacaaaacacagcagacaatctggaaggagactcgaaatatggtacagcggcaatttattgcctag

SEQ ID NO: 62906 - DNA, 1215 bp, Artificial Sequence
  derived and/or modified sequence
atgcctcggccagggtctgcccagcggtgggccgctgtagcgggaaggtgggggtgcaggctcctggccttgcttctgctggtaccaggacccggaggcgcttccgaaattacctttgagctgccagacaacgccaagcaatgcttttacgaggatatagcccagggcacaaaatgtacgctggaattccaggtgatcaccgggggacattacgacgtcgattgtcggttagaagaccccgacggtaaagttctttacaaggaaatgaagaagcagtacgatagcttcaccttcaccgcctctaagaacggcacctacaagttttgcttctctaatgagtttagcactttcacacacaaaaccgtgtatttcgactttcaggtgggggaagatcctcctctgtttccttctgaaaatcgtgtgagcgcattaacacagatggagtctgcctgtgtctctattcatgaagccctaaagagcgtgatcgactatcaaacacactttcgcctgagagaagcgcaaggtcgcagccgggctgaagatctcaacactcgggtagcttactggcattcagttgacacctcacccggataccatgaaagtgacagcaagaagagcgaggatttatctttgtgtaacgtggcggaacattccaacactactgaaggtccgaccggcaagcaagagggcgcacagagtgttgaagaaatgttcgaagaagaagctgaggaagaggtgttcctgaagtttgtcattctgcatgccgaggacgatacggatgaggccttgcgtgtgcagaatctgttgcaggatgattttggaatcaaaccgggaatcatatttgccgagatgccctgtggacgtcaacatcttcagaaccttgacgacgcggtgaatgggagcgcctggacaattcttctcctgaccgaaaattttctcagagacacctggtgtaacttccagttctataccagtctcatgaactctgtgaatcgccaacacaaatacaacagtgttatccctatgagacccctgaacaatccattaccccgagagcggactcctttcgccctccaaaccattaatgctttggaagaagaatcaagaggtttccctacacaggtggagcgcatttttcaggaatcagtttataaaacccagcagacaatttggaaggagactagaaatatggttcaacggcagttcattgcctag

SEQ ID NO: 62907 - DNA, 1215 bp, Artificial Sequence
  derived and/or modified sequence
atgccacggcctggctctgcccagcggtgggccgcagtcgcgggacgctggggatgccgtctgttggcactgctactgttagttccaggccctggcggtgcctcggaaataacatttgagctgcccgataacgcaaaacagtgtttctatgaggatattgcacaggggactaaatgcactctggagtttcaagtaataaccggcggtcactatgatgtagactgcaggctcgaggatccggatggaaaggtactgtacaaggagatgaaaaagcagtacgattccttcacctttacagctagtaaaaacggtacctataaattttgctttagtaacgaattctctactttcacccacaaaaccgtgtactttgactttcaggtgggtgaggatccccctcttttccccagcgaaaaccgcgtttcagctctgacgcagatggaatccgcttgtgtgagcatccacgaagccctgaagagtgtcatcgattaccagacccactttcggctgcgagaagcccagggtcggtcaagggccgaggacttgaacactagagtcgcctactggcactcagtcgatacttcccccggttaccacgagtcagattctaagaaaagtgaggacctgtctctatgcaatgtagccgagcacagcaacacaacagaggggcctaccgggaaacaagagggagcacagagcgtggaggagatgttcgaagaagaagcggaggaggaggtgtttctgaaattcgtgatcctgcatgctgaagacgacacagacgaggcactgcgagtacagaacctcctgcaagatgatttcgggatcaaacccggtataatcttcgctgagatgccatgtggtcgccagcacctacagaatctggacgacgccgttaacggcagtgcatggaccatactgctgctcactgagaatttcctgcgggatacatggtgcaactttcagttctacacctctctaatgaacagcgtcaataggcaacacaaatacaacagtgtcattcctatgcgaccactaaacaatccgttgcccagggagcggactccgttcgccctacaaacgattaatgctcttgaggaggagtcgagggggtttccaactcaggtggagaggatattccaggaaagtgtctacaaaactcagcaaactatttggaaggagacgagaaatatggttcaacgtcagtttatcgcatag

SEQ ID NO: 62908 - DNA, 3491 bp, Artificial Sequence
  derived and/or modified sequence
cggaggcagagccaacgcctcgcgggcttccacgtacgcactccaacgcgtgttcccggagaagaacgcatccgggtcacgggagccggtgtctcaggctccgccccttcaccccccgaaaggctaatccccacttccgaccctctcaggccttttccgcttctcttttacctccccaggtccgcccgtctgcgcccctcacaggaagccggagggtcgctctgatcccgaatctcccacaggcgtgaacctgctctgctgtgtatctttgcggggtggcctgcgctgaggcctgccgcgcgcggtgagtccgcgcagacctgaccctgcgtctcgcagctcggttgaggccgccgccgccttctcgggatgccgcggccggggtccgcgcagcgctgggcggccgtcgcgggccgttgggggtgcaggctgctcgcactgctgctactggtgcctggacccggcggcgcctctgagatcaccttcgagcttcctgacaacgccaagcagtgcttctacgaggacatcgctcagggcaccaagtgcaccctggagttccaggtgattactggtggtcactatgatgtagattgtcgattagaagatcctgatggtaaagtgttatacaaagagatgaagaaacagtatgatagttttaccttcacagcctccaaaaatgggacatacaaattttgcttcagcaatgaattttctactttcacacataaaactgtatattttgattttcaagttggagaagacccacctttgtttcctagtgagaaccgagtcagtgctcttacccagatggaatctgcctgtgtttcaattcacgaagctctgaagtctgtcatcgattatcagactcatttccgtttaagagaagctcaaggccgaagccgagcagaggatctaaatacaagagtggcctattggcacagtgtggatacaagtccaggatatcatgagtcagattccaagaagtctgaagatctatccttgtgtaatgttgctgagcacagcaatacaacagaggggccaacaggaaagcaggagggagctcagagcgtggaagagatgtttgaagaagaagctgaagaagaggtgttcctcaaatttgtgatattgcatgcagaagatgacacagatgaagccctcagagtccagaatctgctacaagatgactttggtatcaaacccggaataatctttgctgagatgccatgtggcagacagcatttacagaatttagatgatgctgtaaatgggtctgcatggacaatcttattactgactgaaaactttttaagagatacttggtgtaatttccagttctatacgtccctaatgaactccgttaacaggcagcataaatacaactctgttatacccatgcggcccctgaacaatccccttccccgagaaaggactccctttgccctccaaaccatcaatgccttagaggaagaaagtcgtggatttcctacacaagtagaaagaatttttcaggagtctgtgtataagacacaacaaactatatggaaagagacaagaaatatggtacaaagacaatttattgcctgagatgaaacatataacatgtggctggctcttgttttgtaaaccaaatgattaatcttcacttgagaaagcagtttctaggaaatgtttaaataaaagagagtcttcaccttaaagaaacctatggagcacaagaaagataaatttctgcaggacagcctataaaattgtggtactttttgatgtttcagtaaacttgacattgtcagagtttcaaggacttttctttcacaattttcctagttcatggatatgaaaaaggaattctcaatccatattccttgtattgaaccttgaacaaaaacttgtatgacagacatttttaaaaatgtgacaacacttttattctctgaattttgatctcaaaggacacagaaaaaaaatggccccaggagatctgatcacacttcctcctgaggcacctctcatggatgttgcaataagcattcgggtactatcacccagaaatatgaattgccagaatagaacatttagcatgttaagcgttgatgcatataaaatcagaaatagatgtgagaatggtggaactttttaaaagaacccagtcaaatgtattttctgctgaaatctgcatatttggaggcatttcccaccaccgattcacagcccatttgatagtgtggtagttagggacttcgtggagtggtgttcagacgtcccctggggcttaaatctcttcatattagtcatcatttgtaactatggctttatttgcagagcttctaaaaggcgtataactgtgtgagtggccagatattcactttttaaatcaaaaacctctcttatggaagctttaaaagtttccgtcacacacaattctcttctcaggaagtatttctcatttaggtcttcaaagtagcctgactgtgtgcatgtgtgtgtgtgataggttatttataaagactttggatagaaggagatgtattttattacctcctattctagagccccatgctcctaacaagccagagaggccccaaacaggattgtttctttcctccacagcccttctgcccatctgagattgagggagcatcgtccacttgagatcagggatggggtggagaatgggtcatgtcatgtaatgagaaaagccctcttcgggatcatgagacttggttctagtccaatttctgccactgaggatgaatgtaactgtgggcaaactatttaccctcctttatctgtgaaatgaaagggttgaattgatggatctctaaaggcttttgtcctctatgaggatgtgaaaaactagggaccacaaaagggaacaagcaaaaaagtttggattcgataaagtgatatgtaatagttgcagaaggctttatatatgcttataatgaaaagatattttttgtatattgacagcataatttatttttaatgctgtcattacacttaaagtcacaggaaaaaaatatacatgcttactcaggctttcttaaaaataaatttttatagagatccttgagtaaagacattttgcttaatttcttttttcttattccccacttgtatatcccctaccagtaccgggatctgcacacatctttttgcagttacctcttcatagccatgaaccaaaacgttctatgaggagcatgcaagtaagtcaagcctcctattctgttagtacttattagaggaggagatggttttcattgcatagtgacattttcttagccttaacgttctgatagtagcttactactcacttctctttttcagttttcataataagtattcatttttttgccataatgcttcctgtaaagccaattttatatactaataaaacatgaactgcccactcttcatgcctgccaaacttggggcaattgatgctaaatggtatttttaaaataaatgtttttattctttactcttga

SEQ ID NO: 62909 - DNA, 3453 bp, Artificial Sequence
  derived and/or modified sequence
aggccttttccgcttctcttttacctccccaggtccgcccgtctgcgcccctcacaggaagccggagggtcgctctgatcccgaatctcccacaggcgtgaacctgctctgctgtgtatctttgcggggtggcctgcgctgaggcctgccgcgcgcggtgagtccgcgcagacctgaccctgcgtctcgcagctcggttgaggccgccgccgccttctcgggatgccgcggccggggtccgcgcagcgctgggcggccgtcgcgggccgttgggggtgcaggctgctcgcactgctgctactggtgcctggacccggcggcgcctctgagatcaccttcgagcttcctgacaacgccaagcagtgcttctacgaggacatcgctcagggcaccaagtgcaccctggagttccaggtgattactggtggtcactatgatgtagattgtcgattagaagatcctgatggtaaagtgttatacaaagagatgaagaaacagtatgatagttttaccttcacagcctccaaaaatgggacatacaaattttgcttcagcaatgaattttctactttcacacataaaactgtatattttgattttcaagttggagaagacccacctttgtttcctagtgagaaccgagtcagtgctcttacccagatggaatctgcctgtgtttcaattcacgaagctctgaagtctgtcatcgattatcagactcatttccgtttaagagaagctcaaggccgaagccgagcagaggatctaaatacaagagtggcctattgattgaaaagaaatgctgagaaatacataaagttttcctcttctgccttggatatttataatgggtatcgggaagtctaaaataaattcctgccctctttctctctcttggggtaaaaggcacagtgtggatacaagtccaggatatcatgagtcagattccaagaagtctgaagatctatccttgtgtaatgttgctgagcacagcaatacaacagaggggccaacaggaaagcaggagggagctcagagcgtggaagagatgtttgaagaagaagctgaagaagaggtgttcctcaaatttgtgatattgcatgcagaagatgacacagatgaagccctcagagtccagaatctgctacaagatgactttggtatcaaacccggaataatctttgctgagatgccatgtggcagacagcatttacagaatttagatgatgctgtaaatgggtctgcatggacaatcttattactgactgaaaactttttaagagatacttggtgtaatttccagttctatacgtccctaatgaactccgttaacaggcagcataaatacaactctgttatacccatgcggcccctgaacaatccccttccccgagaaaggactccctttgccctccaaaccatcaatgccttagaggaagaaagtcgtggatttcctacacaagtagaaagaatttttcaggagtctgtgtataagacacaacaaactatatggaaagagacaagaaatatggtacaaagacaatttattgcctgagatgaaacatataacatgtggctggctcttgttttgtaaaccaaatgattaatcttcacttgagaaagcagtttctaggaaatgtttaaataaaagagagtcttcaccttaaagaaacctatggagcacaagaaagataaatttctgcaggacagcctataaaattgtggtactttttgatgtttcagtaaacttgacattgtcagagtttcaaggacttttctttcacaattttcctagttcatggatatgaaaaaggaattctcaatccatattccttgtattgaaccttgaacaaaaacttgtatgacagacatttttaaaaatgtgacaacacttttattctctgaattttgatctcaaaggacacagaaaaaaaatggccccaggagatctgatcacacttcctcctgaggcacctctcatggatgttgcaataagcattcgggtactatcacccagaaatatgaattgccagaatagaacatttagcatgttaagcgttgatgcatataaaatcagaaatagatgtgagaatggtggaactttttaaaagaacccagtcaaatgtattttctgctgaaatctgcatatttggaggcatttcccaccaccgattcacagcccatttgatagtgtggtagttagggacttcgtggagtggtgttcagacgtcccctggggcttaaatctcttcatattagtcatcatttgtaactatggctttatttgcagagcttctaaaaggcgtataactgtgtgagtggccagatattcactttttaaatcaaaaacctctcttatggaagctttaaaagtttccgtcacacacaattctcttctcaggaagtatttctcatttaggtcttcaaagtagcctgactgtgtgcatgtgtgtgtgtgataggttatttataaagactttggatagaaggagatgtattttattacctcctattctagagccccatgctcctaacaagccagagaggccccaaacaggattgtttctttcctccacagcccttctgcccatctgagattgagggagcatcgtccacttgagatcagggatggggtggagaatgggtcatgtcatgtaatgagaaaagccctcttcgggatcatgagacttggttctagtccaatttctgccactgaggatgaatgtaactgtgggcaaactatttaccctcctttatctgtgaaatgaaagggttgaattgatggatctctaaaggcttttgtcctctatgaggatgtgaaaaactagggaccacaaaagggaacaagcaaaaaagtttggattcgataaagtgatatgtaatagttgcagaaggctttatatatgcttataatgaaaagatattttttgtatattgacagcataatttatttttaatgctgtcattacacttaaagtcacaggaaaaaaatatacatgcttactcaggctttcttaaaaataaatttttatagagatccttgagtaaagacattttgcttaatttcttttttcttattccccacttgtatatcccctaccagtaccgggatctgcacacatctttttgcagttacctcttcatagccatgaaccaaaacgttctatgaggagcatgcaagtaagtcaagcctcctattctgttagtacttattagaggaggagatggttttcattgcatagtgacattttcttagccttaacgttctgatagtagcttactactcacttctctttttcagttttcataataagtattcatttttttgccataatgcttcctgtaaagccaattttatatactaataaaacatgaactgcccactcttcatgcctgccaaacttggggcaattgatgctaaatggtatttttaaaataaatgtttttattctt

SEQ ID NO: 62910 - DNA, 3509 bp, Artificial Sequence
  derived and/or modified sequence
cctcgtcccaggctgcaacggaggcagagccaacgcctcgcgggcttccacgtacgcactccaacgcgtgttcccggagaagaacgcatccgggtcacgggagccggtgtctcaggctccgccccttcaccccccgaaaggctaatccccacttccgaccctctcaggccttttccgcttctcttttacctccccaggtccgcccgtctgcgcccctcacaggaagccggagggtcgctctgatcccgaatctcccacaggcgtgaacctgctctgctgtgtatctttgcggggtggcctgcgctgaggcctgccgcgcgcggtgagtccgcgcagacctgaccctgcgtctcgcagctcggttgaggccgccgccgccttctcgggatgccgcggccggggtccgcgcagcgctgggcggccgtcgcgggccgttgggggtgcaggctgctcgcactgctgctactggtgcctggacccggcggcgcctctgagatcaccttcgagcttcctgacaacgccaagcagtgcttctacgaggacatcgctcagggcaccaagtgcaccctggagttccaggtgattactggtggtcactatgatgtagattgtcgattagaagatcctgatggtaaagtgttatacaaagagatgaagaaacagtatgatagttttaccttcacagcctccaaaaatgggacatacaaattttgcttcagcaatgaattttctactttcacacataaaactgtatattttgattttcaagttggagaagacccacctttgtttcctagtgagaaccgagtcagtgctcttacccagatggaatctgcctgtgtttcaattcacgaagctctgaagtctgtcatcgattatcagactcatttccgtttaagagaagctcaaggccgaagccgagcagaggatctaaatacaagagtggcctattggcacagtgtggatacaagtccaggatatcatgagtcagattccaagaagtctgaagatctatccttgtgtaatgttgctgagcacagcaatacaacagaggggccaacaggaaagcaggagggagctcagagcgtggaagagatgtttgaagaagaagctgaagaagaggtgttcctcaaatttgtgatattgcatgcagaagatgacacagatgaagccctcagagtccagaatctgctacaagatgactttggtatcaaacccggaataatctttgctgagatgccatgtggcagacagcatttacagaatttagatgatgctgtaaatgggtctgcatggacaatcttattactgactgaaaactttttaagagatacttggtgtaatttccagttctatacgtccctaatgaactccgttaacaggcagcataaatacaactctgttatacccatgcggcccctgaacaatccccttccccgagaaaggactccctttgccctccaaaccatcaatgccttagaggaagaaagtcgtggatttcctacacaagtagaaagaatttttcaggagtctgtgtataagacacaacaaactatatggaaagagacaagaaatatggtacaaagacaatttattgcctgagatgaaacatataacatgtggctggctcttgttttgtaaaccaaatgattaatcttcacttgagaaagcagtttctaggaaatgtttaaataaaagagagtcttcaccttaaagaaacctatggagcacaagaaagataaatttctgcaggacagcctataaaattgtggtactttttgatgtttcagtaaacttgacattgtcagagtttcaaggacttttctttcacaattttcctagttcatggatatgaaaaaggaattctcaatccatattccttgtattgaaccttgaacaaaaacttgtatgacagacatttttaaaaatgtgacaacacttttattctctgaattttgatctcaaaggacacagaaaaaaaatggccccaggagatctgatcacacttcctcctgaggcacctctcatggatgttgcaataagcattcgggtactatcacccagaaatatgaattgccagaatagaacatttagcatgttaagcgttgatgcatataaaatcagaaatagatgtgagaatggtggaactttttaaaagaacccagtcaaatgtattttctgctgaaatctgcatatttggaggcatttcccaccaccgattcacagcccatttgatagtgtggtagttagggacttcgtggagtggtgttcagacgtcccctggggcttaaatctcttcatattagtcatcatttgtaactatggctttatttgcagagcttctaaaaggcgtataactgtgtgagtggccagatattcactttttaaatcaaaaacctctcttatggaagctttaaaagtttccgtcacacacaattctcttctcaggaagtatttctcatttaggtcttcaaagtagcctgactgtgtgcatgtgtgtgtgtgataggttatttataaagactttggatagaaggagatgtattttattacctcctattctagagccccatgctcctaacaagccagagaggccccaaacaggattgtttctttcctccacagcccttctgcccatctgagattgagggagcatcgtccacttgagatcagggatggggtggagaatgggtcatgtcatgtaatgagaaaagccctcttcgggatcatgagacttggttctagtccaatttctgccactgaggatgaatgtaactgtgggcaaactatttaccctcctttatctgtgaaatgaaagggttgaattgatggatctctaaaggcttttgtcctctatgaggatgtgaaaaactagggaccacaaaagggaacaagcaaaaaagtttggattcgataaagtgatatgtaatagttgcagaaggctttatatatgcttataatgaaaagatattttttgtatattgacagcataatttatttttaatgctgtcattacacttaaagtcacaggaaaaaaatatacatgcttactcaggctttcttaaaaataaatttttatagagatccttgagtaaagacattttgcttaatttcttttttcttattccccacttgtatatcccctaccagtaccgggatctgcacacatctttttgcagttacctcttcatagccatgaaccaaaacgttctatgaggagcatgcaagtaagtcaagcctcctattctgttagtacttattagaggaggagatggttttcattgcatagtgacattttcttagccttaacgttctgatagtagcttactactcacttctctttttcagttttcataataagtattcatttttttgccataatgcttcctgtaaagccaattttatatactaataaaacatgaactgcccactcttcatgcctgccaaacttggggcaattgatgctaaatggtatttttaaaataaatgtttttattctttactcttga

SEQ ID NO: 62911 - DNA, 567 bp, Artificial Sequence
  derived and/or modified sequence
atgcccagacccggcagcgcccagagatgggccgccgtggccggcagatggggctgcagactgctggccctgctgctgctggtgcccggccccggcggcgccagcgagatcaccttcgagctgcccgacaacgccaagcagtgcttctacgaggacatcgcccagggcaccaagtgcaccctggagttccaggtgatcaccggcggccactacgacgtggactgcagactggaggaccccgacggcaaggtgctgtacaaggagatgaagaagcagtacgacagcttcaccttcaccgccagcaagaacggcacctacaagttctgcttcagcaacgagttcagcaccttcacccacaagaccgtgtacttcgacttccaggtgggcgaggacccccccctgttccccagcgagaacagagtgagcgccctgacccagatggagagcgcctgcgtgagcatccacgaggccctgaagagcgtgatcgactaccagacccacttcagactgagagaggcccagggcagaagcagagccgaggacctgaacaccagagtggcctactag

SEQ ID NO: 62912 - DNA, 249 bp, Artificial Sequence
  derived and/or modified sequence
atgcccagacccggcagcgcccagagatgggccgccgtggccggcagatggggctgcagactgctggccctgctgctgctggtgcccggccccggcggcgccagcgagatcaccttcgagctgcccgacaacgccaagcagtgcttctacgaggacatcgcccagggcaccaagtgcaccctggagttccaggtgatcaccggcggccactacgacgtggactgcagactggaggaccccgacggctag

SEQ ID NO: 62913 - DNA, 567 bp, Artificial Sequence
  derived and/or modified sequence
atgcctcgcccgggatctgcgcagaggtgggccgccgttgccgggcgttggggatgtcgcctgctggccctgctgctgttggtccctggacccggcggagcgtccgaaataaccttcgaactgcctgacaatgccaagcagtgcttttatgaagacattgcccaaggcacaaagtgtaccctggaattccaggtcattacaggcggtcactatgacgttgattgcagactggaagaccccgatggcaaggtgctgtataaggagatgaaaaagcagtacgacagtttcacattcaccgcttctaagaacggaacctacaagttctgcttttccaacgaattctccaccttcacccataagactgtctattttgattttcaggtcggtgaagatccaccccttttcccaagcgagaaccgcgtctccgcccttacccaaatggagtccgcttgtgttagtatccacgaggctctcaagagtgtgattgactaccagacccacttccgccttagggaggcccagggtaggtctagggcagaagatctcaacacccgtgtagcctattag

SEQ ID NO: 62914 - DNA, 249 bp, Artificial Sequence
  derived and/or modified sequence
atgcctcgcccagggtccgcccagaggtgggccgctgtggcagggaggtgggggtgcaggttgctcgcccttctcttgctagtgcccgggccaggcggagcatcagaaatcacttttgaattaccggataatgccaaacagtgtttctacgaggacatcgctcaaggcaccaaatgcactctggaatttcaggtaattacagggggccactatgacgtggattgccgtctggaggaccccgacggctag

SEQ ID NO: 62915 - DNA, 567 bp, Artificial Sequence
  derived and/or modified sequence
atgccccggcccggcagcgcccagcgctgggccgctgtggccggccgctggggctgccgcctgctggccctgctgctgctggtgcccggccctggaggagccagcgagatcacctttgagctgcctgacaatgccaagcagtgcttctatgaagatattgcccagggcaccaagtgcaccctggagttccaggtgatcactggaggccactatgatgtggactgccgcctggaggaccctgatggcaaggtgctgtacaaggagatgaagaagcagtatgacagcttcaccttcaccgccagcaagaatggcacctacaagttctgcttcagcaatgagttcagcaccttcacccacaagacagtgtactttgacttccaggtgggggaggaccccccactcttccccagcgagaacagagtgtctgccctgacccagatggagagcgcctgtgtgtccatccacgaggccctgaagagcgtcatcgactaccagacccacttccggctgcgggaggcccagggccgcagcagagctgaggacctgaacaccagggtggcctactag

SEQ ID NO: 62916 - DNA, 249 bp, Artificial Sequence
  derived and/or modified sequence
atgccccggcccggcagcgcccagcgctgggccgctgtggccggccgctggggctgccgcctgctggccctgctgctgctggtgcccggccctggaggagccagcgagatcacctttgagctgcctgacaatgccaagcagtgcttctatgaagatattgcccagggcaccaagtgcaccctggagttccaggtgatcactggaggccactatgatgtggactgccgcctggaggaccctgatggatag

SEQ ID NO: 62917 - DNA, 567 bp, Artificial Sequence
  derived and/or modified sequence
atgccccggcccggcagcgcccagcggtgggccgccgtggccggccgctggggctgccggctattagctctgctgctgctggtccctggcccgggaggcgcaagcgagattacatttgagctgcccgacaatgccaaacagtgtttctacgaagatatcgcccaagggacaaaatgtaccctggagtttcaggtgattacagggggccactacgatgtggactgtagactggaagatccagatggtaaagtgctctataaagaaatgaaaaaacagtacgatagttttacattcactgcatctaaaaacgggacttataagttctgcttcagcaacgaattttcgaccttcacacacaaaacagtttacttcgatttccaggtaggcgaggacccaccgctgttcccctctgagaatagagtgagcgccctgacacagatggaaagcgcatgtgttagtattcacgaggcattgaaaagtgtgatcgactaccagacccacttccggctaagggaggcccagggtaggagccgcgccgaggatttaaacactagagtggcgtactag

SEQ ID NO: 62918 - DNA, 249 bp, Artificial Sequence
  derived and/or modified sequence
atgccccggcccggcagcgcccagcggtgggccgccgtggccggcaggtggggctgccggctgttagccctcctattactcgtaccaggtcccggtggagcctccgagataactttcgagctccctgataacgctaagcaatgcttctatgaggacatcgcccaggggaccaaatgtaccctggaatttcaagtaattacaggaggtcattacgatgtggattgtcgcctggaagatcccgatggctag

SEQ ID NO: 62919 - DNA, 567 bp, Artificial Sequence
  derived and/or modified sequence
atgccgaggccaggttcagcccagaggtgggcggcagttgccggacgatggggctgtcgactactggcactgctacttctggttcctgggcctgggggagctagcgagatcacattcgagctgccagacaatgcaaaacagtgcttctacgaggatatcgcgcagggtacaaaatgcactctggagttccaggttattacaggaggacattacgacgtcgattgtagactcgaggatcccgacgggaaggtgctgtataaagaaatgaaaaaacagtatgattcttttaccttcacggcttccaaaaacggaacatacaaattttgcttcagcaatgagttctccacattcacccacaaaaccgtctacttcgactttcaggtcggagaggatccacccctgtttccctcagaaaatagggttagcgctctcactcaaatggaaagcgcctgtgtgtccatccacgaggcgctcaagagcgtgatcgattaccagacacatttccggctgcgtgaagcgcagggcaggtctcgcgctgaggatctcaacactagagtcgcctactag

SEQ ID NO: 62920 - DNA, 249 bp, Artificial Sequence
  derived and/or modified sequence
atgcctaggccaggatcagcccagcgctgggcagctgttgcgggacggtggggttgtcggctccttgctcttttactgttagtgcccggacctgggggagcatccgaaatcacctttgagttgcctgacaatgcaaaacagtgtttctacgaggatatcgcacaaggcacgaaatgtaccctagaatttcaggtgattactgggggtcactatgacgtggactgtagattagaggacccggatggctag

SEQ ID NO: 62921 - DNA, 572 bp, Artificial Sequence
  derived and/or modified sequence
attaggaacttcatagctgcaagctaagggaatgctatccatcctgaaggattgcctattcaacaaaaggcaattggggtttgtcttattgctgcaggccttgcttctcagtcactgactgactgttgagagccaaggtccgcccgtctgcgcccctcacaggaagccggagggtcgctctgatcccgaatctcccacaggcgtgaacctgctctgctgtgtatctttgcggggtggcctgcgctgaggcctgccgcgcgcggtgagtccgcgcagacctgaccctgcgtctcgcagctcggttgaggccgccgccgccttctcgggatgccgcggccggggtccgcgcagcgctgggcggccgtcgcgggccgttgggggtgcaggctgctcgcactgctgctactggtgcctggacccggcggcgcctctgagatcaccttcgagcttcctgacaacgccaagcagtgcttctacgaggacatcgctcagggcaccaagtgcaccctggagttccaggtgattactggtggtcactatgatgtagattgtcgattagaagatcctgatgg

SEQ ID NO: 62922 - protein, 221 aa, Artificial Sequence
  derived and/or modified sequence
MMSSKPTSHAEVNETIPNPYPPSSFMAPGFQQPLGSINLENQAQGAQRAQPYGITSPGIFASSQPGQGNIQMINPSVGTAVMNFKEEAKALGFIISGSLSVSASKELSRCLVKGSLGMNIVSSILAFIGVILLLVDMCINGVAGQDYWAVLSGKGISATLMIFSLLEFFVACATAHFANQANTTTNMSVLVIPNMYESNPVTPASSSAPPRCNNYSANAPK

SEQ ID NO: 62923 - DNA, 666 bp, Artificial Sequence
  derived and/or modified sequence
atgatgtcgtctaaacctacaagccatgccgaagtgaacgagacaatcccgaacccctatccccctagttcgtttatggcgcctgggttccagcaacccctaggatcgatcaacttagaaaatcaagcgcagggcgcccaacgagctcaaccctacggtattaccagccctggtattttcgcctcgtcccagccaggccagggaaacatccaaatgattaaccccagtgtgggtacagccgtgatgaacttcaaagaggaggctaaggcacttgggtttattatctcgggaagtttgtccgtctcagcttccaaggagttatcacggtgcctggtgaaaggcagcttgggtatgaatatcgtctcatctatactggcctttatcggagtcattctgttgctggtcgacatgtgtatcaatggagtggcagggcaggattattgggctgtgctgagtgggaaaggcatttccgccactctcatgatattctccctcctggagttctttgtagcctgcgccacggcccacttcgctaatcaagctaacaccaccacaaacatgtctgtgctcgttatccccaacatgtacgaatccaacccggtcacccctgccagttcatcggctccaccgagatgcaataactatagcgcaaatgccccaaagtag

SEQ ID NO: 62924 - DNA, 666 bp, Artificial Sequence
  derived and/or modified sequence
atgatgagcagcaagcccaccagccacgccgaggtgaatgagaccatccccaacccctacccacccagcagcttcatggcccctggcttccagcagcccctgggcagcatcaacctggagaaccaggcccagggcgcccagagggcccagccctacggcatcaccagccctggcatctttgccagcagccagcccggccagggcaacatccagatgatcaaccccagcgtgggcacagctgtgatgaacttcaaggaggaggccaaggccctgggcttcatcatcagcggcagcctgtctgtgtctgccagcaaggagctgagccgctgcctggtgaagggcagcctgggcatgaacatcgtgagcagcatcctggccttcatcggggtcatcctgctgctggtggacatgtgcatcaacggggtggccggccaggactactgggccgtgctgagcggcaagggcatcagcgccaccctgatgatcttcagcctgctggagttctttgtggcctgtgccacagcccactttgccaaccaggccaacaccaccaccaacatgtctgtgctggtgatccccaacatgtatgagagcaaccctgtgaccccagccagcagcagcgccccaccccgctgcaacaactacagcgccaatgcccccaagtag

SEQ ID NO: 62925 - DNA, 1019 bp, Artificial Sequence
  derived and/or modified sequence
acacaggttggagcagagaaagaggaaacatagaggtgccaaaggaacaaagacataatgatgtcatccaagccaacaagccatgctgaagtaaatgaaaccatacccaacccttacccaccaagcagctttatggctcctggatttcaacagcctctgggttcaatcaacttagaaaaccaagctcagggtgctcagcgtgctcagccctacggcatcacatctccgggaatctttgctagcagtcaaccgggtcaaggaaatatacaaatgataaatccaagtgtgggaacagcagtaatgaactttaaagaagaagcaaaggcactagggtttattatctctggctctctctctgtgtcagcatccaaggagctttcccgttgtctggtgaaaggcagcctgggaatgaacattgttagttctatcttggccttcattggagtgattctgctgctggtggatatgtgcatcaatggggtagctggccaagactactgggccgtgctttctggaaaaggcatttcagccacgctgatgatcttctccctcttggagttcttcgtagcttgtgccacagcccattttgccaaccaagcaaacaccacaaccaatatgtctgtcctggttattccaaatatgtatgaaagcaaccctgtgacaccagcgtcttcttcagctcctcccagatgcaacaactactcagctaatgcccctaaatagtaaaagaaaaaggggtatcagtctaatctcatggagaaaaactacttgcaaaaacttcttaagaagatgtcttttattgtctacaatgatttctagtctttaaaaactgtgtttgagatttgtttttaggttggtcgctaatgatggctgtatctcccttcactgtctcttcctacattaccactactacatgctggcaaaggtgaaggatcagaggactgaaaaatgattctgcaactctcttaaagttagaaatgtttctgttcatattactttttccttaataaaatgtcatt

SEQ ID NO: 62926 - DNA, 666 bp, Artificial Sequence
  derived and/or modified sequence
atgatgagcagcaagcccaccagccacgccgaggtgaacgagaccatacccaatccctaccccccatcaagcttcatggcccccggctttcagcagccccttggctcaataaatttggagaatcaggcccagggcgcgcagcgcgctcaaccttatggcatcaccagtcctggcatcttcgccagctcacagcctggccagggaaacatccaaatgatcaaccctagcgtgggaactgctgttatgaatttcaaggaagaggctaaagctctcgggttcataattagcggctcccttagcgtctctgcttcaaaagagttgtcccggtgccttgtcaaaggctccctgggcatgaacatagtgagctccattctggcctttattggcgtaatcctcttacttgtggacatgtgtataaacggagtggccggtcaagattattgggctgtactctccggaaaggggatttccgccaccctcatgatcttttccctcctcgagttcttcgtggcttgtgctactgcacatttcgcaaaccaagccaatactactacaaacatgtctgttttggtcatccccaatatgtatgagtcaaatcctgttacccccgcgagttcatccgcaccgccgcgatgcaacaactactctgccaatgcgcctaagtag

SEQ ID NO: 62927 - DNA, 666 bp, Artificial Sequence
  derived and/or modified sequence
atgatgtcttccaaacctactagccatgctgaggttaatgaaacgataccaaatccttacccaccatcctcgttcatggctccgggattccagcagccgctgggctcaataaatctggagaatcaggcgcagggggcacagcgggctcagccctatggtattactagccctgggatttttgcctcttcccagcctggccagggtaacattcagatgattaacccctcggtcggaacagccgtgatgaatttcaaggaggaagctaaggcccttggcttcatcatctcagggtccctcagtgtgtctgctagcaaagagctgtctagatgcctggtgaagggctcgttgggaatgaacatcgttagttctatcttagcgtttatcggggtgattctactgctggtcgacatgtgtattaacggtgtggcgggacaggactattgggctgtgctgagtgggaaggggattagcgcgaccctaatgatcttctctctcctggagttcttcgtcgcctgcgccacagcgcattttgctaatcaagcaaacactacaacaaacatgtcagtattggtgatcccgaatatgtacgaatccaaccctgtgaccccagcctcatcctctgcgccaccccgttgcaacaattactcagccaatgcacccaagtag

SEQ ID NO: 62928 - DNA, 666 bp, Artificial Sequence
  derived and/or modified sequence
atgatgagcagcaagcccaccagccacgccgaggtgaacgagaccatccccaacccctacccccccagcagcttcatggcccccggcttccagcagcccctgggcagcatcaacctggagaaccaggcccagggcgcccagagagcccagccctacggcatcaccagccccggcatcttcgccagcagccagcccggccagggcaacatccagatgatcaaccccagcgtgggcaccgccgtgatgaacttcaaggaggaggccaaggccctgggcttcatcatcagcggcagcctgagcgtgagcgccagcaaggagctgagcagatgcctggtgaagggcagcctgggcatgaacatcgtgagcagcatcctggccttcatcggcgtgatcctgctgctggtggacatgtgcatcaacggcgtggccggccaggactactgggccgtgctgagcggcaagggcatcagcgccaccctgatgatcttcagcctgctggagttcttcgtggcctgcgccaccgcccacttcgccaaccaggccaacaccaccaccaacatgagcgtgctggtgatccccaacatgtacgagagcaaccccgtgacccccgccagcagcagcgccccccccagatgcaacaactacagcgccaacgcccccaagtag

SEQ ID NO: 62929 - protein, 146 aa, Artificial Sequence
  derived and/or modified sequence
MRPEGSLTYRVPERLRQGFCGVGRAAQALVELEPVNAQARKAFSRQREKMERRRKPHLDRRGAVIQSVPGFWANVIANHPQMSALITDEDEDMLSYMVSLEVEEEKHPVHLCKIMLFFRSNPYFQNKVITKEYLVNITEYRASHST

SEQ ID NO: 62930 - protein, 314 aa, Artificial Sequence
  derived and/or modified sequence
MRPEGSLTYRVPERLRQGFCGVGRAAQALVCASAKEGTAFRMEAVQEGAAGVESEQAALGEEAVLLLDDIMAEVEVVAEVEVVAEEEGLVERREEAQRAQQAVPGPGPMTPESALEELLAVQVELEPVNAQARKAFSRQREKMERRRKPHLDRRGAVIQSVPGFWANVIANHPQMSALITDEDEDMLSYMVSLEVEEEKHPVHLCKIMLFFRSNPYFQNKVITKEYLVNITEYRASHSTPIEWYPDYEVEAYRRRHHNSSLNFFNWFSDHNFAGSNKIAEILCKDLWRNPLQYYKRMKPPEEGTETSGDSQLLS

SEQ ID NO: 62931 - protein, 313 aa, Artificial Sequence
  derived and/or modified sequence
MRPEGSLTYWVPERLRQGFCGVGRAAQALVCASAKEGTAFRMEAVQEGAAGVESEQAALGEEAVLLLDDIMAEVEVVAEVEVVAEEEGLVERREEAQRAQQAVPGPGPMTPESALEELLAVQVELEPVNAQARKAFSRQREKMERSKPHLDRRGAVIQSVPGFWANVIANHPQMSALITDEDEDMLSYMVSLEVEEEKHPVHLCKIMLFFRSNPYFQNKVITKEYLVNITEYRASHSTPIEWYPDYEVEAYRRRHHNSSLNFFNWFSDHNFAGSNKIAEILCKDLWRNPLQYYKRMKPPEEGTETSGDSQLLS

SEQ ID NO: 62932 - protein, 314 aa, Artificial Sequence
  derived and/or modified sequence
MRPEGSLTYRVPERLRQGFCGVGRAAQALVCASAKEGTAFRMEAVQEGAAGVESEQAALGEEAVLLLDDIMAEVEVVAEVEVVAEEEGLVERREEAQRAQQAVPGPGPMTPESAPEELLAVQVELEPVNAQARKAFSRQREKMERRRKPHLDRRGAVIQSVPGFWANVIANHPQMSALITDEDEDMLSYMVSLEVGEEKHPVHLCKIMLFFRSNPYFQNKVITKEYLVNITEYRASHSTPIEWYPDYEVEAYRRRHHNSSLNFFNWFSDHNFAGSNKIAEILCKDLWRNPLQYYKRMKPPEEGTETSGDSQLLS

SEQ ID NO: 62933 - DNA, 945 bp, Artificial Sequence
  derived and/or modified sequence
atgagacccgagggcagcctgacctacagagtgcccgagagactgagacagggcttctgcggcgtgggcagagccgcccaggccctggtgtgcgccagcgccaaggagggcaccgccttcagaatggaggccgtgcaggagggcgccgccggcgtggagagcgagcaggccgccctgggcgaggaggccgtgctgctgctggacgacatcatggccgaggtggaggtggtggccgaggtggaggtggtggccgaggaggagggcctggtggagagaagagaggaggcccagagagcccagcaggccgtgcccggccccggccccatgacccccgagagcgccctggaggagctgctggccgtgcaggtggagctggagcccgtgaacgcccaggccagaaaggccttcagcagacagagagagaagatggagagaagaagaaagccccacctggacagaagaggcgccgtgatccagagcgtgcccggcttctgggccaacgtgatcgccaaccacccccagatgagcgccctgatcaccgacgaggacgaggacatgctgagctacatggtgagcctggaggtggaggaggagaagcaccccgtgcacctgtgcaagatcatgctgttcttcagaagcaacccctacttccagaacaaggtgatcaccaaggagtacctggtgaacatcaccgagtacagagccagccacagcacccccatcgagtggtaccccgactacgaggtggaggcctacagaagaagacaccacaacagcagcctgaacttcttcaactggttcagcgaccacaacttcgccggcagcaacaagatcgccgagatcctgtgcaaggacctgtggagaaaccccctgcagtactacaagagaatgaagccccccgaggagggcaccgagaccagcggcgacagccagctgctgagctag

SEQ ID NO: 62934 - DNA, 942 bp, Artificial Sequence
  derived and/or modified sequence
atgagacccgagggcagcctgacctactgggtgcccgagagactgagacagggcttctgcggcgtgggcagagccgcccaggccctggtgtgcgccagcgccaaggagggcaccgccttcagaatggaggccgtgcaggagggcgccgccggcgtggagagcgagcaggccgccctgggcgaggaggccgtgctgctgctggacgacatcatggccgaggtggaggtggtggccgaggtggaggtggtggccgaggaggagggcctggtggagagaagagaggaggcccagagagcccagcaggccgtgcccggccccggccccatgacccccgagagcgccctggaggagctgctggccgtgcaggtggagctggagcccgtgaacgcccaggccagaaaggccttcagcagacagagagagaagatggagagaagcaagccccacctggacagaagaggcgccgtgatccagagcgtgcccggcttctgggccaacgtgatcgccaaccacccccagatgagcgccctgatcaccgacgaggacgaggacatgctgagctacatggtgagcctggaggtggaggaggagaagcaccccgtgcacctgtgcaagatcatgctgttcttcagaagcaacccctacttccagaacaaggtgatcaccaaggagtacctggtgaacatcaccgagtacagagccagccacagcacccccatcgagtggtaccccgactacgaggtggaggcctacagaagaagacaccacaacagcagcctgaacttcttcaactggttcagcgaccacaacttcgccggcagcaacaagatcgccgagatcctgtgcaaggacctgtggagaaaccccctgcagtactacaagagaatgaagccccccgaggagggcaccgagaccagcggcgacagccagctgctgagctag

SEQ ID NO: 62935 - DNA, 945 bp, Artificial Sequence
  derived and/or modified sequence
atgaggcccgagggcagtctgacttaccgtgttccagagcgtctgcggcagggcttttgcggtgttggccgggctgcccaggccctcgtgtgcgcaagcgccaaggaagggaccgccttcaggatggaggctgtgcaggagggtgctgccggagtagaatctgaacaagctgccctcggcgaggaggccgtcttattgctggatgatatcatggcagaggtggaagtggtagctgaagtcgaagtcgtggccgaagaagagggcctcgtagaaaggagggaggaggctcagcgcgcccagcaagctgtgcccggccccggcccaatgacgcccgaatctgccctggaagaactccttgctgtccaagtcgaattagaacccgttaatgcgcaggcacggaaggctttttcccgtcagagggagaagatggagaggaggcgcaaaccacatctggacaggagaggtgctgtaattcagtccgtaccaggcttttgggccaatgtcattgccaaccaccctcaaatgtctgcgctgattacagatgaagatgaggacatgttgtcttatatggtgagcttggaagtggaggaggaaaagcatccagtacacttgtgtaagattatgctgtttttccgcagtaatccttacttccagaataaagtgattaccaaggaatatctggtcaacattaccgagtatagagcatctcattcaacccccatcgaatggtacccagactacgaagtggaagcttacaggaggaggcatcataactcctcgctcaatttctttaattggttctccgaccacaatttcgccggatctaacaaaattgctgagattctgtgcaaggacctttggcgtaacccattacaatactataagagaatgaagcctcctgaggagggcacggagacgtccggcgatagtcagttgttgtcatag

SEQ ID NO: 62936 - DNA, 942 bp, Artificial Sequence
  derived and/or modified sequence
atgcgccccgagggatctctgacttactgggtgcccgaacgcttaagacaaggtttctgtggagtcggccgcgccgcacaagccctagtgtgcgcatccgcgaaggaaggcactgcctttcgcatggaagcagtgcaggagggcgcagctggggtagaatcagaacaggctgccctcggggaggaagcggtgttattactagatgacattatggctgaggttgaggttgtcgccgaggtcgaggtagtggccgaggaagagggcctcgttgagcgacgtgaagaagcccagcgcgcacaacaggcagtgcctgggcctggccccatgacccccgagtccgccctggaagagctgctggctgttcaagtagagcttgaacccgtgaacgcccaggcacgaaaggccttttccagacagcgcgagaagatggagcgcagcaagccacatcttgatcgcagaggagcagtcattcaaagcgtgccaggcttttgggctaacgtgattgccaatcaccctcagatgtccgccctgattaccgacgaggacgaagacatgctcagctatatggtgtctcttgaggtggaggaggaaaagcaccctgtgcatctgtgtaaaatcatgcttttttttcggagtaacccctacttccagaataaggtaatcacaaaggagtatctcgtgaacataaccgagtacagagcatcacattcaactcctatcgagtggtaccctgattacgaagtcgaagcttatagaagacgccaccacaatagttcgctcaacttcttcaactggttttctgaccacaatttcgcagggagtaataaaattgccgaaatcttatgtaaagatctgtggcgaaacccacttcagtactataaaaggatgaagccccctgaggaaggaaccgaaacctccggggactcacagttactttcctag

SEQ ID NO: 62937 - DNA, 945 bp, Artificial Sequence
  derived and/or modified sequence
atgaggcctgagggcagcctgacctacagagtgcctgagcggctgcggcagggcttctgtggggtgggccgggccgcccaggccctggtgtgtgccagcgccaaggagggcacagccttcaggatggaggccgtgcaggagggcgccgccggcgtggagagcgagcaggccgccctgggggaggaggccgtgctgctgctggatgacatcatggccgaggtggaggtggtggccgaggtggaggtggtggccgaggaggagggcctggtggagcggcgggaggaggcccagagggcccagcaggccgtgcccggccctggccccatgaccccagagagcgccctggaggagctgctggccgtgcaggtggagctggagcctgtgaatgcccaggccaggaaggccttcagccggcagcgggagaagatggagaggaggaggaagccccacctggacagaagaggagctgtgatccagagcgtgcccggcttctgggccaacgtgattgccaaccacccccagatgtctgccctgatcacagatgaagatgaggacatgctgagctacatggtgtccctggaggtggaggaggagaagcaccctgtgcacctgtgcaagatcatgctgttcttccgcagcaacccctacttccagaacaaggtgatcaccaaggagtacctggtgaacatcacagagtaccgggccagccacagcacccccatcgagtggtacccagactatgaggtggaggcctacagaagaagacaccacaacagcagcctgaacttcttcaactggttcagtgaccacaactttgctggcagcaacaagattgctgagatcctgtgcaaggacctgtggaggaaccccctgcagtactacaagaggatgaagcccccagaggagggcacagagaccagcggggacagccagctgctgtcctag

SEQ ID NO: 62938 - DNA, 942 bp, Artificial Sequence
  derived and/or modified sequence
atgaggcctgagggcagcctgacctactgggtgcctgagcggctgcggcagggcttctgtggggtgggccgggccgcccaggccctggtgtgtgccagcgccaaggagggcacagccttcaggatggaggccgtgcaggagggcgccgccggcgtggagagcgagcaggccgccctgggggaggaggccgtgctgctgctggatgacatcatggccgaggtggaggtggtggccgaggtggaggtggtggccgaggaggagggcctggtggagcggcgggaggaggcccagagggcccagcaggccgtgcccggccctggccccatgaccccagagagcgccctggaggagctgctggccgtgcaggtggagctggagcctgtgaatgcccaggccaggaaggccttcagccggcagcgggagaagatggagaggagcaagccccacctggacagaagaggagctgtgatccagagcgtgcccggcttctgggccaacgtcatcgccaaccacccccagatgtctgccctgatcacagatgaagatgaggacatgctgagctacatggtgtccctggaggtggaggaggagaagcaccctgtgcacctgtgcaagatcatgctgttcttccgcagcaacccctacttccagaacaaggtgatcaccaaggagtacctggtgaacatcacagagtaccgggccagccacagcacccccatcgagtggtacccagactatgaggtggaggcctacagaagaagacaccacaacagcagcctgaacttcttcaactggttcagtgaccacaactttgctggcagcaacaagattgctgagatcctgtgcaaggacctgtggaggaaccccctgcagtactacaagaggatgaagcccccagaggagggcacagagaccagcggggacagccagctgctgtcctag

SEQ ID NO: 62939 - DNA, 945 bp, Artificial Sequence
  derived and/or modified sequence
atgcggcccgagggcagcctgacctaccgggtgcccgagcggctgcgtcagggattttgcggggtgggacgggcagcacaagcgctagtctgcgcctctgccaaagagggaacggcgttccggatggaggcagttcaggagggcgccgcgggagtggagtcagagcaggcagcccttggggaagaggctgtgttgctgctagacgacattatggccgaagtcgaggtcgtcgctgaggtagaagtggtggcagaggaggaggggttagtggagcggagagaggaagcacaaagagcccagcaggccgtcccagggcctggccccatgaccccggagtcagcgctggaagagctgctggccgtgcaggtggagctcgagcctgtgaacgcccaggccaggaaagctttctctagacagcgggaaaaaatggagaggagaagaaaaccccacctcgaccggcgcggtgctgtcatacagagtgtgcctggcttctgggcaaacgtgattgccaaccatccccagatgtccgcactaattacagatgaggatgaggacatgctgtcctatatggtgtcgctggaagttgaagaggaaaagcatcccgtgcacctctgcaagattatgttgttctttcgctccaacccgtattttcagaacaaggtcatcacaaaggaatacttggtcaatatcactgagtacagagctagtcattccacccctatagagtggtaccccgactacgaggtggaagcctacaggcgacggcatcacaatagcagtctgaacttcttcaactggttcagcgatcacaattttgcaggttcaaacaagatagctgaaatcctgtgtaaagatctgtggagaaacccgctgcagtactacaaaaggatgaagccaccggaggaaggcactgagacctcaggtgacagtcagttgctgagctag

SEQ ID NO: 62940 - DNA, 942 bp, Artificial Sequence
  derived and/or modified sequence
atgcggcccgagggcagcctgacctactgggtgcccgagcggctgcgacagggattttgcggagttggcagggctgcccaagcgcttgtgtgcgccagcgctaaagaaggaaccgctttccggatggaggccgtgcaagagggggcagccggcgttgaatccgagcaggcagcactgggtgaagaggctgtacttctgctggatgatatcatggccgaagttgaagtagtcgcagaggtggaagtggtggctgaagaagaaggtctagtggaaaggagggaagaggctcagcgagctcagcaggccgtgccaggaccggggccaatgactcccgagtccgcactcgaggaattactggctgtgcaggtagaattggaacccgttaacgctcaggcccgaaaggccttcagcaggcagcgagaaaaaatggagcggagtaagccgcaccttgatcgacggggagcggttatccaatccgtacctggcttctgggctaatgtaatagccaatcatcctcagatgtccgccctgatcacggacgaggacgaggatatgctcagctatatggtgtccctcgaggtagaggaggaaaagcacccagttcatttgtgcaagataatgctgttcttccggtcgaatccctactttcagaataaagtgatcacaaaagagtaccttgtgaatatcactgagtatagggctagtcactcaactcccatcgagtggtacccagactatgaggtggaggcataccggagaagacatcataactcttctctaaacttttttaattggttttccgatcacaactttgcgggctcaaacaagattgctgaaattctgtgtaaggatttgtggcgcaacccacttcagtattataaaaggatgaagccccctgaggaggggactgagacctctggcgatagtcaattgttgagctag

SEQ ID NO: 62941 - DNA, 945 bp, Artificial Sequence
  derived and/or modified sequence
atgcgtccggagggaagcctgacctaccgcgtcccagaacgccttcggcagggattttgtggagtcgggagggctgcccaggcgctggtgtgtgctagtgccaaggagggtacagctttccgtatggaggccgtccaggaaggcgcagccggtgtggaatcagagcaggctgccctcggagaggaagcggttttattgcttgatgatatcatggctgaggttgaagtggtggccgaggtagaagtcgtcgccgaggaggaaggactggtcgagcgaagagaagaggcccaacgagcacagcaggctgtccctggaccaggcccaatgacccctgagtctgccctggaggagctgctggcggtgcaggtcgaactggaacctgttaatgctcaggcaaggaaggcgtttagtcgacagagagagaaaatggagcggcgaaggaagccacacctcgacaggcgtggggctgtcattcagagcgtccccggattttgggctaacgtaatcgcgaaccacccgcaaatgtcagcgctgattactgacgaggacgaggatatgctgtcctacatggtctcgctcgaggtggaagaggaaaagcaccccgtgcatttatgtaagattatgttattcttccgctccaatccctactttcagaataaagtgataaccaaggagtatctggtcaacataacagagtatcgggcatctcactccacaccgatcgagtggtatccggattacgaggtcgaagcatataggagacggcaccacaactcatccctgaacttcttcaattggttttccgatcataacttcgctgggagtaacaaaatcgcggaaatcctgtgcaaggacctgtggcgtaaccccctgcagtattataaacggatgaagcctccagaagaggggactgaaacctctggcgacagccagctcctgtcatag

SEQ ID NO: 62942 - DNA, 942 bp, Artificial Sequence
  derived and/or modified sequence
atgcgaccagaaggaagcctaacttactgggtacctgagcgccttcggcaggggttttgtggcgttgggcgtgcagcccaagccctagtgtgcgcctctgcaaaagagggtaccgcatttagaatggaggctgtgcaggaaggcgcagccggtgtcgagtcagagcaggctgcactaggcgaagaggcagtattgctgctggatgatattatggccgaagtggaagtcgtggccgaagttgaggtggtagccgaggaggaagggctagtcgagagacgggaggaggcccagagggcccaacaagcagtgccaggccctggacccatgacacccgagtctgccttagaggaactcctcgccgtccaggtggaactggagccagtgaacgctcaggctcgaaaggccttctctagacagcgcgagaagatggagcggtcaaagccacacttggatcggaggggagctgtgatccagtccgttcctggcttctgggctaatgttattgcaaatcacccccagatgagtgcattgattaccgatgaggatgaagacatgctaagttacatggtgtctctggaggtggaagaggaaaaacaccccgttcatctatgtaaaatcatgctgttttttagatcaaacccatacttccagaacaaggtcattaccaaagagtatctagtgaacataactgaatatagagccagccatagcactcccatcgagtggtacccggactatgaagtggaagcgtacaggagacggcatcacaatagctctctcaattttttcaactggttcagcgaccataacttcgccggaagcaataagatcgcagaaatactttgtaaggatctgtggcggaatccgctgcagtactataaaagaatgaaaccccctgaagagggaaccgaaacgagcggggactcacaactgctgtcctag

SEQ ID NO: 62943 - DNA, 1179 bp, Artificial Sequence
  derived and/or modified sequence
ggcccttcgcgcgcagtcccttagggggcgcctggaagcccggcgcatgcgccctgagggctcgctgacctaccgggtgccagagaggctgcggcagggtttctgtggcgtgggtcgggcagcacaggccttggtgtgtgcgagtgccaaggagggcaccgccttcaggatggaggctgtacaggagggggcggccggggtggagagtgagcaggcggctttgggggaggaggcggtgctgctgttggatgacataatggcggaggtggaggtggtggcggaggtggaggtggtggcggaggaggagggcctcgtggagcggcgggaggaggcccagcgggcacagcaggctgtgcctggccctgggcccatgaccccagagtctgcactggaggagctgctggccgttcaggtggagctggagccggttaatgcccaagccaggaaggccttttctcggcagcgggaaaagatggagcggaggcgcaagccccacctagaccgcagaggcgccgtcatccagagcgtccctggcttctgggccaatgttattgcaaaccacccccagatgtcagccctgatcactgacgaagatgaagacatgctgagctacatggtcagcctggaggtggaagaagagaagcatcctgttcatctctgcaagatcatgttgttctttcggagtaacccctacttccagaataaagtgattaccaaggaatatctggtgaacatcacagaatacagggcttctcattccactccaattgagtggtatccggattatgaagtggaggcctatcgccgcagacaccacaacagcagccttaacttcttcaactggttctctgaccacaacttcgcaggatctaacaagattgctgagatcctatgtaaggacctgtggcgcaatcccctgcaatactacaagaggatgaagccacctgaagagggaacagagacgtcaggggactcccagttgttgagttgaatatgatggagcatcagattttacctaatacagcagaactcctaaaaagttacagccatatgcaggacggcagtactcagcatggtcttatgcacaggaactaaaggaaaaagagatcgagtcacaaaaattcaggaagagggggtaaatgtggattgtatggaatgaaaaataaacattctcaagga

SEQ ID NO: 62944 - DNA, 1129 bp, Artificial Sequence
  derived and/or modified sequence
atgcgccctgagggctcgctgacctactgggtgccagagaggctgcggcagggtttctgtggcgtgggtcgggcagcacaggccttggtgtgtgcgagtgccaaggagggcaccgccttcaggatggaggctgtacaggagggggcggccggggtggagagtgagcaggcggctttgggggaggaggcggtgctgctgttggatgacataatggcggaggtggaggtggtggcggaggtggaggtggtggcggaggaggagggcctcgtggagcggcgggaggaggcccagcgggcacagcaggctgtgcctggccctgggcccatgaccccagagtctgcactggaggagctgctggccgttcaggtggagctggagccggttaatgcccaagccaggaaggccttttctcggcagcgggaaaagatggagcggagcaagccccacctagaccgcagaggcgccgtcatccagagcgtccctggcttctgggccaatgttattgcaaaccacccccagatgtcagccctgatcactgacgaagatgaagacatgctgagctacatggtcagcctggaggtggaagaagagaagcatcctgttcatctctgcaagatcatgttgttctttcggagtaacccctacttccagaataaagtgattaccaaggaatatctggtgaacatcacagaatacagggcttctcattccactccaattgagtggtatccggattatgaagtggaggcctatcgccgcagacaccacaacagcagccttaacttcttcaactggttctctgaccacaacttcgcaggatctaacaagattgctgagatcctatgtaaggacctgtggcgcaatcccctgcaatactacaagaggatgaagccacctgaagagggaacagagacgtcaggggactcccagttgttgagttgaatatgatggagcatcagattttacctaatacagcagaactcctaaaaagttacagccatatgcaggacggcagtactcagcatggtcttatgcacaggaactaaaggaaaaagagatcgagtcacaaaaattcaggaagagggggtaaatgtggattgtatggaatgaaaaataaacattctcaagg

SEQ ID NO: 62945 - protein, 115 aa, Artificial Sequence
  derived and/or modified sequence
MLWFQGNSMQLARSSFGLFLRNCSASKTTLPVLTLFTKDPCPLCDEAKEVLKPYENRFILQEVNITLPENSVWYERYKFDIPVFHLNGQFLMMHRVNTSKLEKQLLKLEQQSTGG

SEQ ID NO: 62946 - DNA, 966 bp, Artificial Sequence
  derived and/or modified sequence
ggcgcagggcggaagcagaggcgttggcggcgtgaggctcaggactgtacatcagaggaagccaaaagccagctggaatacttcctgaatacagttttaatcttgtttgcaattatttcgaaggggagaaatcatctggatcagaattaagatgctctggtttcaaggaaatagcatgcaacttgccagatcctcctttggactcttcttgagaaattgctctgcctctaagacaactctgcctgtgttgaccttattcacaaaggacccatgccccctttgtgatgaagccaaggaagtactcaagccttatgaaaacaggttcattttacaggaggtgaacatcacacttccagaaaactctgtctggtatgaaaggtataaatttgatattcctgtctttcacttgaatggccagtttctgatgatgcatcgagtaaacacctcaaaacttgaaaaacagctcctgaaacttgagcagcaaagtactggaggctgactgatgccctcatgattttccaccctctcttcccataaagcatcttcctaaggaaatgaccatggcctgatactcattttgtcacttgtacagagccctaaggatgttctgaattcagtggtgccaaataaatgttgacattccccttttggttgatggaagtatcagtgtgggaactgtttgcttaatggcattttataaaataagaagagcatattagcagggagggagatgatggagggagggagaagtccatttgtcttatttatcctttttgtattaatagagaagcacttcacagtcactgggcaatgccatttataggaagaaggttctgcattcctgctgctgccccggagggcttaactttttaatgaaagaataaatgctcttccactcagtagataaagtgaaatgtgaattgttaataactgtgcacggtcaataaagcgatgttttaaggaata

SEQ ID NO: 62947 - DNA, 348 bp, Artificial Sequence
  derived and/or modified sequence
atgctgtggttccagggcaacagcatgcagctggccagaagcagcttcggcctgttcctgagaaactgcagcgccagcaagaccaccctgcccgtgctgaccctgttcaccaaggacccctgccccctgtgcgacgaggccaaggaggtgctgaagccctacgagaacagattcatcctgcaggaggtgaacatcaccctgcccgagaacagcgtgtggtacgagagatacaagttcgacatccccgtgttccacctgaacggccagttcctgatgatgcacagagtgaacaccagcaagctggagaagcagctgctgaagctggagcagcagagcaccggcggctag

SEQ ID NO: 62948 - DNA, 348 bp, Artificial Sequence
  derived and/or modified sequence
atgctgtggttccagggcaacagtatgcagttggcgaggtccagcttcgggttgtttttgaggaattgttccgcatcgaagaccactctcccagtgctcacattattcaccaaggatccttgtccactttgtgacgaggctaaggaggtgctgaagccctatgagaacagatttattttacaggaggtgaacatcacgctaccagagaacagtgtgtggtatgagagatataagtttgacatacctgtcttccacctgaacggccaatttctgatgatgcatagggtgaatacctccaagcttgagaagcaactgctgaagcttgagcagcaaagcacaggcggatag

SEQ ID NO: 62949 - DNA, 348 bp, Artificial Sequence
  derived and/or modified sequence
atgctgtggttccagggcaacagcatgcagctggcccggagcagctttggcctcttcctgaggaactgcagcgccagcaagaccaccctgcctgtgctgaccctcttcaccaaggacccctgccccctgtgtgatgaggccaaggaggtgctgaagccctatgaaaatcgcttcatcctgcaggaggtgaacatcaccctgcctgaaaattctgtgtggtatgaaagatacaagtttgacatccctgtgttccacctgaatggccagttcctgatgatgcaccgggtgaacaccagcaagctggagaagcagctgctgaagctggagcagcagagcactggaggatag

SEQ ID NO: 62950 - DNA, 348 bp, Artificial Sequence
  derived and/or modified sequence
atgctgtggttccagggcaacagcatgcagctggcccggagcagcttcggtctctttttacggaactgtagtgctagcaagactacactccccgttctcaccttgttcaccaaagacccatgtccgctttgcgacgaggccaaagaagtcctgaaaccctatgaaaacaggtttattttacaggaggtgaacatcacccttccagaaaattctgtctggtatgagaggtataaatttgacatcccagtgtttcacctgaatggccagtttctgatgatgcatcgagtgaacacctcaaaactggagaagcagctattgaaactcgagcagcagtccaccggtggctag

SEQ ID NO: 62951 - DNA, 348 bp, Artificial Sequence
  derived and/or modified sequence
atgctgtggtttcagggaaactccatgcagctggcacgatcttcatttggcctgttcctcaggaactgcagtgcttccaagaccacactgcccgtcctcactttgtttacaaaggatccctgccccctgtgtgatgaggccaaggaagtgctgaagccatacgaaaatcgcttcattctgcaggaggtgaacattacgcttcctgagaactccgtatggtacgaacgttataagtttgacattcctgttttccatctgaacggccagttcctgatgatgcacagggtgaacacatccaaattggagaagcagttactgaaacttgagcaacagagtacaggcggatag

SEQ ID NO: 62952 - protein, 138 aa, Artificial Sequence
  derived and/or modified sequence
MLWFQGNSMQLARSSFGLFLRNCSASKTTLPVLTLFTKDPCPLCDEAKEVLKPYENRQPYKDQKLPGTRRRRSPSSPSHPHMASQSGKRYNLTLNQVLSFDYDMGLDAPKTISSDCGAFYCLRMFKSPDMTCCFYPKQ

SEQ ID NO: 62953 - DNA, 5680 bp, Artificial Sequence
  derived and/or modified sequence
ggcgcagggcggaagcagaggcgttggcggcgtgaggctcaggactgtacatcagaggaagccaaaagccagctggaatacttcctgaatacagttttaatcttgtttgcaattatttcgaaggggagaaatcatctggatcagaattaagatgctctggtttcaaggaaatagcatgcaacttgccagatcctcctttggactcttcttgagaaattgctctgcctctaagacaactctgcctgtgttgaccttattcacaaaggacccatgccccctttgtgatgaagccaaggaagtactcaagccttatgaaaacaggcaaccctacaaggatcagaagctgccaggaacaaggagaagacgctccccttcctcaccttcccacccccacatggcttctcagtcggggaaaagatacaacttaactttaaaccaagtcttaagttttgattatgacatgggattagatgcaccaaaaacaatttcaagtgactgtggggcattctattgcctgagaatgttcaagagtcctgatatgacctgttgtttttatcctaaacagtgaaaaattcatccaccaaatatataggaatagagggagacagaaagatgctttctgaaggtatcccatatttagagtattggttacatatacctaatgttggttttaacctatagctcttcaataaacttactcatcaattcttatttcagagaggaatatggtcatgtgactaggaatcctgcagatcttcagcaaacccatgggtcccaacagctggcaaaatgaaaggtagatacctacaaacatggcatctaaaaggtggtttgattatcccactgtcaagtatcagtgttatgtcacctattactgtgattttcatgtgatgtttgtagcagcaattacttttcctttctgaaattatgtttgcaaagatcaatttgtttttatataaagattaactttgatataagaagctcatcattcacctccaaaggaaaaggtgatacaagcttcctttttttcccccttcaagctaatgccttatgaaggagtggaatagtttgggacttcatattgctgctctagaatagtgcctctttcttccacatgtctcttcataacattatgagcttactggaacacatagctctttggccagtttattgcacgaaacaagggtatactcagactggggttttttaaataatgcagcaatctcatggacatctgacagtaggaatcacaatacagccaggcttcagaagtacaattaaagaaccacccaaaactgaaacatcacccttctcacagtgccttggcttattttcttccttgttctctcctggctcacagctcccctgcttacacacactatctgcttcctcatagctgcagcctgcttatgcccatcattactgctaacctttctgttcagcaatacagcaccctgagcctctcaggcttctctattctgaaatcctaaaaggaattttactcagcttatattttacaaccaggcacccatgacctaagttggctgaccaaatctatagaaggagccacctttaggacagaagcctatccctgggccaactggctatggaagcggtatgcaaatcacagtcactgcccactggcagaggccagaagcaggacaggcaatgaccagcaactctggcacgcctccaaaaagcttaagaatgtgacattctaccatactcaagagaagtcaggagggacacattggtaagttcacttatatcctactccataggagtaataaggacatgaaccaaagcaatgggagtcagacagaaagagatatcaggagatatttaggagtgaggttgacaaaacttcatgactgactggatgggtcggtagtgatgtggagaggggagtagagagaaagcatggattctgggataactcccagttttcttgcttacactactgggtgaattctgatactttttattccctgaggcagagaatgtaagaggaaggaaaagttagttttgggctgtgcttggtggatgggaaaggtaagacatggtgaattctccatgcttgtgggatatcaaggtaaagataaaagttagaagtgcaaaacaaaggtctggggttaaggtatacatttgagagcccactgagtatggttggaaatgtggccacctggcatataaggagaaaagcaagctattcccaaaccatggagaatactaatcttgacccatgagaatagaggaagttgctagtgaaggaaaatgagagagtggtggtggaactaggaatgggagaagctcatccaatttacattacgtgatgccttttgtgatttgatagtggcaggtattattccaagcactggggataaaacaacaaacaagatagccaggattcctactctcagagtcttgcattttaagggagagacagacaataaagatatcgtatcagaggaaaataatcatgaaagtcagggaggagcttttcccagagtaactgacagtatcaaatagcaagagagttaggatgaggactgaacagaagacatcagatttgaaaattagaaaatcagtgctgctataggaagaatagtccccaaagatacccaggtcctaattcctggaacctgtcacttatatgcataaaggactttgcagatttaagttaaggatcttgagatgggaaaattatattgcattatctaagcaggtcctaatgtaatcacaggtgtctctataagagggagtcagaaggagatttgactagggtaaagagagtaggaaattcgacaatggaagcaaaaggttggagtgatacaagaaagcagccatgagccaaggaatgtgaatggcctccagaagctaagaaaagaaaaagaaaacagattatcccctatagcctcccgaaggagcaagccctgctgacacgtttactttagttctgtgaaactgatttctgacttctggcctatagaactatgagagaataaatttgtgttgttttaagccaagtttgtgataatttggtacagcagcaatagaaaatgaatacaaatgtttccttgaccttattgagaacaacttttgtggagagggaagaggtaaactaaaagaaaattgtggtgggatgataactgaaagatacagaaaagacagcaaagtatccattttttaggaagtttttatatatctcatttgacccactaagaaacgacatccagaaaggagctaaagaccagaggtaattgattagctcagcacccaaaaatggcaggcagtgttggggcagtactagaatgaggtagccggccgggcacggtggctcatgcctgtaatgccagctctcagggaggcaagaggtgggagtatagcttgagcccaggagttcgagacctgcctgggcaatatagcaagaccccgttctccagaaaaaggaaaaaaaaaaaaaaaaaagcatagaatgaggtagccataacattctacctggcttttggctgaattgtggggaggagagttcagaggcctcaaaagtgaccctgacactggagagtaaaccatagtaacccattatagtccacagatatgcgcaccagacccatgactcttgttcaccatagagacaggatactttgatgctgtgacccaaaatcctgcacctggaacagatttggtacctctctattgacacagaaattcatgttgagcatggagacataatcaagagagaatggcctcattcgatcggtcttcagcttaggcactgacattttgcattttacctcctctctcaggttcaaagatgactaccaaagctaaacctctgaattctaaagtctacaaggacataaagcttcagggaaaggggaaatattaatattaatattaatgtcatacaaaagaggagaagcagcacataggagtgccagctaatagactagtagtaataagaagaatccaaccataggcctatattgagagtcatgggcatcccttctttatgctgaaatggtatatttgaacggaattcctgatggaaaactttctatccttagaaatactgtaggccaaatattaattggaacttttgttaatgatttgagaacaccaaaaagtttagatgatacaagttaaaggcaaattgagcccatggcctcattgtgctacttagaataccctgtgacccagctctcctcagaaaccctgatggctttgttgcagcattgcattgcacagaagacctcagtggtggtcctgagtcctcacaacaaggtcaacccgtggcctggccactaaggcaacagagagggaaataaattttagaaaacgcttcccttaaaaatgagttaaaatgtacatttgcatcatgagactaggttaactgtcacctgagaaagtcctatattcagaaagacttaatcctggaccaggtaaatgaggcatttgctgtatgttctttgttatgaatttaatgctacaaagagaaaatgggcattgatgcataatctgggtaaaaaagagatgtcagaagttgggaaagaactgccagaagagctatgttttaggatttcactccaccttaccctgtgttttcttgtaaagatattctcaaaattaggccaatttcactcttttaaggtcagaggagattaagatatttagaaatcagattgtgggattgattcccattgtgattgctgacttttagtatcagccttttgttctgcatggattctctcatcttgcaaactagcaagactcctgaatttggcaatgatcctgctctgtgaagcattctcaagttagggttcttatcaatgtcagatttcactaagccagtaataaaggaaaggttgagagagcaaaggatgtcactgagttgacacctaacagcacaaaacaacttgtcagctggcaggacaagccagcatgttcagggtggtcacagcctttgagttggaaagatagtcttttaaacattcttacctcaccaaataactttaatagataaaatttagttactccctcccacttttgttctattcatttaaagcagtgttttttaaaaatttatgtatatgtgactacatgaaaaatacattactgtgtttcttgatgttttatgacctgtacacaaagtgagaccagcagatgccttcaagagaaataaaggacactgctgtcattctaactaaattgtccagaggaggaaagaagagtacaaaaatgattatgaatacttaagaagaggcatgactttgtcattggtgtggagcctataattatgtgcaattccctacttaagactttttagttatgctgaacattgaaaaaaaactaaacagcggagaggagaaaagaaaaggggaaatttaaacatttaatggaacacattcattaaatggagacatcgcttcaccataagggggcagttaagggtttggtagtcctactcacttgctattgtcaaatcatttgttttatcatggatttgagatccttataagtcttcattattattttgaattcaagaatgattccttctgctcacaaaacatgatcacttttcattgatttttttttttaatattctgactggttttgcatatctggaaaagataaatcttcaaaatttggaaataaatatttttcctccctgccaaatcca

SEQ ID NO: 62954 - DNA, 417 bp, Artificial Sequence
  derived and/or modified sequence
atgctgtggttccagggcaacagcatgcagctggccagaagcagcttcggcctgttcctgagaaactgcagcgccagcaagaccaccctgcccgtgctgaccctgttcaccaaggacccctgccccctgtgcgacgaggccaaggaggtgctgaagccctacgagaacagacagccctacaaggaccagaagctgcccggcaccagaagaagaagaagccccagcagccccagccacccccacatggccagccagagcggcaagagatacaacctgaccctgaaccaggtgctgagcttcgactacgacatgggcctggacgcccccaagaccatcagcagcgactgcggcgccttctactgcctgagaatgttcaagagccccgacatgacctgctgcttctaccccaagcagtag

SEQ ID NO: 62955 - DNA, 417 bp, Artificial Sequence
  derived and/or modified sequence
atgctgtggtttcagggcaacagcatgcagctggctcggagcagcttcggcctctttctgcgaaactgctccgcgagtaagaccactctccctgtgctgaccctttttactaaggacccctgtccattgtgcgatgaagctaaagaagttctgaaaccctatgagaacagacagccctacaaggatcagaagctgcctggaacccggcgccggagaagcccttcttctcctagccatccacatatggccagtcaaagcgggaaacgctacaacctgaccttgaaccaggttttgagcttcgattatgacatgggtctggacgccccgaagacaatttcctccgactgcggagcattctactgtctgcgcatgtttaagagtcctgatatgacatgttgtttttatccaaagcagtag

SEQ ID NO: 62956 - DNA, 417 bp, Artificial Sequence
  derived and/or modified sequence
atgctgtggttccagggcaacagcatgcagctggcccggagcagctttggcctcttcctgaggaactgcagcgccagcaagaccaccctgcctgtgctgaccctcttcaccaaggacccctgccccctgtgtgatgaggccaaggaggtgctgaagccctatgaaaatcggcagccctacaaggaccagaagctgcccggcaccaggagaagaagaagccccagcagccccagccacccccacatggccagccagagcggcaagcgctacaacctgaccctgaaccaggtgctgagctttgattatgacatgggcctggatgcccccaagaccatcagcagtgactgtggggccttctactgcctgaggatgttcaagagcccagacatgacctgctgcttctaccccaagcagtag

SEQ ID NO: 62957 - DNA, 417 bp, Artificial Sequence
  derived and/or modified sequence
atgctgtggttccagggcaacagcatgcagctggcccggagcagctttggcctgttcctgagaaactgctcagcctcaaaaactacccttcctgtcctcacactatttaccaaagatccctgccctctgtgcgacgaagcaaaagaagtcttgaaaccttacgagaatcggcaaccatataaggaccagaagcttcctggtacaagacgccggcggagtccctcctctcccagccatccccacatggcctcccaatctggaaagcgatataacttaactttgaaccaagtgctgtccttcgattacgacatgggattggatgctccaaagactatcagttccgactgcggcgccttctactgcctgcggatgtttaagtcacctgacatgacgtgctgtttctatcctaagcaatag

SEQ ID NO: 62958 - DNA, 417 bp, Artificial Sequence
  derived and/or modified sequence
atgctgtggtttcagggcaactctatgcagctggccaggtcttcttttggcctttttttacggaactgtagtgccagtaaaacgacactcccggtgctgaccctgttcacaaaagacccctgtcctctgtgtgacgaagcaaaggaagttctcaaaccctacgagaaccggcagccctataaagatcagaagcttccaggaacaagacggcgtagatcaccctcctctcccagtcatccgcatatggcatctcaaagtggcaagcggtataacctgaccctcaatcaagtgctgagttttgactatgacatgggtttggatgctcccaaaaccatctctagcgactgtggagccttttactgtctccggatgttcaaaagccctgacatgacatgttgcttttacccaaagcagtag

SEQ ID NO: 62959 - protein, 742 aa, Artificial Sequence
  derived and/or modified sequence
MRGLGLWLLGAMMLPAIAPSRPWALMEQYEVVLPWRLPGPRVRRALPSHLGLHPERVSYVLGATGHNFTLHLRKNRDLLGSGYTETYTAANGSEVTEQPRGQDHCFYQGHVEGYPDSAASLSTCAGLRGFFQVGSDLHLIEPLDEGGEGGRHAVYQAEHLLQTAGTCGVSDDSLGSLLGPRTAAVFRPRPGDSLPSRETRYVELYVVVDNAEFQMLGSEAAVRHRVLEVVNHVDKLYQKLNFRVVLVGLEIWNSQDRFHVSPDPSVTLENLLTWQARQRTRRHLHDNVQLITGVDFTGTTVGFARVSAMCSHSSGAVNQDHSKNPVGVACTMAHEMGHNLGMDHDENVQGCRCQERFEAGRCIMAGSIGSSFPRMFSDCSQAYLESFLERPQSVCLANAPDLSHLVGGPVCGNLFVERGEQCDCGPPEDCRNRCCNSTTCQLAEGAQCAHGTCCQECKVKPAGELCRPKKDMCDLEEFCDGRHPECPEDAFQENGTPCSGGYCYNGACPTLAQQCQAFWGPGGQAAEESCFSYDILPGCKASRYRADMCGVLQCKGGQQPLGRAICIVDVCHALTTEDGTAYEPVPEGTRCGPEKVCWKGRCQDLHVYRSSNCSAQCHNHGVCNHKQECHCHAGWAPPHCAKLLTEVHAGCQPRAGQGRGSSPIQGPPRAGPHHPPGPARPTPGLLGGSEEAAPCSSGHCVQPTLPSSCLHPAGTKAGHQANVRTPSAPSQTRGWCGQPWSS

SEQ ID NO: 62960 - DNA, 2229 bp, Artificial Sequence
  derived and/or modified sequence
atgaggggtttaggcctgtggttgctgggagccatgatgctgccggccatagctccatcaaggccatgggccctgatggagcagtacgaggttgtgctgccctggagacttcccggcccgagagttcgccgcgctctgcctagccatcttgggttgcaccctgagagggtgtcctacgttctgggagctactgggcataattttacgctgcatctgcggaaaaaccgcgatctgcttggcagtggatacactgaaacctatacagcagccaatggtagtgaggtgaccgagcagccacgtgggcaagatcactgcttctatcaaggacacgtcgagggctatcccgattcagcagccagtctcagtacgtgtgccggcttaagaggttttttccaggtgggctctgatctccacctgatagagccattggacgagggaggggaggggggccgccacgcggtttatcaggccgaacatctgctgcagacagccggtacatgcggagtgagtgacgacagcctgggatctttacttggccctagaacagccgctgtgttcagaccaagaccaggtgactccctgcctagcagagaaacacgatacgtggagctatatgtggtggtggataatgctgaatttcagatgctaggctcagaagccgcggtcaggcatcgggtgctggaggttgtaaatcatgtcgacaagctttaccaaaaactgaactttagagtggttctcgtgggtttggagatttggaacagccaggataggtttcatgttagccctgatccttctgttactctagagaacctattgacatggcaggctagacagaggactcgacgtcacttacacgacaacgtgcaactgattacaggcgttgattttaccggcacaacagtgggatttgctcgggtgtcagctatgtgttctcactctagcggagccgttaatcaggatcattccaagaacccagttggtgtggcgtgcactatggctcacgagatggggcacaatcttggtatggaccacgatgagaatgtgcagggttgtcgatgtcaggagcgcttcgaggccgggcggtgtataatggcaggctcaataggctcctcatttccgaggatgttcagcgactgttcccaggcctatctggaaagctttttggaaaggccccaaagcgtctgtctcgcaaacgcccctgacctaagtcatctggttggcgggcccgtgtgtggaaatctcttcgtagaacggggtgagcagtgtgactgtgggcctccagaagactgtcgaaatagatgctgtaactctactacatgtcaattggcagagggggcccagtgtgcacacggtacctgctgtcaggagtgcaaagtcaagccggccggtgaactgtgccgaccgaaaaaggatatgtgcgacctcgaggagttctgcgatgggcggcaccccgaatgtcctgaagacgcattccaggagaacggcacgccgtgcagtgggggatactgctataatggcgcctgtccaaccttagcacagcagtgtcaggctttttgggggccaggcgggcaagctgccgaggagagttgcttctcctatgatatactgccaggctgcaaagcctctaggtatcgagccgacatgtgcggagtccttcagtgcaaggggggccaacagcctctgggaagggccatatgcatcgtggacgtctgccatgccttaactaccgaagatgggactgcatacgagccagttccagagggaaccagatgtgggcccgagaaagtgtgctggaagggtcggtgccaagacttacatgtctataggagctctaattgctcagcacagtgtcataaccatggcgtatgcaatcacaagcaggaatgtcattgccatgccggatgggcgccgcctcactgcgccaagttactcacagaagtccacgccggttgccagcctcgagcaggacaaggaagggggagcagccctatacagggcccacccagggcgggaccacaccacccacctgggcccgcccgccccaccccaggtctcttgggaggatctgaagaggcagccccttgttcgtcggggcattgtgtccagcccactcttcctagctcttgcctacatccagcaggcaccaaagctggccatcaggcgaatgtcaggacaccttccgcaccatcgcagactagggggtggtgcggacaaccttggtcatcatag

SEQ ID NO: 62961 - DNA, 2229 bp, Artificial Sequence
  derived and/or modified sequence
atgaggggcctgggcctgtggctgctgggcgccatgatgctgcctgccatcgcccccagccggccctgggccctgatggagcagtatgaggtggtgctgccctggaggctgcccggcccccgggtgagaagagccctgcccagccacctgggcctgcaccctgagcgggtgtcctatgtgctgggcgccaccggccacaacttcaccctgcacctgaggaagaacagagacctgctgggcagcggctacacagagacctacacagctgccaatggaagtgaggtgacagagcagccccggggccaggaccactgcttctaccagggccacgtggagggctacccagattctgctgccagcctgagcacctgtgccggcctgcggggcttcttccaggtgggcagtgacctgcacctgattgagcccctggatgagggcggggagggcggcagacatgctgtgtaccaggccgagcacctgctgcagacagctggcacctgtggggtgtctgatgacagcctgggcagcctgctgggccccaggacagctgctgtgttccggcccaggcctggggacagcctgcccagccgggagaccaggtatgtggagctgtatgtggtggtggacaatgctgagttccagatgctgggcagcgaggccgctgtgcgccaccgggtgctggaggtggtgaaccacgtggacaagctgtaccagaagctgaacttccgggtggtgctggtgggcctggagatctggaacagccaggaccgcttccacgtgtccccagaccccagcgtgaccctggagaacctgctgacctggcaggcccggcagaggaccaggaggcacctgcatgacaacgtgcagctgatcaccggggtggacttcaccggcaccaccgtgggctttgcccgggtgtctgccatgtgcagccacagcagcggggctgtgaaccaggaccacagcaagaaccctgtgggcgtggcctgcaccatggcccacgagatgggccacaacctgggcatggaccatgatgaaaatgtgcagggctgccgctgccaggagagatttgaagctggccgctgcatcatggccggcagcatcggcagcagcttccccaggatgttcagtgactgcagccaggcctacctggagagcttcctggagcggccccagagcgtgtgcctggccaatgccccagacctgagccacctggtgggcggccctgtgtgtggcaacctgtttgtggagcggggggagcagtgtgactgtggccccccagaggactgcaggaaccgctgctgcaacagcaccacctgccagctggccgagggcgcccagtgtgcccacggcacctgctgccaggagtgcaaggtgaagccagctggggagctgtgccggcccaagaaggacatgtgtgacctggaggagttctgtgatggccgccacccagaatgtccagaagatgccttccaggagaatggcaccccctgcagcggcggctactgctacaatggagcctgccccaccctggcccagcagtgccaggccttctggggccctgggggccaggccgctgaggagagctgcttctcctatgacatcctgcccggctgcaaggccagccgctacagagctgacatgtgtggggtgctgcagtgcaagggcggccagcagcccctgggccgggccatctgcatcgtggatgtgtgccacgccctgaccacagaagatggaacagcctatgagcctgtgcctgagggcacccgctgtggccctgagaaggtgtgctggaagggccgctgccaggacctgcacgtgtaccgcagcagcaactgcagcgcccagtgccacaaccacggcgtgtgcaaccacaagcaggagtgccactgccacgccggctgggccccaccccactgtgccaagctgctgacagaggtgcatgctggctgccagcccagggctggccagggccggggcagcagccccatccagggccccccccgggccggcccccaccaccccccaggccctgcccggcccaccccaggcctgctgggcggcagcgaggaggccgccccctgcagcagcggccactgtgtgcagcccaccctgcccagcagctgcctgcaccctgctggcaccaaggccggccaccaggccaacgtgaggaccccatctgcccccagccagacccggggctggtgtggccagccctggagcagctag

SEQ ID NO: 62962 - DNA, 2229 bp, Artificial Sequence
  derived and/or modified sequence
atgcggggcctgggcctgtggctgctgggcgccatgatgctgcccgctatcgccccctccagaccgtgggcgttgatggagcagtacgaggtggttctgccatggcggctccctgggccaagagtccgcagagccctgccgtcccacctgggcctgcatcctgaacgcgtcagttacgttcttggagctaccggtcacaattttacactgcacctgcgcaagaacagagacctgctggggtcaggatacaccgagacatacacagcagccaacgggtccgaggtcaccgaacagccccgaggtcaggaccactgcttctaccagggacacgttgaaggatatcctgattccgccgcttcactgtctacatgtgccggtcttagaggcttctttcaggttggtagcgaccttcatctgatcgagccccttgacgaagggggcgagggtggcagacacgctgtttatcaggccgaacatctgctgcagactgccggtacttgcggagtgtctgacgacagtctgggatcacttcttggcccacgcaccgccgccgtttttcgaccccgccctggagatagcttacccagtcgcgagacccggtacgtggagctctacgtcgtggtggataacgccgagtttcagatgctcggtagcgaggccgccgtgagacatagagtcttagaggtggtgaatcatgtggataagctttaccaaaagctcaattttagggtggttttggttggtctggaaatttggaactcacaggacaggttccacgtatcgcccgatccctctgtaaccctggagaacctgctgacatggcaggccaggcaacggacgaggagacatttgcacgataacgtccaactgatcactggtgtggattttaccggaacaacagtgggatttgcccgggtgtcagccatgtgctcccatagttccggcgcagtaaatcaggaccactcaaagaacccagttggtgtcgcttgcactatggctcacgaaatggggcataatctcgggatggaccacgatgagaatgtgcagggatgtagatgccaggagcgatttgaagccggccggtgcattatggcaggcagcattgggtcatcatttccccgtatgttctccgactgttcacaggcatacctcgagtcctttttggaaagaccgcaatccgtttgcctggcaaatgcacctgacttgtcacacttagtgggaggtcccgtgtgtggtaatctcttcgttgaaaggggagaacagtgtgattgtggccctccagaagactgtcggaatcgttgttgcaactcgacaacatgtcagcttgccgagggagctcaatgtgcacacggcacatgctgtcaagaatgtaaagttaagcccgcaggtgaactatgccgccctaaaaaagacatgtgtgacctggaggaattctgtgacggcagacaccctgagtgccctgaagatgctttccaggaaaacggcaccccatgttcagggggctactgctacaatggcgcctgccctaccctcgcccaacagtgtcaggcattctggggcccaggtggtcaggcagctgaggagtcatgcttctcatacgacatcttgcctggctgcaaagcatcccgttacagagccgatatgtgtggagtgctccaatgcaagggcgggcagcaaccattgggacgggcgatttgcatagttgatgtgtgccatgccttgaccacagaagacgggacagcctatgagcccgtccccgagggcacacggtgcggccccgagaaagtttgttggaaaggtcgctgccaggatctgcatgtctatcggtcttcaaactgtagcgcccagtgccataatcacggcgtttgcaaccacaagcaggagtgccattgccacgccggctgggcgccgccccactgcgccaaactgctcaccgaggttcacgcagggtgtcagcctagggctggccagggacgagggtcctctccaatacaggggcctccacgcgcaggcccccatcatcccccggggcctgccaggcccacgcctggccttttgggaggctccgaagaggctgcaccttgttcaagtggccattgtgtgcagccaactctgccctcatcttgccttcacccggctggcacaaaggcaggccaccaggccaatgtgcggactccttccgccccatcacagaccaggggatggtgcggccagccctggtcttcctag

SEQ ID NO: 62963 - DNA, 2229 bp, Artificial Sequence
  derived and/or modified sequence
atgcgaggactcgggctgtggctattaggagccatgatgttacccgcaatagctccatctcgcccatgggcacttatggagcagtacgaggtcgtgctgccttggagattgcccggaccacgtgttcgcagggccctgccatcccatctgggattgcatcccgagcgggtgtcgtatgtgctcggggcaaccggtcataacttcactttgcacctcaggaaaaatcgagatctgcttggcagcggttacactgagacttacacagccgctaacggcagcgaagtgacagaacaaccacgagggcaagaccattgtttctaccaggggcacgtggaaggttaccctgactctgccgctagcttaagtacgtgcgctgggctgcgaggttttttccaggtgggctccgacctacacctgatcgaacctctcgatgaagggggagagggcggacgccacgccgtgtaccaggccgaacatctgctacagactgcaggtacgtgcggcgtatctgatgatagtttggggagtttgcttggacccaggacggcggctgttttccgcccaagacctggggactcgctgccttctcgcgagacgagatatgtggaattgtacgtcgttgtagataacgccgaatttcagatgctggggtcagaggcagcagtgcgacacagggtgctggaagtggttaatcatgttgacaagctctaccagaagctcaattttcgagttgttctcgtgggtctcgagatatggaatagtcaggacaggtttcacgtgtccccggatccatcagttacactggagaacctgctaacatggcaggctcgccagagaacgaggagacatctgcatgataacgtccaactgatcaccggagtggactttactggcactaccgtggggttcgcaagagtcagcgccatgtgttcacacagctcaggggcagtgaaccaagatcatagtaagaatccggtcggggtggcttgcaccatggcccatgagatggggcacaatttgggtatggaccatgatgagaatgtgcagggttgcagatgtcaggaacgctttgaagcaggcaggtgcataatggcgggttcaatcggtagttccttccccagaatgttctctgattgctcccaagcttatctggagtcattcctggaaagacctcaatccgtgtgcctggccaacgccccagacctgagccacctcgttggtggacctgtttgtggcaatctcttcgtcgagcggggtgaacaatgcgattgcggcccaccagaagattgtaggaatcgatgttgcaattctacaacatgccagttagccgagggagcacaatgcgcccacgggacgtgctgccaagaatgtaaagtgaaacctgcaggcgagctgtgtcgacctaaaaaggatatgtgtgacctggaggagttttgtgatggtcggcaccccgagtgtccggaggacgcctttcaggagaatggcacaccctgttcagggggatattgctacaatggtgcttgtccaacactggcccagcagtgccaggctttctgggggccaggcggtcaggcggctgaggagagctgtttttcgtacgatattttacccggttgcaaagcttcaagataccgagccgacatgtgcggtgtcctgcagtgcaagggcggtcagcagccactgggacgtgctatttgtatagtcgatgtttgccacgctcttactacagaggatggaactgcttacgagccggtgccagagggcacacgatgtggccctgagaaagtgtgttggaagggcaggtgccaggacttgcatgtctaccgatcttctaattgctccgctcagtgccacaatcacggggtctgcaaccataagcaggaatgccactgtcatgcaggctgggcccctccacactgtgctaaacttctgactgaggtccacgcgggatgtcagccgagagccggacagggcagaggcagcagtccgatccagggacctcctcgcgctggccctcaccatcctcccggtcctgcccgtcctaccccaggtctgttaggaggttcagaggaagccgctccttgctcatccggtcactgtgtgcagccgacactgccctcttcatgcctgcacccagccggaactaaagccggacatcaggctaacgtgcgcacaccttcagctcccagtcaaaccaggggctggtgtgggcaaccatggagcagctag

SEQ ID NO: 62964 - DNA, 2229 bp, Artificial Sequence
  derived and/or modified sequence
atgagaggcctgggcctgtggctgctgggcgccatgatgctgcccgccatcgcccccagcagaccctgggccctgatggagcagtacgaggtggtgctgccctggagactgcccggccccagagtgagaagagccctgcccagccacctgggcctgcaccccgagagagtgagctacgtgctgggcgccaccggccacaacttcaccctgcacctgagaaagaacagagacctgctgggcagcggctacaccgagacctacaccgccgccaacggcagcgaggtgaccgagcagcccagaggccaggaccactgcttctaccagggccacgtggagggctaccccgacagcgccgccagcctgagcacctgcgccggcctgagaggcttcttccaggtgggcagcgacctgcacctgatcgagcccctggacgagggcggcgagggcggcagacacgccgtgtaccaggccgagcacctgctgcagaccgccggcacctgcggcgtgagcgacgacagcctgggcagcctgctgggccccagaaccgccgccgtgttcagacccagacccggcgacagcctgcccagcagagagaccagatacgtggagctgtacgtggtggtggacaacgccgagttccagatgctgggcagcgaggccgccgtgagacacagagtgctggaggtggtgaaccacgtggacaagctgtaccagaagctgaacttcagagtggtgctggtgggcctggagatctggaacagccaggacagattccacgtgagccccgaccccagcgtgaccctggagaacctgctgacctggcaggccagacagagaaccagaagacacctgcacgacaacgtgcagctgatcaccggcgtggacttcaccggcaccaccgtgggcttcgccagagtgagcgccatgtgcagccacagcagcggcgccgtgaaccaggaccacagcaagaaccccgtgggcgtggcctgcaccatggcccacgagatgggccacaacctgggcatggaccacgacgagaacgtgcagggctgcagatgccaggagagattcgaggccggcagatgcatcatggccggcagcatcggcagcagcttccccagaatgttcagcgactgcagccaggcctacctggagagcttcctggagagaccccagagcgtgtgcctggccaacgcccccgacctgagccacctggtgggcggccccgtgtgcggcaacctgttcgtggagagaggcgagcagtgcgactgcggcccccccgaggactgcagaaacagatgctgcaacagcaccacctgccagctggccgagggcgcccagtgcgcccacggcacctgctgccaggagtgcaaggtgaagcccgccggcgagctgtgcagacccaagaaggacatgtgcgacctggaggagttctgcgacggcagacaccccgagtgccccgaggacgccttccaggagaacggcaccccctgcagcggcggctactgctacaacggcgcctgccccaccctggcccagcagtgccaggccttctggggccccggcggccaggccgccgaggagagctgcttcagctacgacatcctgcccggctgcaaggccagcagatacagagccgacatgtgcggcgtgctgcagtgcaagggcggccagcagcccctgggcagagccatctgcatcgtggacgtgtgccacgccctgaccaccgaggacggcaccgcctacgagcccgtgcccgagggcaccagatgcggccccgagaaggtgtgctggaagggcagatgccaggacctgcacgtgtacagaagcagcaactgcagcgcccagtgccacaaccacggcgtgtgcaaccacaagcaggagtgccactgccacgccggctgggcccccccccactgcgccaagctgctgaccgaggtgcacgccggctgccagcccagagccggccagggcagaggcagcagccccatccagggcccccccagagccggcccccaccacccccccggccccgccagacccacccccggcctgctgggcggcagcgaggaggccgccccctgcagcagcggccactgcgtgcagcccaccctgcccagcagctgcctgcaccccgccggcaccaaggccggccaccaggccaacgtgagaacccccagcgcccccagccagaccagaggctggtgcggccagccctggagcagctag

SEQ ID NO: 62965 - DNA, 3077 bp, Artificial Sequence
  derived and/or modified sequence
ctgtcacctccgcctctgctccccgacccggccatgcgcggcctcgggctctggctgctgggcgcgatgatgctgcctgcgattgcccccagccggccctgggccctcatggagcagtatgaggtcgtgttgccgtggcgtctgccaggcccccgagtccgccgagctctgccctcccacttgggcctgcacccagagagggtgagctacgtccttggggccacagggcacaacttcaccctccacctgcggaagaacagggacctgctgggctccggctacacagagacctatacggctgccaatggctccgaggtgacggagcagcctcgcgggcaggaccactgcttctaccagggccacgtagaggggtacccggactcagccgccagcctcagcacctgtgccggcctcaggggtttcttccaggtggggtcagacctgcacctgatcgagcccctggatgaaggtggcgagggcggacggcacgccgtgtaccaggctgagcacctgctgcagacggccgggacctgcggggtcagcgacgacagcctgggcagcctcctgggaccccggacggcagccgtcttcaggcctcggcccggggactctctgccatcccgagagacccgctacgtggagctgtatgtggtcgtggacaatgcagagttccagatgctggggagcgaagcagccgtgcgtcatcgggtgctggaggtggtgaatcacgtggacaagctatatcagaaactcaacttccgtgtggtcctggtgggcctggagatttggaatagtcaggacaggttccacgtcagccccgaccccagtgtcacactggagaacctcctgacctggcaggcacggcaacggacacggcggcacctgcatgacaacgtacagctcatcacgggtgtcgacttcaccgggactaccgtggggtttgccagggtgtccgccatgtgctcccacagctcaggggctgtgaaccaggaccacagcaagaaccccgtgggcgtggcctgtaccatggcccatgagatgggccacaacctgggcatggaccatgatgagaacgtccagggctgccgctgccaggaacgcttcgaggccggccgctgcatcatggcgggcagcattggctccagtttccccaggatgttcagtgactgcagccaggcctacctggagagctttttggagcggccgcagtcggtgtgcctcgccaacgcccctgacctcagccacctggtgggcggccccgtgtgtgggaacctgtttgtggagcgtggggagcagtgcgactgcggcccccccgaggactgccggaaccgctgctgcaactctaccacctgccagctggctgagggggcccagtgtgcgcacggtacctgctgccaggagtgcaaggtgaagccggctggtgagctgtgccgtcccaagaaggacatgtgtgacctcgaggagttctgtgacggccggcaccctgagtgcccggaagacgccttccaggagaacggcacgccctgctccgggggctactgctacaacggggcctgtcccacactggcccagcagtgccaggccttctgggggccaggtgggcaggctgccgaggagtcctgcttctcctatgacatcctaccaggctgcaaggccagccggtacagggctgacatgtgtggcgttctgcagtgcaagggtgggcagcagcccctggggcgtgccatctgcatcgtggatgtgtgccacgcgctcaccacagaggatggcactgcgtatgaaccagtgcccgagggcacccggtgtggaccagagaaggtttgctggaaaggacgttgccaggacttacacgtttacagatccagcaactgctctgcccagtgccacaaccatggggtgtgcaaccacaagcaggagtgccactgccacgcgggctgggccccgccccactgcgcgaagctgctgactgaggtgcacgcaggctgccagccgcgtgccggccaagggcggggctccagccccatccaggggcccccaagagctggtccccaccacccacccgggccagcccgcccgacacccggcctcctcggtggctctgaagaggccgccccctgctcctccggtcactgtgtccagcccacccttcccagttcctgtctacacccggcaggcaccaaagcaggtcatcaagccaacgttcgcacccccagtgcccccagtcaaacccggggctggtgcggccaaccctggtccagctgagggtgctgttggcccaaaggttgccctgaagccccccatccagaggaagcaaggagccggagctcccacagcaccctaggggggcacctgcgcctgtgtggaaatttggagaagttgcggcagagaagccatgcgttccagcattccacggtccagctagtgccgctcagccctagaccctgactttgcaggctcagctgctgttctaacctcaggaatgcatctacctgagaggctcctgctgtccacgccctcagccaattccttctccccgccttggccacgtgtagccccagctgtctgcaggcaccaggctgggatgagctgtgtgcttgcgggtgcgtgtgtgtgtacgtgtctccaggtggccgctggtctcccgctgtgttcaggaggccacatatacagcccctcccagccacacctgcccctgctctggggcctgctgagccggctgccctgggcacccggttccaggcagcacagacgtggggcatccccagaaagactccatcccaggaccaggttcccctgcgtgctcttcgagagggtgtcagtgagcagactgcaccccaagctcccgactccaggtcccctgatcttggggcctgtttcccatgggattcaagagggacagccccagctttgtgtgtgtttaagcttaggaatcgcctttatggaaagggctatgtgggagagtcagctatcttgtctggttttcttgagacctcagatgtgtgttcagcagggctgaaagcttttattctttaataatgagaaatgtatattttactaataaattattgaccgagttc

SEQ ID NO: 62966 - protein, 733 aa, Artificial Sequence
  derived and/or modified sequence
MRGLGLWLLGAMMLPGPAPREGELRPWGHRAQLHPPPAEEQGPAGLRLHRDLYGCQWLRGDGAASRAGPLLLPGPRRGVPGLSRQPQHLCRPQVGSDLHLIEPLDEGGEGGRHAVYQAEHLLQTAGTCGVSDDSLGSLLGPRTAAVFRPRPGDSLPSRETRYVELYVVVDNAEFQMLGSEAAVRHRVLEVVNHVDKLYQKLNFRVVLVGLEIWNSQDRFHVSPDPSVTLENLLTWQARQRTRRHLHDNVQLITGVDFTGTTVGFARVSAMCSHSSGAVNQDHSKNPVGVACTMAHEMGHNLGMDHDENVQGCRCQERFEAGRCIMAGSIGSSFPRMFSDCSQAYLESFLERPQSVCLANAPDLSHLVGGPVCGNLFVERGEQCDCGPPEDCRNRCCNSTTCQLAEGAQCAHGTCCQECKVKPAGELCRPKKDMCDLEEFCDGRHPECPEDAFQENGTPCSGGYCYNGACPTLAQQCQAFWGPGGQAAEESCFSYDILPGCKASRYRADMCGVLQCKGGQQPLGRAICIVDVCHALTTEDGTAYEPVPEGTRCGPEKVCNHKQECHCHAGWAPPHCAKLLTEVHAASGSLPVFVVVVLVLLAVVLVTLAGIIVYRKARSRILSRNVAPKTTMGRSNPLFHQAASRVPAKGGAPAPSRGPQELVPTTHPGQPARHPASSVALKRPPPAPPVTVSSPPFPVPVYTRQAPKQGAVGPKVALKPPIQRKQGAGAPTAP

SEQ ID NO: 62967 - DNA, 2202 bp, Artificial Sequence
  derived and/or modified sequence
atgagaggactgggcctgtggctgctcggcgccatgatgttgccggggcctgcaccacgagaaggcgaattgcggccttggggacaccgtgctcagctccatccgccaccggctgaagaacagggcccagcaggcttaaggctgcatcgggacctttacgggtgtcaatggttgcggggcgatggcgcagcatcacgcgcgggtcccttactgctgcccggaccacgtaggggagtgcccggtttatctcggcagccccagcatctgtgtagaccccaggtgggcagtgacttacacctgatcgaacctcttgacgagggcggtgagggaggccgacacgctgtgtaccaggccgagcacttgctccagacagccgggacatgcggagtgtccgatgactctttgggctctctacttgggccccggacagcagccgtctttaggccccggccaggagactctctgccaagccgggaaacccggtacgtggaactgtacgtggtggtggataacgcagaatttcagatgctcggctcagaggctgcagtgagacacagggtactggaggtcgtcaaccatgtggataaactgtaccaaaaactgaactttagggttgttctcgttgggctggagatctggaactcgcaagacagattccatgtgagtccagacccatccgtcacgctggaaaatttgctgacctggcaggcgcggcagcggacacgaaggcacttgcacgacaatgtgcagctcattacaggggttgacttcactggtacaaccgtaggctttgctagggtcagcgccatgtgtagccactcgtcgggtgccgtgaaccaggaccattcgaagaatccggtgggggttgcctgtacgatggcacatgagatgggtcacaaccttggaatggaccacgacgagaatgtgcagggctgtagatgccaagaacgctttgaagctgggaggtgcatcatggccggatctattggcagcagcttcccccgaatgttttcagattgtagccaagcatacctggaaagttttctagagaggcctcagagcgtgtgtctggcgaacgctcccgatctgagccatctggtgggaggtcctgtatgtggcaatctctttgtggagcgcggcgagcagtgtgattgtggcccacccgaagactgcagaaataggtgctgcaattccaccacctgtcaactggccgagggtgcacagtgtgcacacggaacctgttgccaggaatgcaaggtgaagcctgctggcgaactttgtagaccaaaaaaggacatgtgtgatctggaagagttttgcgatggtagacacccggagtgcccagaggatgcgtttcaagagaatggaacaccgtgctccggaggctactgctacaatggtgcctgtcccaccctggctcagcaatgtcaagcattttggggccctggaggccaggccgcagaggaatcttgcttcagctacgatattcttccaggatgcaaggctagtcgatatcgcgcagacatgtgcggcgttctgcaatgcaaagggggacagcagcccctcgggcgggccatatgcattgtcgacgtttgccacgctcttactacggaagatgggactgcgtacgagcctgtgcccgagggaacccgctgcggcccagaaaaggtatgcaatcacaaacaagagtgccattgccacgcggggtgggccccaccacactgtgcgaagcttcttacggaagtacacgccgcatcggggtctttgccagtattcgtggtggttgtgctggttctactcgctgtggtcctggttaccctcgcagggattattgtgtaccgaaaggccaggtcaaggatcctttcaaggaatgttgctcctaaaacaacaatgggtcgcagtaatcccctgtttcatcaggccgcaagccgtgtgcctgccaagggaggcgctccagcgccatccaggggccctcaggagctggtgcccaccactcatccgggtcagcctgcgcgacaccctgcttcctctgtcgctctgaaaaggccaccccctgcaccgccagtgacagtgtcgtcacctccattcccagtgccggtctatacaaggcaggctcctaagcaaggggccgtcggacccaaagtggctctgaagcccccaatccagcgcaagcaaggtgcgggagcgccaaccgctccctag

SEQ ID NO: 62968 - DNA, 2202 bp, Artificial Sequence
  derived and/or modified sequence
atgaggggcctgggcctgtggctgctgggcgccatgatgctgcccggccctgccccccgggagggggagctgcggccctggggccaccgggcccagctgcaccccccacctgctgaggagcagggccctgctggcctgcggctgcaccgggacctgtatggctgccagtggctgcggggagatggagctgccagcagagctggccccctgctgctgcccggcccccggcggggcgtgcccggcctgagccggcagccccagcacctgtgccggccccaggtgggcagtgacctgcacctgattgagcccctggatgaaggaggagagggcggcagacatgctgtgtaccaggccgagcacctgctgcagacagctggcacctgtggggtgtctgatgacagcctgggcagcctgctgggccccaggacagctgctgtgttccggcccaggcctggggacagcctgcccagccgggagacccgctacgtggagctgtatgtggtggtggacaatgctgagttccagatgctgggcagcgaggccgctgtgcgccaccgggtgctggaggtggtgaaccacgtggacaagctgtaccagaagctgaacttccgggtggtgctggtgggcctggagatctggaacagccaggaccgcttccacgtgtccccagaccccagcgtgaccctggagaacctgctgacctggcaggcccggcagaggacccggcggcacctgcatgacaacgtgcagctgatcactggagtggacttcaccggcaccaccgtgggctttgcccgggtgtctgccatgtgcagccacagcagtggagctgtgaaccaggaccacagcaagaaccctgtgggcgtggcctgcaccatggcccacgagatgggccacaacctgggcatggaccatgatgaaaatgtgcagggctgccgctgccaggagagatttgaggccggccgctgcatcatggccggcagcatcggcagcagcttccccaggatgttcagtgactgcagccaggcctacctggagagcttcctggagcggccccagagcgtgtgcctggccaatgccccagacctgagccacctggtgggcggccctgtgtgtggcaacctgtttgtggagcggggggagcagtgtgactgtggccccccagaggactgcaggaaccgctgctgcaacagcaccacctgccagctggccgagggcgcccagtgtgcccacggcacctgctgccaggagtgcaaggtgaagccagctggggagctgtgccggcccaagaaggacatgtgtgacctggaggagttctgtgatggccgccaccctgagtgcccagaagatgccttccaggagaatggcaccccctgcagcggcggctactgctacaacggggcctgccccaccctggcccagcagtgccaggccttctggggccctgggggccaggccgctgaggagagctgcttctcctatgacatcctgcccggctgcaaggccagccgctacagagctgacatgtgtggggtgctgcagtgcaagggcggccagcagcccctgggccgggccatctgcatcgtggatgtgtgccacgccctgaccacagaagatggaacagcctatgagcctgtgcctgagggcacccgctgtggccctgagaaggtgtgcaaccacaagcaggagtgccactgccacgccggctgggccccaccccactgtgccaagctgctgacagaggtgcacgccgccagcggcagcctgcctgtgtttgtggtggtggtgctggtgctgctggccgtggtgctggtgaccctggccggcatcatcgtgtacaggaaggcccggagccgcatcctgagcagaaatgtggcccccaagaccaccatgggccgcagcaaccccctcttccaccaggccgccagccgggtgcctgccaagggcggggccccagcccccagccggggcccccaggagctggtgcccaccacccaccctggccagcctgcccggcacccagccagctctgtggccctgaagaggcctcctccagcccctcctgtgacagtgagcagcccccccttccctgtgcctgtgtacacccggcaggcccccaagcagggcgctgtgggccccaaggtggccctgaagccacccatccagaggaagcagggcgctggggcccccacagccccctag

SEQ ID NO: 62969 - DNA, 2202 bp, Artificial Sequence
  derived and/or modified sequence
atgcggggcctgggcctgtggctgctgggcgccatgatgctgcccgggcccgcccctcgggagggcgagctgagaccttggggtcaccgggcacagctgcacccacctcctgctgaagaacagggaccggccggcttgcgcctacatcgggacctgtacgggtgtcaatggcttcgtggagacggagcagcctcccgtgccggcccgctgctcctgccaggtccacgacgtggcgtcccaggcctgagccgacagccccagcacctgtgccggcctcaggtcggcagtgacctccaccttatcgagcctttggacgagggtggcgagggagggaggcatgcggtgtaccaggccgagcacctgctgcagaccgcaggcacttgtggggtgtccgacgacagtttggggtcacttttgggacctcgcactgctgccgtgtttaggcctcgtcccggagacagcctgccatcaagggaaacaaggtacgttgagctatacgtcgtcgtggataacgctgaatttcagatgctgggcagcgaggctgctgtgagacacagagtcctggaggttgttaatcacgtggacaaattataccagaaactgaattttcgtgtcgtgcttgtgggtctcgaaatttggaattcccaggaccgctttcatgtttctcctgacccctccgtcactcttgagaatctgcttacctggcaagctcgccaacgcactcgtagacaccttcacgataacgtccagctaataaccggcgtggactttaccggcactaccgtaggctttgcaagagtgtccgccatgtgcagccacagcagtggagcagtcaaccaagaccactccaagaatcctgtgggggtggcttgcacaatggctcatgaaatgggtcacaacctggggatggatcacgacgagaacgtacagggctgccggtgtcaggagcggttcgaggccgggaggtgcatcatggcaggctccattggaagctcctttccacggatgttctccgactgctcacaggcgtacctcgagagtttcttggaacgcccgcagtcggtgtgccttgccaatgcacccgatctaagccatctcgtgggagggcccgtatgcggcaatctgttcgtcgaacgcggggaacagtgtgactgtggacctccggaggattgccgtaatcgctgttgcaatagtacaacatgccaactggcagagggggcacagtgcgctcacgggacatgttgtcaggaatgtaaagtgaagcctgccggtgaattgtgccgccccaagaaggacatgtgtgacctggaagaattctgcgatggacgccatcctgagtgtcccgaggatgcttttcaggagaacggcactccttgttccggcggatactgctacaacggtgcttgccctacactcgcacagcagtgtcaggctttttgggggcctggtggtcaagcggccgaagaatcttgtttttcatacgatattttacctggctgtaaggcttcaagatacagagctgatatgtgtggcgtgttacagtgcaagggaggccagcagcctttggggagagctatatgcatcgtagatgtgtgccacgcactcactactgaagatgggacagcatatgagcctgtacctgaggggacgagatgtggccccgaaaaagtctgcaaccacaaacaagagtgccactgtcacgccgggtgggctcccccacactgtgcaaaactgctcacagaggtgcacgcggcatccgggtcactgcctgttttcgtagtggtggtgctggtgctccttgccgtggtcctggttactctcgccgggatcatagtttatcggaaagctcggagcaggatcctcagcaggaacgtcgcccctaagacaactatgggtagatctaatcctctattccaccaggcagcctcacgtgtgccagccaagggaggcgcgcccgcaccgagcaggggcccacaggagctggtgccaacaacgcaccctggccagccagcccggcacccggccagtagcgtggccctcaagaggccacctcccgcacctcccgtaacagtgtcttccccgcccttccctgtgcccgtatacactcggcaggctcccaagcagggcgccgtcggccccaaggtggccttgaagcctccaattcaacggaaacagggcgccggggctcccaccgcgccatag

SEQ ID NO: 62970 - DNA, 2202 bp, Artificial Sequence
  derived and/or modified sequence
atgaggggtttgggcctctggctcctgggagcgatgatgctgccaggcccagctcctagagagggggaacttagaccatggggccatcgcgctcagttgcatccccctcctgcagaggaacagggacccgcaggtctccgtctccacagggacctgtacggttgtcagtggctgaggggcgacggagcggcaagtagagccggtccactgctgctgccgggacccagacgcggagtcccaggactttcaaggcagccacagcatctatgtcggcctcaggtaggatctgatctgcacctcatagagcctctggacgagggaggagagggcggtaggcacgccgtgtaccaggcagaacacctcctgcaaaccgccggtacctgcggtgtgtcagatgactccctaggctcgctcctaggacccagaacagcagccgtttttcgccctagaccaggcgatagtttgcccagtagagaaacacgctacgtggagctgtacgtcgtggtagataacgccgagtttcagatgctcggatccgaagctgcagtgagacaccgggtgttagaagtcgtgaatcatgtggacaaactgtaccagaaactgaatttcagggtcgtgttagtaggcctcgagatctggaatagccaggatcggtttcatgtgtcaccggatccttcagtgacgctggagaacctcctgacgtggcaggccaggcagcggacccggaggcatctacatgacaacgtccaactgatcaccggcgtggactttactggcacgaccgtgggcttcgcccgagtttccgctatgtgttctcacagctccggggctgtcaaccaggaccattcgaagaatcccgtgggtgtggcatgcaccatggctcacgagatgggccataatctgggcatggatcatgatgagaacgtacaaggctgtagatgtcaggaacgattcgaggccggacggtgtataatggccggttccattgggtcttcatttccccgtatgttttccgattgttcccaggcttatctggaatcgttcttagaaagacctcaaagcgtatgtctggcgaatgccccagatctgagccaccttgtgggtggacccgtttgtggtaacctgtttgtggagagaggcgagcagtgtgactgcgggccacctgaggactgcagaaaccgttgttgcaacagtaccacgtgtcagttggctgaaggggctcagtgtgctcacgggacatgttgtcaggagtgtaaagtgaaacctgcaggtgaactgtgcagacccaagaaggatatgtgtgatttagaggagttttgcgacggtcgccaccctgaatgtcccgaggacgcgttccaggagaacggcaccccttgcagcggaggatactgctacaacggtgcttgtccgactctggctcagcagtgccaggcgttttgggggccagggggacaggccgcagaggagagttgtttttcctatgacatcctgccagggtgtaaggcttcccgatacagagctgacatgtgcggagtcctacagtgcaaaggcggtcaacagccattgggaagagctatctgtatcgttgacgtctgccatgccttgacgacggaagatggcactgcgtatgaacctgttccagagggcactagatgcggaccagagaaggtttgcaaccataaacaggagtgccactgccacgccggatgggcgcctcctcactgcgccaaactgctgaccgaggtgcacgccgcttccggcagcctgcctgttttcgtcgttgtcgtgctggtgctccttgccgtggtgctggtcaccttggccggaataatcgtatatcggaaggctaggagcaggatcctgtcaagaaatgttgccccaaagacgacaatgggcaggagtaacccactgtttcatcaggctgccagccgcgtccccgcaaaggggggtgcccctgctccttcccgcggaccgcaagaattagtccccaccacgcacccaggacagcccgcaagacatcccgcttcctccgtggcccttaagaggccccctcctgcacctcccgtcaccgtgtcatctcccccatttccggtgcctgtttacacacgacaggctcccaagcagggggctgtcggaccgaaagtggctctcaaacccccaattcagcgaaagcaaggcgctggagcacctacggcaccctag

SEQ ID NO: 62971 - DNA, 2202 bp, Artificial Sequence
  derived and/or modified sequence
atgagaggcctgggcctgtggctgctgggcgccatgatgctgcccggccccgcccccagagagggcgagctgagaccctggggccacagagcccagctgcaccccccccccgccgaggagcagggccccgccggcctgagactgcacagagacctgtacggctgccagtggctgagaggcgacggcgccgccagcagagccggccccctgctgctgcccggccccagaagaggcgtgcccggcctgagcagacagccccagcacctgtgcagaccccaggtgggcagcgacctgcacctgatcgagcccctggacgagggcggcgagggcggcagacacgccgtgtaccaggccgagcacctgctgcagaccgccggcacctgcggcgtgagcgacgacagcctgggcagcctgctgggccccagaaccgccgccgtgttcagacccagacccggcgacagcctgcccagcagagagaccagatacgtggagctgtacgtggtggtggacaacgccgagttccagatgctgggcagcgaggccgccgtgagacacagagtgctggaggtggtgaaccacgtggacaagctgtaccagaagctgaacttcagagtggtgctggtgggcctggagatctggaacagccaggacagattccacgtgagccccgaccccagcgtgaccctggagaacctgctgacctggcaggccagacagagaaccagaagacacctgcacgacaacgtgcagctgatcaccggcgtggacttcaccggcaccaccgtgggcttcgccagagtgagcgccatgtgcagccacagcagcggcgccgtgaaccaggaccacagcaagaaccccgtgggcgtggcctgcaccatggcccacgagatgggccacaacctgggcatggaccacgacgagaacgtgcagggctgcagatgccaggagagattcgaggccggcagatgcatcatggccggcagcatcggcagcagcttccccagaatgttcagcgactgcagccaggcctacctggagagcttcctggagagaccccagagcgtgtgcctggccaacgcccccgacctgagccacctggtgggcggccccgtgtgcggcaacctgttcgtggagagaggcgagcagtgcgactgcggcccccccgaggactgcagaaacagatgctgcaacagcaccacctgccagctggccgagggcgcccagtgcgcccacggcacctgctgccaggagtgcaaggtgaagcccgccggcgagctgtgcagacccaagaaggacatgtgcgacctggaggagttctgcgacggcagacaccccgagtgccccgaggacgccttccaggagaacggcaccccctgcagcggcggctactgctacaacggcgcctgccccaccctggcccagcagtgccaggccttctggggccccggcggccaggccgccgaggagagctgcttcagctacgacatcctgcccggctgcaaggccagcagatacagagccgacatgtgcggcgtgctgcagtgcaagggcggccagcagcccctgggcagagccatctgcatcgtggacgtgtgccacgccctgaccaccgaggacggcaccgcctacgagcccgtgcccgagggcaccagatgcggccccgagaaggtgtgcaaccacaagcaggagtgccactgccacgccggctgggcccccccccactgcgccaagctgctgaccgaggtgcacgccgccagcggcagcctgcccgtgttcgtggtggtggtgctggtgctgctggccgtggtgctggtgaccctggccggcatcatcgtgtacagaaaggccagaagcagaatcctgagcagaaacgtggcccccaagaccaccatgggcagaagcaaccccctgttccaccaggccgccagcagagtgcccgccaagggcggcgcccccgcccccagcagaggcccccaggagctggtgcccaccacccaccccggccagcccgccagacaccccgccagcagcgtggccctgaagagacccccccccgccccccccgtgaccgtgagcagcccccccttccccgtgcccgtgtacaccagacaggcccccaagcagggcgccgtgggccccaaggtggccctgaagccccccatccagagaaagcagggcgccggcgcccccaccgccccctag

SEQ ID NO: 62972 - DNA, 2441 bp, Artificial Sequence
  derived and/or modified sequence
agaccgtgtcccgcggggctgtcacctccgcctctgctccccgacccggccatgcgcggcctcgggctctggctgctgggcgcgatgatgctgcctgggcctgcacccagagagggtgagctacgtccttggggccacagggcacaacttcaccctccacctgcggaagaacagggacctgctgggctccggctacacagagacctatacggctgccaatggctccgaggtgacggagcagcctcgcgggcaggaccactgcttctaccagggccacgtagaggggtacccggactcagccgccagcctcagcacctgtgccggcctcaggtggggtcagacctgcacctgatcgagcccctggatgaaggtggcgagggcggacggcacgccgtgtaccaggctgagcacctgctgcagacggccgggacctgcggggtcagcgacgacagcctgggcagcctcctgggaccccggacggcagccgtcttcaggcctcggcccggggactctctgccatcccgagagacccgctacgtggagctgtatgtggtcgtggacaatgcagagttccagatgctggggagcgaagcagccgtgcgtcatcgggtgctggaggtggtgaatcacgtggacaagctatatcagaaactcaacttccgtgtggtcctggtgggcctggagatttggaatagtcaggacaggttccacgtcagccccgaccccagtgtcacactggagaacctcctgacctggcaggcacggcaacggacacggcggcacctgcatgacaacgtacagctcatcacgggtgtcgacttcaccgggactaccgtggggtttgccagggtgtccgccatgtgctcccacagctcaggggctgtgaaccaggaccacagcaagaaccccgtgggcgtggcctgtaccatggcccatgagatgggccacaacctgggcatggaccatgatgagaacgtccagggctgccgctgccaggaacgcttcgaggccggccgctgcatcatggcgggcagcattggctccagtttccccaggatgttcagtgactgcagccaggcctacctggagagctttttggagcggccgcagtcggtgtgcctcgccaacgcccctgacctcagccacctggtgggcggccccgtgtgtgggaacctgtttgtggagcgtggggagcagtgcgactgcggcccccccgaggactgccggaaccgctgctgcaactctaccacctgccagctggctgagggggcccagtgtgcgcacggtacctgctgccaggagtgcaaggtgaagccggctggtgagctgtgccgtcccaagaaggacatgtgtgacctcgaggagttctgtgacggccggcaccctgagtgcccggaagacgccttccaggagaacggcacgccctgctccgggggctactgctacaacggggcctgtcccacactggcccagcagtgccaggccttctgggggccaggtgggcaggctgccgaggagtcctgcttctcctatgacatcctaccaggctgcaaggccagccggtacagggctgacatgtgtggcgttctgcagtgcaagggtgggcagcagcccctggggcgtgccatctgcatcgtggatgtgtgccacgcgctcaccacagaggatggcactgcgtatgaaccagtgcccgagggcacccggtgtggaccagagaaggtgtgcaaccacaagcaggagtgccactgccacgcgggctgggccccgccccactgcgcgaagctgctgactgaggtgcacgcagcgtccgggagcctccccgtcttcgtggtggtggttctggtgctcctggcagttgtgctggtcaccctggcaggcatcatcgtctaccgcaaagcccggagccgcatcctgagcaggaacgtggctcccaagaccacaatggggcgctccaaccccctgttccaccaggctgccagccgcgtgccggccaagggcggggctccagccccatccaggggcccccaagagctggtccccaccacccacccgggccagcccgcccgacacccggcctcctcggtggctctgaagaggccgccccctgctcctccggtcactgtgtccagcccacccttcccagttcctgtctacacccggcaggcaccaaagcagggtgctgttggcccaaaggttgccctgaagccccccatccagaggaagcaaggagccggagctcccacagcaccctaggggggcacctgcgcctgtgtggaaatttggagaagttgcggcagagaagccatgcgttccagcattccacggtccagctagtgccgctcagccctagaccctgactttgcaggctcagctgctgttctaacctcaggaatgcatctacctgagaggctcctgctgtccacgccctcagccaattcctt

SEQ ID NO: 62973 - protein, 811 aa, Artificial Sequence
  derived and/or modified sequence
MDRRSMGETESGDAFLDLKKPPASKCPHRYTKEELLDIKELPHSKQRPSCLSEKYDSDGVWDPEKWHASLYPASGRSSPVESLKKELDTDRPSLVRRIVGIVECNGGVAEEDEVEVILAQEPAADQEVPRDAVLPEQSPGDFDFNEFFNLDKVPCLASMIEDVLGEGSVSASRFSRWFSNPSRSGSRSSSLGSTPHEELERLAGLEQAILSPGQNSGNYFAPIPLEDHAENKVDILEMLQKAKVDLKPLLSSLSANKEKLKESSHSGVVLSVEEVEAGLKGLKVDQQVKNSTPFMAEHLEETLSAVTNNRQLKKDGDMTAFNKLVSTMKRNLESHLMSPAEIPGQPVPKNILQELLGQPVQRPASSNLLSGLMGSLEPTTSLLGQRAPSPPLSQVFQTRAASADYLRPRIPSPIGFTPGPQQLLGDPFQGMRKPMSPITAQQMSQLELQQAALEGLALPHDLAVQAANFYQPGFGKPQVDRTRDGFRNRQQRVTKSPAPVHRGNSSSPAPAASITSMLSPSFTPTSVIRKMYESKEKSKEEPASGKAALGDSKEDTQKASEENLLSSSSVPSADRDSSPTTNSKLSALQRSSCSTPLSQANRYTKEQDYRPKATGRKTPTLASPVPTTPFLRPVHQVPLVPHVPMVRPAHQLHPGLVQRMLAQGVHPQHLPSLLQTGVLPPGMDLSHLQGISGPILGQPFYPLPAASHPLLNPRPGTPLHLAMVQQQLQRSVLHPPGSGSHAAAVSVQTTPQNVPSRSGLPHMHSQLEHRPSQRSSSPVGLAKWFGSDVLQQPLPSMPAKVISVDELEYRQ

SEQ ID NO: 62974 - protein, 63 aa, Artificial Sequence
  derived and/or modified sequence
MDRRSMGETESGDAFLDLKKPPASKCPHRYTKEELLDIKELPHSKQRPSCLSEKYDSDGVWDP

SEQ ID NO: 62975 - DNA, 3111 bp, Artificial Sequence
  derived and/or modified sequence
gagacagcccaagccggtcggggtgggggcgcgagagcgaaggctgcggggagcggcgctgggaccggtgcgggcagcggggaggggagcggcggccgaggcaaagggccgccgagcggcggaggcaccgagtgcagagcattgtagaccaaggagccatggataggagaagtatgggtgaaacagaaagtggagatgctttccttgacctgaagaagcctcctgcctccaaatgcccccatcgctatacaaaagaagaactcttggatataaaagaactcccccattccaaacagaggccttcatgcctttctgaaaaatatgacagtgatggtgtctgggaccctgagaagtggcatgcctctctctacccagcttcagggcggagctcaccagtggaaagtctgaagaaagagttggatacagaccggccttccctggtgcgcaggatagtaggtatagtagagtgcaatggaggagtggccgaagaggatgaagtggaggtcatccttgcacaggagcctgcggctgatcaggaagtgccaagggatgctgtcttgcctgagcagtccccaggagactttgactttaatgagttctttaaccttgataaggtgccatgcttggcttcgatgatagaagatgttttgggagaagggtcagtctctgccagtcggttcagtaggtggttctctaacccgagcagatcaggaagccgatccagcagtcttgggtcaacaccacatgaagagctagagagacttgcaggtctggagcaagccatcctctctcctggacagaactcggggaattactttgctcctataccattggaagaccatgctgaaaataaagtggatattttagaaatgctacagaaagccaaagtggatttgaaacctcttctttccagcctttctgcaaataaagaaaaacttaaagaaagctcacattcaggggttgtgctttcagtggaggaggtagaagcaggtctgaagggcttgaaggttgaccagcaagtgaagaattcaactcccttcatggcagaacacctagaagagaccttgagtgccgtaaccaacaatcgacaactgaagaaagacggagacatgactgcgttcaacaagctagtgagcacaatgaagcgaaaccttgaaagccatttgatgtcccctgctgagattccaggccagcctgtccctaagaacatcctgcaggaacttctgggtcaaccagttcagagacctgcttcttccaatcttctgagtggccttatggggagcttggagcctacaacatctttactgggccaaagagcaccctctcctcccttgtcacaggtgtttcaaactcgagcagcctcagctgactaccttcgcccaagaataccatcaccaattggtttcacaccaggaccacagcagctactcggagatccattccaaggcatgcgcaaacccatgagccccatcacagcccagcagatgagccagctggagttgcaacaggcagctttagaagggctggccttgccacatgaccttgctgtacaggcagcaaacttctaccagcctggttttggcaaaccacaggtggacagaaccagagatggattcagaaacaggcaacagcgagtgaccaagtcaccagcacccgtgcatcgagggaattcctcttcccctgcccctgctgcctccatcacaagcatgctttctccttcctttacccctacctcagtgattcgtaagatgtacgagagcaaagagaaaagcaaggaggagccagcatctggaaaagcagctcttggtgacagtaaagaggatactcagaaggccagtgaagaaaacctcctgtcatccagctctgtacccagtgccgatcgagactcttctcccactacaaattccaaactgtcagcattacagaggtcttcgtgttccaccccactgtcccaggccaaccgttacaccaaagaacaagattatcgacctaaagcaactgggagaaaaacacccaccttggcatccccagttcctacaacaccttttctccgccctgtccaccaagttccccttgtcccccatgtccctatggttaggcctgctcaccagcttcacccagggttggtacagaggatgctggcccagggagtacatccacagcatcttccaagtttgctccaaactggtgtgcttcctcctgggatggacttgagtcatttacagggaatatctggccccatcctgggtcagcccttttaccctttacctgctgctagtcaccctctcttaaaccctcgtcctggaacacctctgcatctggcaatggtgcaacagcagctacagcgctcagttctgcatcctccaggctctggttcccatgcagcagctgtcagcgttcagacaacccctcagaacgtgcccagccggtcaggcctgccccacatgcactcccagctggagcatcgccccagccagaggagcagctcccctgtgggccttgccaaatggtttggctcagatgtgctacagcaacccctgccctccatgcccgccaaagttatcagtgtagatgaattggaataccgacagtgagcagggcaggcagactcaactaagcccggacctgtggtggcacactgggcaggaccctgcttcatctcgggttggtttatgggcttttactttggagcactctgtgtgaagctgtttggtggaacccatgcatctggtgtggtccgcattatgatggaaggatcttaaccagtcgagtggagtgtacattgtctgaatacaggatgcacaatgttgtcaatcctggaaatggtctttcttttttgtaagatatgtgaatgaagtgttggtgtcctcaccaagaggtggcacctaagggttctgaggaaataaatgtatagacccttatgtacagacctgtgtataaacaacttttgtatatacatataggatagcttttttgaactatacagctgtacataaaagtagctgatattagttaggcctgtgtcaacagtttggatttttttcacttgtacatttgggattttcttttggttgattaaaattgcatatgctaagtgtgtgaatgaagtaa

SEQ ID NO: 62976 - DNA, 2436 bp, Artificial Sequence
  derived and/or modified sequence
atggacaggcgtagtatgggggagacagaatcaggcgacgcatttcttgacttgaagaagcctccggccagtaagtgtccgcaccgctacaccaaggaagagttgctggacataaaggagcttcctcactcaaaacagcgtccttcctgcctctcagagaaatatgactccgatggagtatgggatccagaaaagtggcatgcctctctgtacccggcctccggtcgcagctccccagtcgaaagcctcaagaaggagctggatactgacagaccatctttggtgcggcgaattgtgggcatagtggaatgcaacggaggggtggccgaggaggatgaggtggaggttatcttggctcaggagcctgctgctgaccaggaggtgcctagagatgccgtccttccagagcagagcccaggtgacttcgacttcaatgagttcttcaacctcgacaaggtcccgtgcctcgcatctatgattgaagatgtgctgggtgaaggatcggtgtcagccagcagatttagccggtggttctccaacccctctagaagcggctctcgttcttcgtccttgggttccaccccccatgaagaattggagagactggctgggctggagcaggccatcttgtccccgggacagaactccggaaactattttgcccccatcccactggaggatcacgctgagaataaggtcgacatactcgagatgctgcaaaaagctaaggtcgacctgaaacctctcctctcctccctaagcgcaaataaagaaaagttgaaggaatctagccattccggagtagtgttatccgtggaagaagtcgaggctggtcttaaggggctcaaagtggaccagcaggtcaagaatagtacccccttcatggccgagcacttggaagagactttgtctgctgttacaaacaatcggcagcttaagaaagatggcgacatgaccgcgttcaacaagctcgtgagcacaatgaagagaaatttagagtcacacctgatgtcccccgccgaaatccctgggcaacctgtgccgaaaaacatcctgcaagaattgctaggtcagccggtccagcgaccagcctcatctaatctgctgagtgggctgatgggttccctggagccgacgacatcactgttgggccagcgcgccccaagtcctcctttgagccaggtgttccagacgcgcgctgcaagcgccgactatctaagacccagaataccctcgccaattggatttacacccggcccacagcagctgttaggcgaccccttccaaggaatgaggaaaccaatgtctccgatcacagctcagcagatgagtcagcttgaacttcagcaggctgcactcgagggcttagcacttccccacgacctggcggtccaggccgccaatttctatcagcccgggtttgggaagccccaggtcgaccgtactcgtgatggttttcgaaatcggcagcagcgcgttaccaaatccccagccccggtgcaccgaggtaacagcagttcacctgcccccgccgcgtcaattacctctatgctgtccccttcttttaccccaacttcagtgattcgtaaaatgtacgaatctaaagagaagagcaaggaagagcccgccagcgggaaggccgccctgggagatagcaaggaagatacacagaaagccagcgaagaaaacctgctgagcagctcttcagtgccttcagctgatagagactcgagcccaacgaccaacagcaaactgagcgccctccagcgcagcagctgcagcacccccctgtcccaagctaaccggtacactaaagaacaggattaccggccgaaggccactggtaggaagacaccaaccctagcgagccccgttcctaccacccctttcctccgacccgtacaccaagtgcccttagtccctcacgtgccaatggtacgaccagcacaccagctccatcccggactggttcaaagaatgctggctcagggcgtccatccacagcacctgccttcactgctacaaacgggggtgcttcctcccggaatggacctatcccaccttcaaggcatcagcgggcccattcttggtcagcccttttatcctctgccagcggcctctcatccgctcttaaacccgcgacccgggactcctttgcatttagctatggtgcagcaacagctacagcgatccgtcttgcacccccctggttccggatcgcacgccgccgcagtctctgtgcaaaccactccacagaatgtgccaagccgctccggtctcccccacatgcactcacagcttgagcacagaccttctcagcggagtagcagcccggtcgggctcgccaagtggttcgggtcagacgtgctccagcaacctctgccctctatgccggcaaaggtcatttcggtggacgagctcgagtataggcagtag

SEQ ID NO: 62977 - DNA, 2436 bp, Artificial Sequence
  derived and/or modified sequence
atggacagaagatccatgggagaaacagaaagtggagatgccttcctggacctgaagaagcccccagccagcaaatgtccccaccgctacaccaaggaggagctgctggacatcaaggagctgccccacagcaagcagaggcccagctgcctgtctgagaagtatgacagtgatggagtgtgggaccctgagaagtggcacgccagcctgtacccagccagcggccgcagcagccctgtggagagcctgaagaaggagctggacacagaccggcccagcctggtgcggcgcatcgtgggcatcgtggagtgcaatggaggagtggccgaggaggatgaggtggaggtgatcctggcccaggagcctgctgctgaccaggaggtgcccagagatgctgtgctgcctgagcagagccctggggactttgacttcaatgagttcttcaacctggacaaggtgccctgcctggcctccatgattgaagatgtgctgggggagggctctgtgtctgccagccgcttcagccgctggttcagcaaccccagccgcagcggcagccgcagcagcagcctgggcagcacccctcatgaggagctggagcggctggccggcctggagcaggccatcctgagccctggccagaacagcggcaactactttgcccccatccccctggaggaccatgctgagaacaaggtggacatcctggagatgctgcagaaggccaaggtggacctgaagcccctgctgagcagcctgagcgccaacaaggagaagctgaaggagagcagccacagcggcgtggtgctgtctgtggaggaggtggaggccggcctgaagggcctgaaggtggaccagcaggtgaagaacagcacccccttcatggccgagcacctggaggagaccctgtctgctgtgaccaacaaccggcagctgaagaaggatggagacatgacagccttcaacaagctggtgtccaccatgaagaggaacctggagagccacctgatgagccctgctgagatccctggccagcctgtgcccaagaacatcctgcaggagctgctgggccagcctgtgcagaggcctgccagcagcaacctgctgagcggcctgatgggcagcctggagcccaccaccagcctgctgggccagagggcccccagcccccccctgagccaggtgttccagacccgggccgccagcgctgactacctgcggccccgcatccccagccccatcggcttcaccccaggcccccagcagctgctgggggaccccttccagggcatgaggaagcccatgagccccatcacagcccagcagatgagccagctggagctgcagcaggccgccctggagggcctggccctgccccatgacctggccgtgcaggccgccaacttctaccagcccggctttgggaagccccaggtggacaggaccagagatggcttcaggaaccggcagcagagggtgaccaagagccctgcccctgtgcaccggggcaacagcagcagccctgccccagctgccagcatcacctccatgctgagccccagcttcacccccaccagcgtcatcaggaagatgtatgagagcaaggagaagagcaaggaggagcccgccagcggcaaggccgccctgggggacagcaaggaggacacccagaaggccagcgaggagaacctgctgagcagcagctctgtgcccagcgctgaccgggacagcagccccaccaccaacagcaagctgagcgccctgcagaggagcagctgcagcacccccctgagccaggccaaccgctacaccaaggagcaggactaccggcccaaggccaccggcaggaagacccccaccctggccagccctgtgcccaccacccccttcctgcggcctgtgcaccaggtgcccctggtgccccacgtgcccatggtgcggcctgcccaccagctgcaccctggcctggtgcagaggatgctggcccagggcgtgcacccccagcacctgcccagcctgctgcagacaggagtgctgcccccaggcatggacctgagccacctgcagggcatcagcggccccatcctgggccagcccttctaccccctgcctgctgccagccaccccctgctgaaccccaggcctggcacccccctgcacctggccatggtgcagcagcagctgcagaggtctgtgctgcaccccccaggcagcggcagccacgccgctgctgtgtctgtgcagaccaccccccagaatgtgcccagccgcagcggcctgccccacatgcacagccagctggagcaccggcccagccagaggagcagcagccctgtgggcctggccaagtggtttggaagtgatgtgctgcagcagcccctgcccagcatgcctgccaaggtgatctctgtggatgagctggagtaccggcagtag

SEQ ID NO: 62978 - DNA, 2436 bp, Artificial Sequence
  derived and/or modified sequence
atggaccggcggagcatgggcgagaccgagagcggcgacgccttcctggaccttaagaaaccccctgcttctaagtgcccgcaccgctacaccaaggaagagctactagatattaaggagttgccgcatagcaagcaacgcccatcttgtcttagcgaaaagtatgattcagacggtgtgtgggacccggagaagtggcacgctagcctgtatcctgcctccggtcgctcaagcccagtcgagtctcttaaaaaggagctggacacggatcgaccgtctctcgtaaggcggatcgtgggaatagttgaatgtaatggaggcgtggctgaggaggatgaagttgaagtcattctggcacaggaacccgcggctgaccaggaagttcctcgcgatgctgtgctccctgagcagagcccgggcgatttcgatttcaatgagtttttcaacctggataaagtcccttgtctggcttcaatgatagaggatgtgcttggggaaggcagcgtgtctgcgagcaggttcagccgctggttttccaacccctcacgcagcggctctcggtcttccagcctcggcagtacccctcacgaggaactcgaacggctggccggtctggagcaggcaatactatcgccagggcaaaattccggcaattacttcgcacccattccactggaggatcatgcagagaacaaggtagacatactcgaaatgttacagaaagctaaggtcgacctgaagcctctgctttcgtctctttcagccaacaaggaaaaattaaaggaaagttcccacagcggggtggtgctatccgttgaggaggtcgaggccgggctcaagggactcaaagttgatcagcaggtaaagaactccacaccattcatggctgagcacctggaagagaccctttctgctgtgacaaataacaggcagctcaaaaaagatggagacatgactgctttcaataagttggtttccacaatgaaaaggaatctggagtcacacctcatgtcccccgccgaaatcccagggcagccagtacccaaaaatatcctgcaggagctgcttggtcagccagttcagagacctgcctcctccaatctgctgtccggactgatgggctccctcgagcccactacgtcattgctcgggcagcgagccccatctccccctctgagccaggtgtttcagacacgggcagcatcagccgattacctccggcctcgcatcccgtcccccattggctttacgccaggaccccagcagttacttggggaccccttccaagggatgcgtaaaccaatgagccccatcactgctcagcagatgtcgcagctagaactgcaacaagccgcccttgagggtctcgctctccctcatgacctcgctgtgcaagccgccaacttctaccagcctggttttggcaagccacaagtcgatagaacacgagacgggtttagaaacaggcagcagcgagtaacaaaatcccctgctcctgtccacaggggaaacagttccagcccggcacccgccgccagcattactagcatgctctccccctcttttacaccaacctccgtcatccgcaagatgtacgagtcgaaggaaaagtccaaggaagagcccgctagtggtaaggcagccctgggagatagcaaagaggacacacaaaaagctagcgaggagaacctcctgtcttcctctagtgtcccctccgctgatcgcgactcgagtcctactactaactcaaagctatctgccctgcagcggtcgtcgtgttccactcccttgtctcaggcaaacagatataccaaggagcaggattataggcccaaagcgaccgggagaaagacgcctacgctggcatcccccgtgccaactaccccctttcttagacccgttcaccaggtcccactggtgcctcatgtcccgatggtcagaccagcccatcaacttcatccgggactggtgcaacgcatgcttgctcagggggtgcatccccagcacctgccaagcctgttgcaaaccggggtgctccctccagggatggatttgagccatcttcagggcatcagcgggccaattttgggtcaacctttctatcccctgcctgctgcttcacacccattgcttaacccacgccccggtacacccctccatttggcaatggtccagcagcagcttcagcggtcagtgctgcacccccctggatccggctcccatgcagccgccgtgtctgttcagaccaccccacagaatgtgccttcaaggtcaggcctgccccacatgcattcgcaacttgagcaccgtcctagtcagcggagctcctctcccgtcggtttagccaaatggtttgggtccgacgtactacaacaacccctaccttccatgccggcaaaggtaatatccgtggatgagcttgagtatcggcagtag

SEQ ID NO: 62979 - DNA, 2436 bp, Artificial Sequence
  derived and/or modified sequence
atggatcggcgatcaatgggagagactgaaagcggggacgccttcctggaccttaaaaaaccacctgcttctaagtgcccacacaggtatactaaggaggagttattggacatcaaagagctgccacactccaagcagcggccatcatgtctaagtgaaaaatacgatagtgatggggtgtgggatcctgaaaaatggcacgcttccctatatcccgcatctggccgaagctccccagtggaatccctcaaaaaggaactggataccgacaggcctagccttgttcgaaggattgtgggaattgttgagtgcaatgggggagtggctgaggaggacgaagtagaggtgatcctcgctcaagagccagcagcagatcaggaggtgcctagagacgccgtgctgccagaacaatccccaggcgattttgatttcaacgagttcttcaaccttgacaaggtcccttgtttggctagcatgattgaggacgttcttggggaggggtctgtgtctgcaagccggttttcccggtggttttcaaacccatcccgcagtggatcccgatcctcttctttgggcagcacgccacatgaagagctggaaaggcttgccggtttagaacaggccatcctgagcccaggacagaactccggtaattattttgccccaatccctctcgaagatcacgctgagaacaaggtcgacatcctggagatgctccaaaaagccaaggtggatctaaaacctctactgtctagcttgtctgcgaacaaggagaagctgaaggaatcctcacacagcggggtggtcctgtctgttgaggaggttgaggctggacttaaagggctaaaagtggaccagcaggtcaaaaattctacacctttcatggcagaacacttggaggagaccctgtctgccgtgaccaataatagacagcttaagaaggacggggatatgactgctttcaacaagctggtaagcactatgaaaaggaaccttgaaagccacctgatgagcccagcggaaatccctggtcagcccgtgccaaaaaacattttgcaggagcttttgggccagcctgtgcagcgtcccgcttctagcaacctcctgtccggcctcatgggatctctggagcccacgacatctctattgggacagcgcgctccctccccccctttgtcacaggtgttccagaccagggcggcaagcgccgattacctgcggccaagaatcccctcaccaatcggattcacccctggtccacaacagctgttgggcgacccattccagggtatgcggaagccaatgagccccattacagcccagcagatgagccaactggaactgcaacaggccgcattagagggcctggctcttcctcacgacttagcagtgcaggccgctaacttctaccagccagggtttggcaagccgcaagtggacaggactcgggacggatttcgaaatagacagcaacgagttaccaaatcccctgcgcctgtgcaccgagggaatagcagctccccagcaccggcagcttccatcacaagcatgttgtccccttctttcacgcctacaagcgtgatccggaagatgtatgagtcaaaggaaaaaagcaaagaggagcctgcctccggcaaggccgctctgggagattcaaaagaggacacacagaaagcgagtgaagaaaacttactgagcagctcctccgtgccctccgctgaccgggattctagtcccacgacgaacagtaagttatccgcattacagcggtcctcctgtagcaccccactctcacaagccaatcgctacacaaaagaacaggactaccgaccgaaagccactggtagaaagacaccgaccctggcctctccagtgccaacaacgccttttctgaggccagtacaccaggtgcccctcgtgcctcatgttccgatggttcggccagctcatcagctgcaccctggcctcgtgcagaggatgttggcacagggggtgcaccctcagcacctgccctccctgctgcagacaggagtccttccacctggaatggatctaagccaccttcaaggtatttctggacccatcttagggcagcctttctatcccctgcccgctgccagtcaccctctgctcaaccctcgcccaggcaccccacttcacttggcgatggtgcagcaacagttgcagagaagtgttcttcatccccctgggtccgggtctcatgccgctgccgtttctgtacaaactactcctcagaacgttccgtcgcgttctggcctgcctcatatgcactcccagctggagcacaggcctagtcagcgcagctcaagccccgtgggcctggcgaagtggttcggcagcgatgtcctgcagcagcctctgccgtcaatgcccgctaaggtcatttcagtcgatgaactcgaataccgacagtag

SEQ ID NO: 62980 - DNA, 2436 bp, Artificial Sequence
  derived and/or modified sequence
atggacagaagaagcatgggcgagaccgagagcggcgacgccttcctggacctgaagaagccccccgccagcaagtgcccccacagatacaccaaggaggagctgctggacatcaaggagctgccccacagcaagcagagacccagctgcctgagcgagaagtacgacagcgacggcgtgtgggaccccgagaagtggcacgccagcctgtaccccgccagcggcagaagcagccccgtggagagcctgaagaaggagctggacaccgacagacccagcctggtgagaagaatcgtgggcatcgtggagtgcaacggcggcgtggccgaggaggacgaggtggaggtgatcctggcccaggagcccgccgccgaccaggaggtgcccagagacgccgtgctgcccgagcagagccccggcgacttcgacttcaacgagttcttcaacctggacaaggtgccctgcctggccagcatgatcgaggacgtgctgggcgagggcagcgtgagcgccagcagattcagcagatggttcagcaaccccagcagaagcggcagcagaagcagcagcctgggcagcaccccccacgaggagctggagagactggccggcctggagcaggccatcctgagccccggccagaacagcggcaactacttcgcccccatccccctggaggaccacgccgagaacaaggtggacatcctggagatgctgcagaaggccaaggtggacctgaagcccctgctgagcagcctgagcgccaacaaggagaagctgaaggagagcagccacagcggcgtggtgctgagcgtggaggaggtggaggccggcctgaagggcctgaaggtggaccagcaggtgaagaacagcacccccttcatggccgagcacctggaggagaccctgagcgccgtgaccaacaacagacagctgaagaaggacggcgacatgaccgccttcaacaagctggtgagcaccatgaagagaaacctggagagccacctgatgagccccgccgagatccccggccagcccgtgcccaagaacatcctgcaggagctgctgggccagcccgtgcagagacccgccagcagcaacctgctgagcggcctgatgggcagcctggagcccaccaccagcctgctgggccagagagcccccagcccccccctgagccaggtgttccagaccagagccgccagcgccgactacctgagacccagaatccccagccccatcggcttcacccccggcccccagcagctgctgggcgaccccttccagggcatgagaaagcccatgagccccatcaccgcccagcagatgagccagctggagctgcagcaggccgccctggagggcctggccctgccccacgacctggccgtgcaggccgccaacttctaccagcccggcttcggcaagccccaggtggacagaaccagagacggcttcagaaacagacagcagagagtgaccaagagccccgcccccgtgcacagaggcaacagcagcagccccgcccccgccgccagcatcaccagcatgctgagccccagcttcacccccaccagcgtgatcagaaagatgtacgagagcaaggagaagagcaaggaggagcccgccagcggcaaggccgccctgggcgacagcaaggaggacacccagaaggccagcgaggagaacctgctgagcagcagcagcgtgcccagcgccgacagagacagcagccccaccaccaacagcaagctgagcgccctgcagagaagcagctgcagcacccccctgagccaggccaacagatacaccaaggagcaggactacagacccaaggccaccggcagaaagacccccaccctggccagccccgtgcccaccacccccttcctgagacccgtgcaccaggtgcccctggtgccccacgtgcccatggtgagacccgcccaccagctgcaccccggcctggtgcagagaatgctggcccagggcgtgcacccccagcacctgcccagcctgctgcagaccggcgtgctgccccccggcatggacctgagccacctgcagggcatcagcggccccatcctgggccagcccttctaccccctgcccgccgccagccaccccctgctgaaccccagacccggcacccccctgcacctggccatggtgcagcagcagctgcagagaagcgtgctgcacccccccggcagcggcagccacgccgccgccgtgagcgtgcagaccaccccccagaacgtgcccagcagaagcggcctgccccacatgcacagccagctggagcacagacccagccagagaagcagcagccccgtgggcctggccaagtggttcggcagcgacgtgctgcagcagcccctgcccagcatgcccgccaaggtgatcagcgtggacgagctggagtacagacagtag

SEQ ID NO: 62981 - protein, 8525 aa, Artificial Sequence
  derived and/or modified sequence
MADDEDYEEVVEYYTEEVVYEEVPGETITKIYETTTTRTSDYEQSETSKPALAQPALAQPASAKPVERRKVIRKKVDPSKFMTPYIAHSQKMQDLFSPNKYKEKFEKTKGQPYASTTDTPELRRIKKVQDQLSEVKYRMDGDVAKTICHVDEKAKDIEHAKKVSQQVSKVLYKQNWEDTKDKYLLPPDAPELVQAVKNTAMFSKKLYTEDWEADKSLFYPYNDSPELRRVAQAQKALSDVAYKKGLAEQQAQFTPLADPPDIEFAKKVTNQVSKQKYKEDYENKIKGKWSETPCFEVANARMNADNISTRKYQEDFENMKDQIYFMQTETPEYKMNKKAGVAASKVKYKEDYEKNKGKADYNVLPASENPQLRQLKAAGDALSDKLYKENYEKTKAKSINYCETPKFKLDTVLQNFSSDKKYKDSYLKDILGHYVGSFEDPYHSHCMKVTAQNSDKNYKAEYEEDRGKGFFPQTITQEYEAIKKLDQCKDHTYKVHPDKTKFTQVTDSPVLLQAQVNSKQLSDLNYKAKHESEKFKCHIPPDTPAFIQHKVNAYNLSDNLYKQDWEKSKAKKFDIKVDAIPLLAAKANTKNTSDVMYKKDYEKNKGKMIGVLSINDDPKMLHSLKVAKNQSDRLYKENYEKTKAKSMNYCETPKYQLDTQLKNFSEARYKDLYVKDVLGHYVGSMEDPYHTHCMKVAAQNSDKSYKAEYEEDKGKCYFPQTITQEYEAIKKLDQCKDHTYKVHPDKTKFTAVTDSPVLLQAQLNTKQLSDLNYKAKHEGEKFKCHIPADAPQFIQHRVNAYNLSDNVYKQDWEKSKAKKFDIKVDAIPLLAAKANTKNTSDVMYKKDYEKSKGKMIGALSINDDPKMLHSLKTAKNQSDREYRKDYEKSKTIYTAPLDMLQVTQAKKSQAIASDVDYKHILHSYSYPPDSINVDLAKKAYALQSDVEYKADYNSWMKGCGWVPFGSLEMEKAKRASDILNEKKYRQHPDTLKFTSIEDAPITVQSKINQAQRSDIAYKAKGEEIIHKYNLPPDLPQFIQAKVNAYNISENMYKADLKDLSKKGYDLRTDAIPIRAAKAARQAASDVQYKKDYEKAKGKMVGFQSLQDDPKLVHYMNVAKIQSDREYKKDYEKTKSKYNTPHDMFNVVAAKKAQDVVSNVNYKHSLHHYTYLPDAMDLELSKNMMQIQSDNVYKEDYNNWMKGIGWIPIGSLDVEKVKKAGDALNEKKYRQHPDTLKFTSIVDSPVMVQAKQNTKQVSDILYKAKGEDVKHKYTMSPDLPQFLQAKCNAYNISDVCYKRDWYDLIAKGNNVLGDAIPITAAKASRNIASDYKYKEAYEKSKGKHVGFRSLQDDPKLVHYMNVAKLQSDREYKKNYENTKTSYHTPGDMVSITAAKMAQDVATNVNYKQPLHHYTYLPDAMSLEHTRNVNQIQSDNVYKDEYNSFLKGIGWIPIGSLEVEKVKKAGDALNERKYRQHPDTVKFTSVPDSMGMVLAQHNTKQLSDLNYKVEGEKLKHKYTIDPELPQFIQAKVNALNMSDAHYKADWKKTIAKGYDLRPDAIPIVAAKSSRNIASDCKYKEAYEKAKGKQVGFLSLQDDPKLVHYMNVAKIQSDREYKKGYEASKTKYHTPLDMVSVTAAKKSQEVATNANYRQSYHHYTLLPDALNVEHSRNAMQIQSDNLYKSDFTNWMKGIGWVPIESLEVEKAKKAGEILSEKKYRQHPEKLKFTYAMDTMEQALNKSNKLNMDKRLYTEKWNKDKTTIHVMPDTPDILLSRVNQITMSDKLYKAGWEEEKKKGYDLRPDAIAIKAARASRDIASDYKYKKAYEQAKGKHIGFRSLEDDPKLVHFMQVAKMQSDREYKKGYEKSKTSFHTPVDMLSVVAAKKSQEVATNANYRNVIHTYNMLPDAMSFELAKNMMQIQSDNQYKADYADFMKGIGWLPLGSLEAEKNKKAMEIISEKKYRQHPDTLKYSTLMDSMNMVLAQNNAKIMNEHLYKQAWEADKTKVHIMPDIPQIILAKANAINMSDKLYKLSLEESKKKGYDLRPDAIPIKAAKASRDIASDYKYKYNYEKGKGKMVGFRSLEDDPKLVHSMQVAKMQSDREYKKNYENTKTSYHTPADMLSVTAAKDAQANITNTNYKHLIHKYILLPDAMNIELTRNMNRIQSDNEYKQDYNEWYKGLGWSPAGSLEVEKAKKATEYASDQKYRQHPSNFQFKKLTDSMDMVLAKQNAHTMNKHLYTIDWNKDKTKIHVMPDTPDILQAKQNQTLYSQKLYKLGWEEALKKGYDLPVDAISVQLAKASRDIASDYKYKQGYRKQLGHHVGFRSLQDDPKLVLSMNVAKMQSEREYKKDFEKWKTKFSSPVDMLGVVLAKKCQELVSDVDYKNYLHQWTCLPDQNDVVQAKKVYELQSENLYKSDLEWLRGIGWSPLGSLEAEKNKRASEIISEKKYRQPPDRNKFTSIPDAMDIVLAKTNAKNRSDRLYREAWDKDKTQIHIMPDTPDIVLAKANLINTSDKLYRMGYEELKRKGYDLPVDAIPIKAAKASREIASEYKYKEGFRKQLGHHIGARNIEDDPKMMWSMHVAKIQSDREYKKDFEKWKTKFSSPVDMLGVVLAKKCQTLVSDVDYKNYLHQWTCLPDQSDVIHARQAYDLQSDNLYKSDLQWLKGIGWMTSGSLEDEKNKRATQILSDHVYRQHPDQFKFSSLMDSIPMVLAKNNAITMNHRLYTEAWDKDKTTVHIMPDTPEVLLAKQNKVNYSEKLYKLGLEEAKRKGYDMRVDAIPIKAAKASRDIASEFKYKEGYRKQLGHHIGARAIRDDPKMMWSMHVAKIQSDREYKKDFEKWKTKFSSPVDMLGVVLAKKCQTLVSDVDYKNYLHQWTCLPDQSDVIHARQAYDLQSDNMYKSDLQWMRGIGWVSIGSLDVEKCKRATEILSDKIYRQPPDRFKFTSVTDSLEQVLAKNNAITMNKRLYTEAWDKDKTQIHIMPDTPEIMLARMNKINYSESLYKLANEEAKKKGYDLRSDAIPIVAAKASRDIISDYKYKDGYCKQLGHHIGARNIEDDPKMMWSMHVAKIQSDREYKKDFEKWKTKFSSPVDMLGVVLAKKCQTLVSDVDYKNYLHEWTCLPDQSDVIHARQAYDLQSDNIYKSDLQWLRGIGWVPIGSMDVVKCKRATEILSDNIYRQPPDKLKFTSVTDSLEQVLAKNNALNMNKRLYTEAWDKDKTQIHIMPDTPEIMLARQNKINYSETLYKLANEEAKKKGYDLRSDAIPIVAAKASRDVISDYKYKDGYRKQLGHHIGARNIEDDPKMMWSMHVAKIQSDREYKKDFEKWKTKFSSPVDMLGVVLAKKCQTLVSDVDYKNYLHEWTCLPDQNDVIHARQAYDLQSDNIYKSDLQWLRGIGWVPIGSMDVVKCKRAAEILSDNIYRQPPDKLKFTSVTDSLEQVLAKNNALNMNKRLYTEAWDKDKTQVHIMPDTPEIMLARQNKINYSESLYRQAMEEAKKEGYDLRSDAIPIVAAKASRDIASDYKYKEAYRKQLGHHIGARAVHDDPKIMWSLHIAKVQSDREYKKDFEKYKTRYSSPVDMLGIVLAKKCQTLVSDVDYKHPLHEWICLPDQNDIIHARKAYDLQSDNLYKSDLEWMKGIGWVPIDSLEVVRAKRAGELLSDTIYRQRPETLKFTSITDTPEQVLAKNNALNMNKRLYTEAWDNDKKTIHVMPDTPEIMLAKLNRINYSDKLYKLALEESKKEGYDLRLDAIPIQAAKASRDIASDYKYKEGYRKQLGHHIGARNIKDDPKMMWSIHVAKIQSDREYKKEFEKWKTKFSSPVDMLGVVLAKKCQILVSDIDYKHPLHEWTCLPDQNDVIQARKAYDLQSDAIYKSDLEWLRGIGWVPIGSVEVEKVKRAGEILSDRKYRQPADQLKFTCITDTPEIVLAKNNALTMSKHLYTEAWDADKTSIHVMPDTPDILLAKSNSANISQKLYTKGWDESKMKDYDLRADAISIKSAKASRDIASDYKYKEAYEKQKGHHIGAQSIEDDPKIMCAIHAGKIQSEREYKKEFQKWKTKFSSPVDMLSILLAKKCQTLVTDIDYRNYLHEWTCMPDQNDIIQAKKAYDLQSDSVYKADLEWLRGIGWMPEGSVEMNRVKVAQDLVNERLYRTRPEALSFTSIVDTPEVVLAKANSLQISEKLYQEAWNKDKSNITIPSDTPEMLQAHINALQISNKLYQKDWNDAKQKGYDIRADAIEIKHAKASREIASEYKYKEGYRKQLGHHMGFRTLQDDPKSVWAIHAAKIQSDREYKKAYEKSKGIHNTPLDMMSIVQAKKCQVLVSDIDYRNYLHQWTCLPDQNDVIQAKKAYDLQSDNLYKSDLEWLKGIGWLPEGSVEVMRVKNAQNLLNERLYRIKPEALKFTSIVDTPEVIQAKINAVQISEPLYRDAWEKEKANVNVPADTPLMLQSKINALQISNKRYQQAWEDVKMTGYDLRADAIGIQHAKASRDIASDYLYKTAYEKQKGHYIGCRSAKEDPKLVWAANVLKMQNDRLYKKAYNDHKAKISIPVDMVSISAAKEGQALASDVDYRHYLHHWSCFPDQNDVIQARKAYDLQSDSVYKADLEWLRGIGWMPEGSVEMNRVKVAQDLVNERLYRTRPEALSFTSIVDTPEVVLAKANSLQISEKLYQEAWNKDKSNITIPSDTPEMLQAHINALQISNKLYQKDWNDTKQKGYDIRADAIEIKHAKASREIASEYKYKEGYRKQLGHHMGFRTLQDDPKSVWAIHAAKIQSDREYKKAYEKSKGIHNTPLDMMSIVQAKKCQVLVSDIDYRNYLHQWTCLPDQNDVIQAKKAYDLQSDNLYKSDLEWLKGIGWLPEGSVEVMRVKNAQNLLNERLYRIKPEALKFTSIVDTPEVIQAKINAVQISEPLYRNAWEKEKANVNVPADTPLMLQSKINALQISNKRYQQAWEDVKMTGYDLRADAIGIQHAKASRDIASDYLYKTAYEKQKGHYIGCRSAKEDPKLVWAANVLKMQNDRLYKKAYNDHKAKISIPVDMVSISAAKEGQALASDVDYRHYLHHWSCFPDQNDVIQARKAYDLQSDSVYKADLEWLRGIGWMPEGSVEMNRVKVAQDLVNERLYRTRPEALSFTSIVDTPEVVLAKANSLQISEKLYQEAWNKDKSNITIPSDTPEMLQAHINALQISNKLYQKDWNDTKQKGYDIRADAIEIKHAKASREIASEYKYKEGYRKQLGHHMGFRTLQDDPKSVWAIHAAKIQSDREYKKAYEKSKGIHNTPLDMMSIVQAKKCQVLVSDIDYRNYLHQWTCLPDQNDVIQAKKAYDLQSDNLYKSDLEWLKGIGWLPEGSVEVMRVKNAQNLLNERLYRIKPEALKFTSIVDTPEVIQAKINAVQISEPLYRDAWEKEKANVNVPADTPLMLQSKINALQISNKRYQQAWEDVKMTGYDLRADAIGIQHAKASRDIASDYLYKTAYEKQKGHYIGCRSAKEDPKLVWAANVLKMQNDRLYKKAYNDHKAKISIPVDMVSISAAKEGQALASDVDYRHYLHRWSCFPDQNDVIQARKAYDLQSDALYKADLEWLRGIGWMPQGSPEVLRVKNAQNIFCDSVYRTPVVNLKYTSIVDTPEVVLAKSNAENISIPKYREVWDKDKTSIHIMPDTPEINLARANALNVSNKLYREGWDEMKAGCDVRLDAIPIQAAKASREIASDYKYKLDHEKQKGHYVGTLTARDDNKIRWALIADKLQNEREYRLDWAKWKAKIQSPVDMLSILHSKNSQALVSDMDYRNYLHQWTCMPDQNDVIQAKKAYELQSDNVYKADLEWLRGIGWMPNDSVSVNHAKHAADIFSEKKYRTKIETLNFTPVDDRVDYVTAKQSGEILDDIKYRKDWNATKSKYTLTETPLLHTAQEAARILDQYLYKEGWERQKATGYILPPDAVPFVHAHHCNDVQSELKYKAEHVKQKGHYVGVPTMRDDPKLVWFEHAGQIQNERLYKEDYHKTKAKINIPADMVSVLAAKQGQTLVSDIDYRNYLHQWMCHPDQNDVIQARKAYDLQSDNVYRADLEWLRGIGWIPLDSVDHVRVTKNQEMMSQIKYKKNALENYPNFRSVVDPPEIVLAKINSVNQSDVKYKETFNKAKGKYTFSPDTPHISHSKDMGKLYSTILYKGAWEGTKAYGYTLDERYIPIVGAKHADLVNSELKYKETYEKQKGHYLAGKVIGEFPGVVHCLDFQKMRSALNYRKHYEDTKANVHIPNDMMNHVLAKRCQYILSDLEYRHYFHQWTSLLEEPNVIRVRNAQEILSDNVYKDDLNWLKGIGCYVWDTPQILHAKKSYDLQSQLQYTAAGKENLQNYNLVTDTPLYVTAVQSGINASEVKYKENYHQIKDKYTTVLETVDYDRTRNLKNLYSSNLYKEAWDRVKATSYILPSSTLSLTHAKNQKHLASHIKYREEYEKFKALYTLPRSVDDDPNTARCLRVGKLNIDRLYRSVYEKNKMKIHIVPDMVEMVTAKDSQKKVSEIDYRLRLHEWICHPDLQVNDHVRKVTDQISDIVYKDDLNWLKGIGCYVWDTPEILHAKHAYDLRDDIKYKAHMLKTRNDYKLVTDTPVYVQAVKSGKQLSDAVYHYDYVHSVRGKVAPTTKTVDLDRALHAYKLQSSNLYKTSLRTLPTGYRLPGDTPHFKHIKDTRYMSSYFKYKEAYEHTKAYGYTLGPKDVPFVHVRRVNNVTSERLYRELYHKLKDKIHTTPDTPEIRQVKKTQEAVSELIYKSDFFKMQGHMISLPYTPQVIHCRYVGDITSDIKYKEDLQVLKGFGCFLYDTPDMVRSRHLRKLWSNYLYTDKARKMRDKYKVVLDTPEYRKVQELKTHLSELVYRAAGKKQKSIFTSVPDTPDLLRAKRGQKLQSQYLYVELATKERPHHHAGNQTTALKHAKDVKDMVSEKKYKIQYEKMKDKYTPVPDTPILIRAKRAYWNASDLRYKETFQKTKGKYHTVKDALDIVYHRKVTDDISKIKYKENYMSQLGIWRSIPDRPEHFHHRAVTDTVSDVKYKEDLTWLKGIGCYAYDTPDFTLAEKNKTLYSKYKYKEVFERTKSDFKYVADSPINRHFKYATQLMNEKKYRADYEQRKDKYHLVVDEPRHLLAKTAGDQISQIKYRKNYEKSKDKFTSIVDTPEHLRTTKVNKQISDILYKLEYNKAKPRGYTTIHDTPMLLHVRKVKDEVSDLKYKEVYQRNKSNCTIEPDAVHIKAAKDAYKVNTNLDYKKQYEANKAHWKWTPDRPDFLQAAKSSLQQSDFEYKLDREFLKGCKLSVTDDKNTVLALRNTLIESDLKYKEKHVKERGTCHAVPDTPQILLAKTVSNLVSENKYKDHVKKHLAQGSYTTLPETRDTVHVKEVTKHVSDTNYKKKFVKEKGKSNYSIMLEPPEVKHAMEVAKKQSDVAYRKDAKENLHYTTVADRPDIKKATQAAKQASEVEYRAKHRKEGSHGLSMLGRPDIEMAKKAAKLSSQVKYRENFDKEKGKTPKYNPKDSQLYKVMKDANNLASEVKYKADLKKLHKPVTDMKESLIMNHVLNTSQLASSYQYKKKYEKSKGHYHTIPDNLEQLHLKEATELQSIVKYKEKYEKERGKPMLDFETPTYITAKESQQMQSGKEYRKDYEESIKGRNLTGLEVTPALLHVKYATKIASEKEYRKDLEESIRGKGLTEMEDTPDMLRAKNATQILNEKEYKRDLELEVKGRGLNAMANETPDFMRARNATDIASQIKYKQSAEMEKANFTSVVDTPEIIHAQQVKNLSSQKKYKEDAEKSMSYYETVLDTPEIQRVRENQKNFSLLQYQCDLKNSKGKITVVQDTPEILRVKENQKNFSSVLYKEDVSPGTAIGKTPEMMRVKQTQDHISSVKYKEAIGQGTPIPDLPEVKRVKETQKHISSVMYKENLGTGIPTTVTPEIERVKRNQENFSSVLYKENLGKGIPTPITPEMERVKRNQENFSSILYKENLSKGTPLPVTPEMERVKLNQENFSSVLYKENVGKGIPIPITPEMERVKHNQENFSSVLYKENLGTGIPIPITPEMQRVKHNQENLSSVLYKENMGKGTPLPVTPEMERVKHNQENISSVLYKENMGKGTPLPVTPEMERVKHNQENISSVLYKENMGKGTPLAVTPEMERVKHNQENISSVLYKENVGKATATPVTPEMQRVKRNQENISSVLYKENLGKATPTPFTPEMERVKRNQENFSSVLYKENMRKATPTPVTPEMERAKRNQENISSVLYSDSFRKQIQGKAAYVLDTPEMRRVRETQRHISTVKYHEDFEKHKGCFTPVVTDPITERVKKNMQDFSDINYRGIQRKVVEMEQKRNDQDQETITGLRVWRTNPGSVFDYDPAEDNIQSRSLHMINVQAQRRSREQSRSASALSISGGEEKSEHSEAPDHHLSTYSDGGVFAVSTAYKHAKTTELPQQRSSSVATQQTTVSSIPSHPSTAGKIFRAMYDYMAADADEVSFKDGDAIINVQAIDEGWMYGTVQRTGRTGMLPANYVEAI

SEQ ID NO: 62982 - DNA, 26202 bp, Artificial Sequence
  derived and/or modified sequence
aggcatcacgctggcttttgcctggggttctcaggaggggagagttgggagaggctttgctgctgaggaaatttatttggtagattgaaggtttgaacgagagctacagaaacgaaagaaaaagtctgtataagccaatggtgttcgggaagaaaataaccccattgccttgagtttgtaggtgccactactactctggaaaaatggcagatgacgaagactatgaggaggtggtggagtactacacagaagaagtggtttacgaagaggtgccgggagagacaataacaaaaatttatgagactacgacaacaaggacatctgactatgagcaatcagaaacttccaaaccagctctggcacagccagcactggcacagccagcatcagcaaagccggtggagaggaggaaggtcatccggaagaaagtggatccttcaaagttcatgaccccctacattgcacacagtcagaaaatgcaggatctttttagcccaaataaatacaaggagaagtttgagaaaacaaaaggacagccatacgccagcacaacagatactccagaacttcgcagaatcaaaaaagtacaagatcaactcagtgaggttaagtatcgaatggatggtgatgttgctaagactatatgtcacgtagatgaaaaagcaaaggatattgaacatgcaaagaaagtgtcgcagcaagtcagtaaggttttatacaagcagaactgggaagacaccaaggataagtacctgcttcctcctgatgcccctgaacttgtccaggccgttaagaacaccgccatgttcagcaagaaactgtacactgaagactgggaagcagacaaaagtttgttttacccctataatgatagcccggaactgaggagagttgcccaggcccagaaagctctcagtgatgttgcctacaaaaaaggtctcgctgaacagcaagctcaattcacgcctctggctgatcctccagatatagaatttgccaagaaagtaaccaatcaagtgagcaagcaaaaatacaaagaagactatgaaaataaaatcaaaggcaaatggagtgagacaccttgctttgaagttgcaaatgccagaatgaatgctgataacattagcacaaggaaataccaggaagattttgaaaacatgaaagaccagatctacttcatgcagaccgaaacaccagagtataaaatgaataaaaaagctggtgtggcagctagcaaggtaaaatacaaagaagactatgaaaagaataaaggaaaagcagattataatgtgcttcctgcttcagagaacccacagcttaggcagctgaaggcagcaggagatgccctaagtgacaaactatacaaggaaaactatgaaaagacaaaagcaaagagcataaattactgcgagacccccaaattcaagctcgatactgttctgcagaacttcagtagtgataaaaaatataaagattcctacttaaaagatattttgggacattatgtaggcagcttcgaggatccataccattcacactgcatgaaagtcacagctcaaaacagtgataaaaactacaaagcagaatacgaagaagacagaggcaaaggcttcttccctcagaccataactcaagaatatgaagcaattaagaaactagatcagtgtaaagaccacacctacaaagtccatccagataagacaaaattcacccaagttacagactctcctgttctgctacaagcccaagtcaattccaaacaactgagtgacttaaattacaaagcaaaacatgaaagtgaaaagttcaagtgccatatcccccctgatactcctgcttttatccagcacaaagtcaatgcctataacttgagtgataatctttataagcaagactgggagaagagcaaagccaaaaagtttgacattaaagtggatgccattcccctgctggcagccaaagccaacaccaagaacaccagcgatgtgatgtacaagaaagactatgaaaaaaacaaagggaaaatgattggagtcctcagcattaatgacgatcccaagatgctgcactccttgaaggtggccaaaaaccagagtgatagattatacaaggaaaactatgagaagacaaaggcaaagagtatgaattactgtgagaccccaaaatatcaacttgatactcagctgaagaacttcagtgaggctagatataaagacttatatgtaaaggatgttttgggacattatgtaggcagcatggaggacccatatcacacacactgcatgaaagttgcagctcaaaacagtgataaaagttacaaagcagaatatgaagaagataaaggaaaatgctatttccctcagacaataacacaagaatatgaagcaatcaagaagctggaccagtgtaaagatcatacctacaaagttcatccagataagaccaaattcacggcagtcactgattctcctgtactgttgcaagcccagctcaacacgaaacagcttagtgatctgaattacaaagcaaaacatgaaggtgagaagttcaagtgccatataccagcagatgctccacagtttatccaacacagagtcaatgcctataatctgagtgataatgtttataagcaagactgggagaagagcaaagccaagaagtttgacattaaagtggacgccattcccctgttggcagccaaagccaacaccaagaacaccagcgatgtgatgtacaagaaagactatgaaaagagcaaagggaaaatgattggagccctcagcattaatgacgatccaaagatgctgcactccttgaagacagccaaaaaccagagtgatcgcgaatatcgaaaagattatgaaaagtcaaaaactatctacacggcacctcttgatatgctccaagtcactcaagctaagaaatctcaggcaattgccagcgacgttgattataagcacatcttacacagttacagctacccccctgatagcatcaatgtggaccttgccaagaaggcatatgcgctgcagagcgatgttgaatacaaagctgactacaatagctggatgaaaggttgtggctgggtgccttttgggtccttagaaatggaaaaggcaaagcgagcttcagacatcctcaatgagaaaaaatatcgccaacatccagacaccctcaagtttacctcgattgaagatgctccaattacagtacagtctaaaattaaccaggcccagaggagtgatatcgcttacaaagccaaaggagaggaaattattcacaaatacaacctgccaccagacctgccccagttcatccaggctaaagttaatgcctacaatatcagtgagaatatgtacaaagcagacttgaaagacttgagcaagaagggatatgacctgagaactgatgcgattcccatcagagctgccaaagctgccaggcaggcggcgagtgacgttcagtacaaaaaagactatgaaaaggctaaagggaaaatggttggcttccaaagtcttcaagatgaccctaaactggttcattatatgaacgtggccaagatacaatcagatcgggagtataaaaaagactatgagaagacaaagtccaaatacaacacgccccatgatatgttcaatgtcgtggcggctaagaaagcccaggatgtggtcagcaatgtcaactataagcattctctccatcattacacctacttgcctgacgccatggacctggagctgtctaagaacatgatgcagatacagagtgataacgtctacaaggaagactacaacaactggatgaaaggcattggctggattcctattggcagtctcgacgtcgaaaaagttaaaaaggccggtgatgctctgaatgaaaagaagtacaggcaacatccagacaccctcaaatttaccagcattgtggactccccagttatggtccaggcaaaacagaacacgaagcaagtcagtgatatcttatacaaggctaaaggagaagatgtgaaacataaatacaccatgagtcctgatcttcctcagtttctccaggccaagtgcaatgcttacaatataagtgacgtctgttataaacgggattggcatgacttaatagccaagggcaacaatgtgctgggcgatgctattcccatcactgcagccaaggcatcgagaaacattgccagtgattataaatacaaggaagcttatgagaagtcaaagggaaagcatgtgggtttcagaagcctccaggatgatcccaagctggtccactatatgaatgtggcaaagctgcagtctgatcgtgaatacaagaagaactatgagaacaccaaaaccagctaccatacccctggggacatggttagcatcacagctgcaaagatggcccaggatgtcgctaccaatgtcaactacaaacagccattgcatcattacacatacctacctgacgccatgagtcttgagcatacgaggaatgtcaatcaaattcagagtgataatgtgtataaagacgagtataacagcttcttgaagggcatcggatggatccctattggttccctggaggtggagaaggtcaagaaagcaggcgatgcattaaatgagaggaagtatcgacagcacccagataccgtcaagttcacaagtgtgcctgattccatgggcatggtgttggctcagcataacacaaagcagctaagtgatttgaactacaaggtagagggagagaaactgaagcacaagtatactattgaccctgaattgcctcagtttattcaagccaaagtcaacgccctcaacatgagtgatgctcattataaagcagattggaagaaaaccattgccaagggctatgatttgagaccagatgccatcccaattgttgctgcaaaaagttcaaggaatattgctagtgattgcaaatataaggaggcctacgagaaagccaaaggcaagcaagttggatttctcagtcttcaggatgatcctaaactggttcactacatgaatgtggccaaaatccagtctgatcgtgagtacaaaaagggctatgaagccagcaagaccaagtaccacacacctctggatatggtcagtgtgacagctgcaaagaaatctcaggaggttgccaccaacgccaactacagacagtcataccaccactacactctcctgcccgatgccttgaatgtggagcactccaggaatgccatgcagattcagagtgataatctgtacaaatctgacttcaccaattggatgaaagggatcggctgggtgcccatagagtccctggaggtggagaaggcaaagaaagcaggagagattcttagtgagaagaagtatcgccagcaccccgagaagctgaagttcacttacgccatggacacaatggaacaggcacttaacaagagtaacaaactgaacatggacaagaggctctacactgaaaaatggaacaaggacaagaccaccattcatgtcatgcctgacacaccggatattttactctccagagtaaaccaaatcaccatgagtgataaactgtacaaagctggctgggaagaggaaaagaagaaaggatatgacctgaggcctgatgccattgcaataaaggctgcaagagcctctagagacattgccagtgattacaaatacaagaaagcctatgaacaagccaaagggaaacacattggcttccggagcctggaagatgaccccaagctggtgcacttcatgcaagtggccaagatgcagtcagaccgggaatacaagaagggatatgagaaatccaagacctccttccacaccccggtggacatgctcagtgtggtggcagccaagaagtctcaggaagtggccaccaatgccaactacaggaacgtgatccatacctacaacatgcttcctgatgccatgagctttgaattggccaaaaatatgatgcagattcaaagtgataatcagtacaaggctgactatgctgacttcatgaagggcattggatggctccctctgggctccctggaagcagagaaaaacaagaaagccatggagattattagtgaaaagaagtaccgccagcacccagacactttgaagtattccacactcatggactcgatgaacatggttttggcccagaataatgcaaaaattatgaacgaacatctctacaaacaagcatgggaggctgacaaaaccaaagtccacatcatgcctgatatcccccagattattttggcaaaggcaaatgcaattaatatgagtgataaactctacaaactttccttggaagagtctaaaaagaaaggctatgatctcagacctgatgcaattcctatcaaagctgccaaggcttccagagatattgcaagtgattataaatacaagtacaattatgaaaaagggaaggggaaaatggttggtttccgcagtctcgaggatgatcccaaattagtccattccatgcaagtggctaagatgcaatctgatcgggagtacaagaaaaactatgagaacacaaagaccagctaccacacccctgccgacatgctcagtgtcacggctgcaaaggatgcccaagccaacatcaccaacactaactacaagcacctgattcacaagtacatcctccttccagatgcaatgaacattgagctgaccaggaatatgaatcgcatacagagtgataatgaatataagcaagattacaatgaatggtacaaagggcttggctggagtccagcaggttctctggaagtggagaaggccaagaaagcaactgaatatgccagtgatcagaaataccgccagcacccgagcaacttccagtttaagaagctgactgattccatggacatggtgcttgccaagcagaatgcacataccatgaacaagcatttatacaccattgattggaataaagataagaccaagattcatgtgatgcctgatacaccagatattttacaagccaagcagaatcaaacactgtatagtcagaaactctataaacttggatgggaagaagctttgaagaaaggctatgatctcccagttgatgcaatttctgtacagctagctaaagcttcaagagacattgctagtgattataaatacaaacaaggctaccgaaagcaacttggccaccatgttggattccggagtctgcaagatgacccaaaacttgtgttgtccatgaatgtagccaaaatgcagagtgaaagagaatacaagaaggactttgagaagtggaaaactaagttctccagcccagtggacatgttgggagtggtactggccaagaagtgtcaggagttggttagtgacgtggactacaagaactacctgcatcagtggacatgtctgcctgatcagaacgatgttgtgcaagctaagaaagtttatgaactgcaaagtgagaatctatataaatctgaccttgagtggctgagaggcataggatggagtcccttgggttctttagaggcagaaaagaacaagcgggcttcggaaatcatcagtgagaagaaatatcgtcagcctccagacagaaacaagttcaccagcattcctgatgccatggatatagttctggcaaagacaaatgccaaaaataggagtgatagactttatagagaagcttgggacaaagacaagactcagatccacatcatgcctgatacacctgacattgttctggctaaagcaaacttaatcaacacaagtgataaactctaccgaatgggttatgaggagctgaagagaaaaggttacgatcttcctgttgatgccataccaatcaaagcagcaaaagcctcccgggaaattgccagtgaatacaagtacaaggaaggctttcgcaagcagctcggccaccacattggtgcccggaacattgaagatgaccccaagatgatgtggtccatgcatgtggccaagatccagagtgacagggagtacaagaaggactttgagaagtggaagaccaagttcagcagcccagtggacatgctgggggtggtgttggccaagaagtgccagaccttagtcagcgacgtggactacaagaactacctgcaccagtggacatgcctgcccgaccagagcgatgtcatccatgctcggcaggcctatgacctccagagcgataatttgtacaagtcagaccttcagtggctaaaaggcattggctggatgactagtggttctctcgaggatgagaaaaataaacgagccacccagattttgagtgaccatgtttaccgtcagcacccagatcaatttaagttttccagccttatggattccataccaatggttttggcaaaaaacaatgctattaccatgaatcatcgcctctatacagaagcttgggataaagataaaaccactgtccacattatgccagatacccctgaagttttattagctaaacaaaacaaagtaaattacagtgagaaattgtataagcttggcctagaagaagccaagaggaaaggttatgacatgcgggtagatgccattcctatcaaggcagccaaggcctccagagatattgcaagtgaattcaagtacaaagaaggctatcgtaagcagctcggccaccacattggtgcccgagctatacgtgatgaccccaagatgatgtggtccatgcacgtggccaagatccagagtgacagggagtacaagaaggactttgagaagtggaagaccaagttcagcagcccagtggacatgctgggggtggtgctggccaagaagtgccagaccttagtcagcgatgtggactacaagaactacctgcaccagtggacatgcctgcccgaccagagcgacgtcatccatgctcggcaggcctatgacctccagagcgataatatgtacaagtctgatctccagtggatgagaggcattggctgggtgtccattggctctttggatgtggaaaaatgcaaaagggcaactgaaattttgagtgataaaatctatcgccagcctccagacagattcaaatttaccagtgtgactgactctctggaacaagtgttggccaaaaataatgccatcactatgaacaagcgtttatacacagaagcctgggacaaagacaagactcagatccacataatgccagacacaccagaaattatgttggcaagaatgaacaaaatcaactacagtgagagtctgtacaaacttgctaatgaagaagcaaagaagaaaggctatgacttgcgaagcgacgccatccccatcgtggcggccaaggcctccagggacatcatcagtgactacaaatataaagatggttactgcaagcaacttggccaccatattggagcccggaacattgaagatgaccccaagatgatgtggtccatgcacgtagccaagatccagagtgacagggagtacaaaaaggactttgagaagtggaagaccaagttcagcagcccagtggacatgctgggggtggtgctggccaagaagtgccagaccttagtcagtgacgtggactataagaactacctgcacgagtggacatgcctgcctgaccagagcgatgtcatccatgctcggcaggcctatgacctccagagtgacaatatttacaagtcagatctccagtggctgagaggcattggctgggtccccattgggtctatggatgtggtcaagtgcaagagagctaccgaaatactgagtgataacatctaccgccagcctccggacaagctgaaatttaccagtgtgactgattctctagagcaggtgctggccaagaacaatgctctcaacatgaataagcgtttatacacagaggcctgggacaaagacaagactcaaattcacataatgcctgatacaccagagattatgttggcaaggcagaacaaaatcaactacagtgagactctatacaaacttgccaatgaagaagcaaaaaagaaaggctacgacttgcgaagtgacgccatccccatcgtggctgccaaggcctccagggacgttatcagtgattacaaatacaaagatggttaccgcaagcagctcggccaccacattggagcccggaacattgaagatgaccccaagatgatgtggtccatgcatgtggccaagatccagagtgacagggagtataagaaggactttgagaagtggaagaccaagttcagcagcccagtggacatgctgggagtggtgttagccaagaagtgccagaccttagtcagcgatgtggactacaagaactacctgcacgagtggacgtgcctgcccgaccagaatgatgtcatccatgctcggcaggcctatgacctccagagcgataacatttacaaatctgatctccagtggctgagaggcattggctgggtccccattgggtctatggatgtggtcaagtgcaagagagctgctgaaatactgagtgataacatctaccgccagcctccggacaagctgaaatttaccagtgtgactgactctctagagcaggtgctggccaagaacaatgctctcaatatgaacaagcgcttatacacagaagcctgggacaaagacaagacccaagtccatattatgcctgatacacctgaaatcatgttggcaagacaaaataaaataaattatagtgagagcctctatcgtcaggccatggaagaagccaagaaagaaggctatgacttgagaagtgatgccattcccattgtggctgccaaggcctctcgggatattgccagtgattacaaatacaaagaagcatatcgtaaacagttgggtcaccacattggcgcccgagcagtacacgatgaccccaagataatgtggtccctccacattgccaaagtgcagagtgaccgtgagtacaagaaagattttgagaaatacaagacaaggtacagcagcccagtggacatgcttggtatcgttttggccaagaagtgtcagaccttggtcagcgatgtggactataaacatcctctgcatgaatggatctgcctgcccgaccagaatgacatcattcatgcacggaaagcctatgacctccagagtgacaatttgtataagtcagaccttgaatggatgaaaggcattggctgggttccgattgattccttggaagttgttagggccaagagagctggagaattacttagtgatactatctaccgtcagcgtccagaaacgctgaaatttaccagtataacggacactccggagcaggtgctggcaaaaaacaatgctttaaacatgaataagcgcttatatactgaagcctgggacaatgacaagaaaactattcatgtcatgcctgatacaccagaaatcatgttagccaaactcaaccgaataaactacagtgataaactctataaacttgctttggaagagtccaagaaggaaggctatgacttgcgtctggatgccattccaatccaagcagccaaggcttcaagagatattgctagtgattacaagtacaaggaaggctaccgcaaacagcttggccaccatattggggcccggaacattaaggatgacccgaagatgatgtggtccatccatgtggccaagatccagagtgacagggagtacaagaaggagtttgagaagtggaagaccaagttcagcagcccagtggacatgctgggggtggtgctggccaagaagtgtcagatccttgtaagcgacatagactacaagcatcccctgcatgaatggacctgcctgcctgatcagaatgacgtcattcaggctcggaaggcctatgacctgcagagtgatgctatttacaaatctgatcttgagtggctgagaggcataggatgggttcccattggctctgtagaggtcgagaaagtgaagagagctggagaaatcctgagtgacaggaagtatcgccagcctgcagaccagctcaaattcacatgcattaccgacactccggaaattgtcctagcaaagaataatgccctgacaatgagcaagcatttatacacagaagcttgggatgctgacaaaacctccatccacgtgatgccagacaccccagatatcctgctggccaagagtaattctgccaatatcagccaaaaactttacaccaagggatgggatgaatcaaagatgaaggactatgatctgagagcagatgctatttccatcaaaagtgccaaggcctccagggacatcgccagtgactacaaatacaaggaagcctatgagaaacagaaaggccaccacattggagcccagagcattgaagatgatcccaagattatgtgtgccatacatgcaggaaaaattcaaagtgaaagggagtacaagaaggaattccaaaagtggaaaaccaagttctctagcccagtggacatgttaagcatcttgctggccaagaaatgtcagactttggtcactgacattgattatcgcaattacctgcatgaatggacatgcatgccggatcaaaacgacattatccaagcaaaaaaggcctatgacctgcagagtgatagtgtgtataaggcagacctggagtggctgcgtggcatcggctggatgccagaaggctcagtggaaatgaacagagtgaaggttgctcaagacctcgtgaatgaaagactctataggacacgtccagaagctttgtcattcaccagcattgtcgacactccagaagttgtcttggcaaaagccaattctctgcaaataagtgagaaactgtatcaggaagcctggaataaagataaaagcaacatcaccattccttctgatactccggagatgctgcaggcccacatcaatgccttgcaaatcagcaataaactctaccaaaaagactggaatgacgccaagcagaaaggctatgacataagggcagatgccattgaaatcaagcacgccaaggcctccagagaaattgccagtgagtacaaatacaaagaaggttaccgtaagcaactgggccaccacatgggtttccgcaccctacaagatgaccccaagtcagtatgggctatacatgctgccaagatccagagtgacagagaatataagaaagcttatgagaagtctaaaggaattcacaacacaccgttggacatgatgtcaattgttcaagccaagaaatgccaggtcctggttagcgacattgattatcgcaattatctgcaccagtggacgtgtctgccagatcagaacgatgtgatccaggccaagaaagcctacgacctgcagagcgataacttgtacaagtcagacctggaatggctgaagggtattggatggctgccagagggttctgtggaagtgatgagagtgaagaatgcccagaatctcttgaatgaaaggctgtatcgtataaagcctgaggccctcaaattcaccagcattgttgacaccccggaagtaatccaggcaaagatcaatgctgtacagatcagtgagccattgtatcgcgatgcctgggagaaagagaaggctaatgtgaacgtgccagctgacactcccctgatgctgcaatccaaaatcaatgccctgcagatcagcaataaacgctatcagcaagcttgggaagatgtcaagatgactggttatgacctgcgagcagatgccattgggatccagcatgccaaggcttccagggatattgccagtgactatctgtacaaaactgcttatgagaaacagaaaggccattacattggctgtcgcagcgccaaggaagaccctaaactggtttgggcagcaaatgtgttgaagatgcagaatgacaggctgtacaaaaaggcctacaacgaccacaaagccaagatctccatccctgtggacatggtgtccatcagcgctgccaaagaaggtcaggcactggcaagtgatgtggactatcgccattacctgcaccactggtcttgctttcccgaccagaatgatgtgatccaagccaggaaagcctacgacctacagagcgacagtgtgtataaggcagacctggagtggctgcgtggcatcggctggatgccagaaggctcagtggaaatgaacagagtgaaggttgctcaagacctcgtgaatgaaagactctataggacacgtccagaagctttgtcattcaccagcattgtcgacactccagaagttgtcttggcaaaagccaattctctgcaaataagtgagaaactgtatcaggaagcctggaataaagataaaagcaacatcaccattccttctgatactccggagatgctgcaggcccacatcaatgccttgcaaatcagcaataaactctaccaaaaagactggaatgacaccaagcagaaaggctatgacataagggcagatgccattgaaatcaagcacgccaaggcctccagagaaattgccagtgagtacaaatacaaagaaggttaccgtaagcaactgggccaccacatgggtttccgcaccctacaagatgaccccaagtcagtatgggctatacatgctgccaagatccagagtgacagagaatataagaaagcttatgagaagtctaaaggaattcacaacacaccgttggacatgatgtcaattgttcaagccaagaaatgccaggtcctggttagcgacattgattatcgcaattatctgcaccagtggacgtgtctgccagatcagaacgatgtgatccaggccaagaaagcctacgacctgcagagcgataacttgtacaagtcagacctggaatggctgaagggtattggatggttgccagagggttctgtggaagtgatgagagtgaagaatgcccagaatctcttgaatgaaaggctgtatcgtataaagcctgaggccctcaaattcaccagcattgttgacaccccggaagtaatccaggcaaagatcaatgctgtacagatcagtgagccattgtatcgcaatgcctgggagaaagagaaggctaatgtgaacgtgccagctgacactcccctgatgctgcaatccaaaatcaatgctctgcagatcagcaataaacgctatcagcaagcttgggaagatgtcaagatgactggttatgacctgcgagcagatgccattgggatccagcatgccaaggcttccagggatattgccagtgattatctgtacaaaactgcttatgagaaacagaaaggccattacattggctgtcgcagcgccaaggaagaccctaaactggtttgggcagcaaatgtgttgaagatgcagaatgacaggctgtacaaaaaggcctacaacgaccacaaagccaagatctccatccctgtggacatggtgtccatcagcgctgccaaagaaggtcaggcactggcaagtgatgtggactatcgccattacctgcaccactggtcttgctttcccgaccagaatgatgtgatccaagccaggaaagcctacgacctacagagcgacagtgtgtataaggcagacctggagtggctgcgtggcatcggctggatgccagaaggctcagtggaaatgaacagagtgaaggttgctcaagacctcgtgaatgaaagactctataggacacgtccagaagctttgtcattcaccagcattgtcgacactccagaagttgtcttggcaaaagccaattctctgcaaataagtgagaaactgtatcaggaagcctggaataaagataaaagcaacatcaccattccttctgatactccggagatgctgcaggcccacatcaatgccttgcaaatcagcaataaactctaccaaaaagactggaatgacaccaagcagaaaggctatgacataagggcagatgccattgaaatcaagcacgccaaggcctccagagaaattgccagtgagtacaaatacaaagaaggttaccgtaagcaactgggccaccacatgggtttccgcaccctacaagatgaccccaagtcagtatgggctatacatgctgccaagatccagagtgacagagaatataagaaagcttatgagaagtctaaaggaattcacaacacaccgttggacatgatgtcaattgttcaagccaagaaatgccaggtcctggttagcgacattgattatcgcaattatctgcaccagtggacgtgtctgccagatcagaacgatgtgatccaggccaagaaagcctacgacctgcagagcgataacttgtacaagtcagacctggaatggctgaagggtattggatggttgccagagggttctgtggaagtgatgagagtgaagaatgcccagaatctcttgaatgaaaggctgtatcgtataaagcctgaggccctcaaattcaccagcattgttgacaccccggaagtaatccaggcaaagatcaatgctgtacagatcagtgagccattgtatcgcgatgcctgggagaaagagaaggctaatgtgaacgtgccagctgacactcccctgatgctgcaatccaaaatcaatgccctgcagatcagcaataaacgctatcagcaagcttgggaagatgtcaagatgactggttatgacctgcgagcagatgccattgggatccagcatgccaaggcttccagggatattgccagtgactatctgtacaaaactgcttatgagaaacagaaaggccattacattggctgtcgcagcgccaaggaagaccctaaactggtttgggcagcaaatgtgttgaagatgcagaatgacaggctgtacaaaaaggcctacaacgaccacaaagccaagatctccatccctgtggacatggtgtccatcagcgctgccaaagaaggtcaggcactggcaagtgatgtggactatcgccattacctgcaccgctggtcttgctttcccgaccagaatgatgtgatccaagccaggaaagcctacgacctacagagcgacgccctctacaaggctgacttggagtggttgcgtggcattggctggatgccccaagggtctcctgaagtgttgagagtcaaaaacgcccagaatatcttttgtgacagtgtctatcggacgcctgtggtgaaccttaagtacacaagcattgttgacacacctgaagtggtccttgctaaatcaaatgctgaaaatattagtattccaaagtacagagaggtttgggacaaggataaaacttcaatacacataatgccagatactccagaaattaatctcgctagagcaaatgctcttaatgtgagcaataaactttaccgtgagggctgggatgaaatgaaggcgggctgtgatgtccggctggatgccatccccatccaggctgccaaggcctccagggagattgccagtgactataaatataagcttgaccatgagaagcagaagggacactacgtgggcaccctcacagccagggatgacaacaagatccgctgggccctcatagctgacaagctccagaatgaacgagagtaccggctggactgggccaaatggaaggccaagatccagagccctgtggacatgctttccatcctgcactctaaaaattcccaggctctggtcagtgacatggattaccgcaattacctgcaccagtggacctgcatgcccgaccagaacgatgtgattcaggccaagaaggcctacgaactgcagagcgataatgtttacaaggctgacttggaatggttgcgtggaattgggtggatgccaaatgactccgtgtccgtcaatcatgccaaacatgccgcggacatcttcagtgagaaaaaatatcgcacaaaaatagaaactctcaactttacgcctgtggatgacagagttgattatgtgacagcgaaacaaagtggcgagatcctcgatgatattaaataccggaaagactggaatgccaccaaatcaaagtacaccctcacagaaacccccctgctgcacactgcccaggaggctgctaggatactggaccagtatctctacaaggaaggctgggagagacaaaaagccacaggttacattttgcctccagatgctgtgccatttgttcatgcccatcactgcaatgacgttcagagtgagctgaaatacaaagctgaacatgtgaagcaaaaaggtcattatgttggtgtcccgacgatgagagatgatcctaagctggtttggtttgagcatgcaggccagattcagaatgagagactatacaaagaggactatcacaaaacaaaggccaaaatcaatatacctgctgatatggtgtcagtcttggccgccaagcaggggcagacccttgtcagtgatattgattatcgtaattacttgcaccaatggatgtgtcatcctgaccagaacgatgttattcaggcaagaaaggcctatgacctacagagtgataatgtctacagagctgacctggagtggctccgaggcattggctggatcccactggattctgtggaccatgtaagggttactaagaaccaggaaatgatgagtcagatcaaatataagaaaaatgcccttgaaaactatcctaactttagaagtgtggtggatcctccagagattgttttagccaagattaattctgtcaatcaaagtgatgtaaaatataaagaaacatttaataaagcaaagggcaaatatacgttttcaccagatacaccacatatctcccactccaaagacatgggaaaactctacagtactatactgtataaaggggcgtgggagggcaccaaggcctatggctacaccctggatgagcgctacattcccattgttggagccaagcatgctgatctggtgaacagtgagcttaaatacaaagagacatatgagaagcagaaaggtcactacctggctggaaaagtgatcggtgaattccctggtgtggttcactgtctggatttccaaaagatgaggagtgcgttgaactacagaaaacattatgaggataccaaagcaaatgttcatatccccaatgacatgatgaatcacgtgctggctaaaaggtgccagtacatcctcagtgacctggagtatcgacactatttccaccagtggacgtctcttctggaagaacccaatgttatacgcgtccgaaacgcccaggagatcttgagtgataatgtgtataaagatgacctgaattggttgaaaggcattggttgctacgtttgggatacaccccaaatcctccatgccaagaaatcatacgaccttcagagtcagctacaatatacagcagcaggtaaagaaaatctacaaaactataatctggtcacagacacgcccctctatgtgactgctgttcagagtggcattaatgccagtgaggtaaaatataaagaaaattatcatcagattaaggacaaatacacaacagttctagaaacagtggattatgacagaaccagaaacctgaagaatctttacagcagtaacctgtacaaggaggcctgggatagagtgaaagccaccagctacatcctgccttccagcaccttgtccctgacacacgccaagaaccagaagcatctggccagccatatcaaatatcgggaagaatatgaaaagttcaaagctctttatacgttaccaagaagtgttgacgatgatccgaacacagcacggtgcctccgagttggcaagcttaacatcgatcgcctgtacagatcagtttatgaaaagaacaagatgaaaatccacatcgtgcccgacatggtagagatggttactgccaaggattcccagaagaaagtcagtgagattgattaccgcctgcgcctccacgaatggatttgccaccccgacttgcaagtcaatgatcacgtcaggaaagtcacagatcagatcagcgatattgtatacaaggatgacctcaactggctgaaaggcattggttgctacgtctgggacactcctgaaatcctccatgccaagcatgcttatgatctacgtgatgatatcaagtataaagctcacatgttgaaaacaaggaatgactacaagcttgtcacagatacaccagtctacgtgcaggctgtcaaaagtgggaaacagctaagtgacgctgtctaccactatgactatgtgcacagtgtcagaggcaaagtggctccaactaccaaaaccgtggatctggaccgggcccttcatgcatacaagctccagagttcgaatctatacaaaaccagcctgcgcaccctgcccactggatatagacttccaggtgacactcctcacttcaaacacatcaaggacacccgttacatgagcagttatttcaagtacaaagaagcctatgaacacaccaaggcatatgggtatacacttggccccaaagatgttccatttgtccacgtccggagagtcaacaatgttaccagcgagagactgtatcgggaattgtaccacaaactgaaagacaagatccatacaactcccgatacccctgagatccgccaagtcaagaagacacaagaggctgtcagtgagttgatctacaaatcagacttcttcaagatgcagggccacatgatctctctgccatacacaccccaagtgatccattgccgctatgtgggagacatcaccagtgatattaaatacaaagaggacttgcaggtcctgaagggatttggctgcttcctgtatgacactcctgacatggtccgctcccggcacctgcggaagctctggtctaattacctatacactgataaggcaaggaagatgcgagacaaatacaaagtggtgcttgacactccagaatacagaaaagtgcaagaactgaagacacatctgagtgagctggtctacagagctgcaggcaagaagcagaagtcaatctttacttcagttcctgatactcctgatcttttaagagccaagcgagggcagaagcttcagagtcagtatctgtatgttgaacttgccaccaaagagagaccccatcatcacgctggaaaccagaccacagccttgaagcatgctaaagacgtgaaggacatggtcagtgagaaaaagtacaagattcaatatgaaaagatgaaagacaagtacactccggttccagatacgccaatcctcatcagagccaagagggcttactggaatgccagtgatctacgctacaaagaaacatttcaaaagaccaaagggaaataccacacggtgaaagatgccctagacattgtctatcatcgcaaagtcacagatgacatcagtaaaataaaatacaaggagaactacatgagccagttgggtatctggaggtccattcctgatcgtccagagcatttccaccaccgagcagtcactgacacagtcagtgatgtaaaatataaagaagacttgacttggcttaaaggcattggttgctatgcctatgatacccctgatttcactctggctgaaaagaacaagactctctacagcaagtataagtataaagaagtatttgaaaggacaaagtcagatttcaagtatgttgccgactctccgatcaataggcatttcaagtatgcaactcaattgatgaatgagaaaaaatacagagctgattatgagcagcggaaagataaataccacctggtagtcgatgagcctagacatctgctggctaagaccgcaggcgaccagatcagtcagatcaaatacaggaaaaactatgaaaaatcaaaggacaaatttacctcaattgtggatactccagaacacctgcgtactacaaaagtcaacaaacaaatcagcgatatcctttataaattggaatacaacaaggccaaacccagaggctacaccacaatccacgacacacccatgttgctgcatgtccgcaaggttaaagatgaagtcagtgatctgaaatacaaagaagtataccaaagaaataaatccaactgcaccattgagccagatgctgttcatatcaaagcagccaaggacgcctacaaagtcaacaccaatctggactataagaaacagtacgaagccaacaaagcccactggaagtggactcctgaccgaccggacttcctccaggctgccaagtcatccctgcagcaaagcgattttgaatataagctggaccgggagttcctcaagggttgcaagctttctgtcactgatgacaaaaacacggtgctcgccctcaggaatactttaatagaaagtgatctgaaatacaaagagaaacatgtcaaggaaagaggaacctgccatgccgtacctgacacgcctcagatcctgctggcgaagactgtcagcaacctggtgtctgagaacaagtacaaggaccatgtcaagaagcacttggcacagggctcatacacaacactaccagagacccgggacactgttcacgtcaaggaagtgaccaagcatgtcagtgatacaaattacaaaaagaagtttgtcaaggagaaaggaaaatccaactactccatcatgctggagccaccagaggtgaaacatgctatggaagtggccaagaagcaaagtgatgtcgcttacagaaaagatgccaaagagaacctgcattacaccacagtggctgatcgaccagacatcaagaaggccacacaggcagccaaacaggccagtgaggtggagtacagagccaagcaccgcaaggaaggcagccatggcttaagcatgctcggtcgcccagacatagaaatggccaagaaggcagccaagctgagcagccaggttaaataccgagaaaatttcgataaagaaaagggcaagacaccaaaatacaatccaaaagacagccagctctacaaagtcatgaaagatgctaataatcttgcaagtgaggttaaatacaaggctgacctgaagaaacttcacaaacccgtgactgacatgaaggagtctctgatcatgaatcatgtcctgaatacaagccaacttgccagttcttaccagtacaagaagaagtatgagaagagtaaaggccactaccacaccatacccgataatctggagcagcttcacctaaaagaggccacagaattacagagtatagtgaaatacaaagaaaagtatgaaaaggaacgaggaaaacccatgctggactttgaaacaccaacgtacatcactgccaaagagtctcagcagatgcagagtgggaaagaatataggaaagattatgaagagtccattaaaggcagaaacctgactggcctggaggtcacgccagctttgttacatgtcaaatatgcaactaaaatagcaagcgagaaagagtacaggaaagatctagaggaaagcatccgtgggaagggcctcactgaaatggaagatacacctgacatgctaagagcaaagaatgccactcaaatcctcaatgagaaagaatataagcgagacctggaactggaagtcaaaggaagaggcctgaatgccatggccaatgaaactccggattttatgagggccaggaatgctactgatattgccagtcagattaagtataagcaatcagcagaaatggagaaagccaatttcacttctgtggttgatactccagagatcattcatgcccaacaagtcaagaatctttcaagccagaaaaagtacaaggaagatgctgagaagtccatgtcgtattatgagactgttttggacaccccagagatacagagagtccgggagaaccaaaagaacttcagccttctccaataccagtgtgaccttaaaaacagtaaaggaaaaattacagttgttcaagacacgccagaaatactgcgtgtaaaagaaaatcagaagaatttcagctcggttttatataaagaggatgtctcaccaggaacggctatcggaaagacacctgagatgatgagagtgaaacaaacacaggaccacattagctcggtgaagtataaggaagcaataggacaaggaactccaatccctgacctgcctgaagtgaaacgtgtgaaggagacgcagaagcacattagctcggttatgtacaaagaaaacttgggaacaggcattccaaccactgtgactccagagattgagagagtcaaacgcaatcaagagaactttagctcggttttgtacaaagaaaatttggggaaaggaatcccaacacctatcactccagagatggagagagtcaaacgcaatcaagagaactttagctcgatattgtacaaagagaacttgagcaaggggactcccctacctgtcactcctgagatggagcgagtcaaactcaatcaagaaaactttagctcggtgttgtataaagaaaacgttggaaaagggattccaatccccatcactccagagatggagagagtcaaacacaatcaagaaaactttagttcggtgctatacaaagaaaacctggggacaggaattccaatccccatcactcctgagatgcagagagtcaaacacaatcaagaaaaccttagctcggtgttatacaaagaaaacatgggcaagggaacccctttacctgtcactcccgagatggaaagagtcaaacacaatcaagaaaatattagctcggtgttatacaaagaaaacatgggcaagggaacccctctacctgtcactcctgagatggagagagtcaaacacaatcaagaaaatattagctcggtgttatacaaagaaaacatgggcaagggaactcctttagctgtcactcccgagatggagcgagtcaaacacaatcaagaaaatattagctcggttttgtacaaagaaaatgtggggaaagccaccgcaacccctgtcactcctgagatgcagagagtcaaacgcaatcaagaaaacattagctcggtgttatacaaagagaacctggggaaagcaacccccacaccctttactcctgagatggaaagagtgaaacgcaatcaagaaaactttagctcggtattgtacaaagagaacatgagaaaagcaactccgacacctgttactccagagatggagagagctaagcgcaaccaagaaaacattagctcggttctttattctgatagtttccggaaacaaatacaaggcaaagctgcctatgtattggatacccccgagatgagacgggtgagggagacccaacggcacatctcaacggtgaaatatcatgaagactttgagaaacacaagggttgcttcacaccagtggtgacagatcctatcactgaacgagtaaagaagaacatgcaggacttcagtgacattaactaccgaggtattcagaggaaagtggtagaaatggaacaaaaacggaatgaccaagatcaggagactattacaggtttacgtgtctggcgtactaatcctggttcggtttttgactatgatccagcagaagacaacatccagtcccgaagcttacacatgattaatgtccaagctcagcgccggagccgggagcagtcacgatctgccagtgcactaagcatcagtgggggtgaggagaagtctgagcattcagaagcaccagaccaccacctttcgacttacagcgacgggggtgtctttgcagtctcaacagcttacaaacatgcaaaaaccacagagctcccacaacaacgatcatcttcagttgctacccaacagacaacggtatcttccatcccatctcatccatctactgctggaaaaatcttccgtgccatgtatgactatatggctgctgatgcagatgaggtgtccttcaaggatggagatgccatcataaatgttcaagcaattgatgaaggctggatgtatggcactgtgcagaggactggcaggaccggaatgctcccagccaactacgttgaagctatttaggcatttcaaagcatcacacttgtctgcaggacttacagatcctgcagtcaatgtttcggtttagactctccactgttacctaagttctcaagctgcctatggtttttctgtgtcaatgtgatttatggtagtaccatcctttctcctttgggttttaaaataagttgcagaacagacactttaaaagcttctgcaatattatttctgtgcctagagtctttctccattataaacatgttttaacattatttcttttctaaaacagggattttgaatatgccaaacacattaaaggaaaaatagcagagatgttcaccttttccttgctgattgctaatgcttattatttctaattcagttctgaagttataaacttataatcaatacaaaccagcaactaataaaacctctaattctgcaa

SEQ ID NO: 62983 - DNA, 25578 bp, Artificial Sequence
  derived and/or modified sequence
atggctgatgacgaggattatgaagaggtcgtggagtattatacggaggaggtggtgtatgaggaggtgcccggagagacgattaccaagatttatgagaccacaactacccgcacttctgattatgagcagagtgaaacatccaagcctgcccttgctcaacctgccctagctcaaccggcatccgcaaaacccgtcgagaggcgaaaagtgatcaggaaaaaagttgatcccagcaaatttatgaccccttacatcgcccatagccaaaagatgcaggacctgttctctcctaacaagtacaaagaaaaattcgaaaaaaccaaaggtcagccatatgccagcacaacagatacacccgagcttaggagaatcaaaaaagtccaagaccagctgtcagaagtcaaataccgaatggatggcgacgtggccaagactatctgtcacgtggacgagaaggcaaaagacatcgaacacgccaagaaggtctcccagcaggttagcaaggtgctgtataagcagaattgggaggacacgaaggataaataccttctgccccctgacgcccccgaattagtgcaggctgtgaagaacaccgctatgttctctaagaagttatacaccgaggattgggaagctgataagtcactgttttacccttataacgactcaccggaactgagacgggttgcgcaggcgcagaaggccctcagtgatgttgcttacaagaagggattggccgagcagcaggcacagtttacacccctcgctgatccaccagacattgaatttgcaaaaaaggtcaccaatcaagttagcaagcagaagtataaggaggattacgagaacaagattaagggcaagtggagcgaaacaccatgcttcgaggtggcaaacgcaagaatgaatgccgataatatctcaactagaaaatatcaggaggatttcgaaaacatgaaagatcagatctatttcatgcagactgagacaccagaatacaagatgaataaaaaagccggagttgctgcaagcaaggtgaagtataaggaggattacgaaaagaataaaggcaaagcagactataacgtcttgcctgcttccgagaatccccagctgcgccagcttaaggccgctggagatgctctgtccgataaattatacaaagaaaattatgagaaaacaaaagccaagtcaatcaattactgcgaaacacccaaatttaaacttgatactgtcctgcagaacttcagttctgacaaaaagtacaaagattcctacctgaaagacatcctgggccactacgttggtagctttgaagatccataccatagtcactgtatgaaggtcaccgcacagaacagcgataagaactataaagccgagtatgaagaagatagaggcaaaggatttttcccccagacgatcacacaggagtacgaggctatcaagaagctggaccaatgcaaggaccacacatataaggtccatccggacaagacaaaatttacccaggtgacagattcacccgtgttacttcaggcacaagtcaactccaaacagctgagtgaccttaactataaggcgaagcacgaatcggaaaaatttaagtgccatatacccccggacacaccagccttcatacagcacaaagtgaatgcatataacctgtccgataacctctacaagcaggactgggagaagtccaaggccaagaaattcgatattaaagtggatgcgattccactgcttgctgccaaggccaataccaagaacacatcagatgtgatgtacaagaaagactatgaaaagaacaagggcaagatgattggtgttctttcgattaacgacgaccccaaaatgctgcactcgctgaaagtcgctaagaaccagtcggacagactctacaaagaaaattatgaaaagacgaaggcgaagtcaatgaattactgcgaaacaccaaaatatcaactggacactcagctgaagaatttcagcgaagctcggtataaggacctctacgtgaaagatgtgctgggacactatgtcggaagcatggaggacccctaccatactcactgtatgaaggtggccgcacagaatagcgataaaagctataaggcagaatatgaagaggacaaaggcaagtgctacttccctcaaacgattacacaggagtacgaggccatcaagaagctggaccagtgcaaggaccacacctataaagttcaccccgataaaaccaagttcacggcagtgactgatagccctgtcctgcttcaggcccagctgaacacaaagcagctgtctgatctgaactacaaggcaaagcatgaaggggagaaatttaaatgtcatatcccagcagacgcaccccagtttatccagcatcgcgtcaacgcctacaatctctctgacaacgtctataaacaggattgggagaaatctaaagccaagaaattcgacattaaagttgatgccattcccttactggctgccaaggccaacacaaagaatacttcagacgtgatgtataaaaaggattatgaaaagagtaaggggaagatgattggggctttgagcataaacgatgaccccaaaatgctccacagcttgaaaacagccaaaaaccagagtgatcgggagtatcgcaaggactacgagaaaagcaaaaccatttacaccgctcctcttgacatgctccaagtcacacaggccaaaaaaagccaggctatcgcctcagatgttgactataaacatattttacatagctattcctatccacctgacagcatcaatgttgacctcgccaagaaagcgtacgctctgcagagcgacgtcgaatataaggccgactataatagctggatgaaaggctgcggctgggtcccattcggcagtttggagatggagaaggctaagcgcgccagcgacattctgaacgagaaaaagtacagacagcatccggacactctcaaatttaccagcatcgaagacgcccctataaccgtgcagagtaagataaaccaggcccagaggtcagatatcgcttataaagctaagggcgaggagatcatccataaatataaccttccgcctgatctacctcagttcatccaggctaaggtcaatgcgtacaatatctccgagaatatgtataaggcagacctgaaagacctttccaagaaagggtacgacctcaggacagatgccattccgattcgtgccgccaaggccgcccgacaggccgcctcggacgtgcagtataaaaaagactatgagaaggccaaagggaaaatggtaggcttccagtcattacaggacgaccctaaactcgtccactacatgaatgtggccaagatacagtctgatagagagtataagaaggactacgaaaagacaaaaagcaagtataatacaccccacgacatgtttaacgtggtggccgctaagaaggctcaagatgttgtaagcaacgttaactacaagcattccctccaccactacacttacctgcctgacgcaatggacttggaactcagtaagaatatgatgcagatacagtctgataacgtgtataaggaggattacaataactggatgaagggtataggctggattccaatcggatctctggacgtggaaaaggtcaaaaaagccggcgacgcgctaaacgagaagaaataccgccagcaccctgatacacttaagtttacatcaatagtagactccccagtgatggtgcaagccaagcaaaacaccaaacaagtgtccgacatcctttacaaggccaagggagaagacgtcaaacacaaatatactatgtcccccgacctgccccagtttttacaagcaaaatgcaacgcctacaatatttctgatgtctgctacaagcgagactggtacgatttaattgccaaggggaataacgtactcggcgacgccatacccataacagctgccaaggcctcacggaacattgccagtgattacaagtacaaggaggcttacgagaagagcaagggaaaacacgtgggtttcagaagcctccaagatgaccccaaattagtccattacatgaatgtcgcgaagcttcagtccgaccgggagtacaagaagaattatgaaaatacaaaaacatcatatcacacacccggcgatatggtgtccatcactgcggcaaaaatggcacaggacgtcgctaccaatgtcaactataaacaacctctgcaccactacacttacctgcccgacgccatgtccctggagcatacaagaaacgtcaatcagatccagagtgataatgtttacaaggacgagtacaacagctttctgaaaggtattgggtggatcccgatcggtagtctggaggtggaaaaagtcaagaaggccggcgatgcactcaacgagcgcaaatatcgccagcatccggacaccgtcaagttcacctccgtgcctgattcaatggggatggttctcgcccaacataacacgaaacaactatcggacctaaactacaaagtggaaggtgaaaagctgaagcacaagtacacaattgatcctgaacttcctcaattcatccaggccaaggtcaacgctctgaatatgtcagacgcacactataaagccgactggaaaaagacaattgccaaggggtacgatttacggcctgatgcaatacctatcgtggccgcaaaatctagtcggaacatcgcctctgactgtaagtacaaagaagcatacgagaaagccaaagggaagcaggttggctttttgtctctgcaggacgacccaaagttggtgcattacatgaacgtcgccaaaatccagtccgacagagaatacaaaaagggctatgaggccagtaagacaaaatatcatactccattagacatggtctcggtgaccgctgctaaaaaatcccaagaagtagctacaaatgccaattaccggcagtcttatcaccactacacactcctgcccgacgccctcaatgtagagcactctaggaacgccatgcagattcagtccgataacctctataagtccgattttactaactggatgaagggcattggatgggtccccattgagagcctggaagttgagaaggctaaaaaagcaggcgagatcctgagcgaaaagaaatatcgacaacatccagagaaattgaaatttacttacgcaatggacactatggagcaggctcttaataaatccaataaattgaatatggataaacggctatacacagagaaatggaacaaagacaaaacaacaattcatgtgatgccagatacaccggacatcctgctatctcgagtcaaccagattaccatgagcgacaagctatacaaggcgggatgggaagaggagaaaaagaagggctatgacctccgacccgatgctatagccatcaaggcagcgagggcctcacgggatatcgcgagcgattacaagtacaagaaggcgtacgaacaagccaagggcaaacacattggctttagatctctcgaggacgaccctaagttggtgcacttcatgcaagttgcaaagatgcagtccgaccgcgaatacaagaagggatacgaaaagagcaaaactagctttcataccccggttgatatgttgtcagtagtcgccgccaagaagtctcaggaggttgccacaaatgccaattatcgaaatgtcatccatacctacaacatgttacccgacgcgatgtcctttgaattggcaaaaaacatgatgcagatccagtcagacaatcagtacaaagccgattacgcagatttcatgaaaggaatcggctggctgccgctcggctcactcgaagcagaaaaaaacaaaaaggcgatggaaattattagcgagaagaaatacaggcagcaccctgacactttgaaatattctacattaatggattcgatgaacatggtcctagcccagaacaacgctaaaatcatgaacgaacacctttacaagcaggcctgggaggcagataaaactaaggttcacatcatgcccgacataccccaaatcattctggcgaaagctaacgcaataaacatgtccgataaactgtacaagctgagtctcgaggagagcaagaagaagggctacgacctgcgacctgatgccatccctatcaaagcggctaaggctagtagagacatcgcttccgactataagtacaagtataactatgagaaaggcaaaggcaaaatggtggggttcaggtccctggaagatgacccaaagctggtccattcgatgcaggtcgcaaagatgcaatccgacagagagtataaaaagaattacgaaaacaccaagacttcataccatacaccggctgatatgctaagtgtcacagccgccaaggatgctcaggcaaacatcacgaacacgaattataagcatcttattcacaagtacattttgcttcctgacgcaatgaacattgaactgacgcgcaacatgaatcggattcaatccgacaatgagtataagcaggactacaatgagtggtacaaggggctaggttggagcccagctgggtcactcgaggtcgagaaggcaaaaaaggccactgagtatgcctccgaccagaagtacaggcagcatccttccaacttccagttcaaaaagttaaccgactcaatggatatggtgctggccaagcagaatgcgcacacgatgaataagcatctatacacaatcgactggaacaaagataaaaccaaaatacacgtgatgccagacaccccagacatcttacaggcaaagcagaatcagactctgtacagccagaaactctacaagctggggtgggaggaagccctgaagaaaggctatgatctgcccgtggacgccatcagcgtgcagctcgctaaggctagccgggacatcgctagtgactacaagtacaagcagggataccggaagcagctaggacaccatgtcggattccgaagcctgcaggacgacccaaagctggtgctctcaatgaatgtggccaaaatgcaaagcgaacgggagtacaagaaagacttcgagaagtggaaaactaagttttcaagtcctgtggacatgctgggcgttgtgctggcgaaaaaatgccaggagctggttagcgatgtggactacaaaaattatctgcaccaatggacgtgtctacccgatcaaaacgacgtggtgcaggccaagaaagtgtacgaattgcagagcgagaatctgtataagtccgatctagaatggctcaggggcatagggtggtcacccctcggcagtctggaggccgaaaaaaacaagagagccagtgaaatcatctctgagaagaagtatcgacagcctcccgaccgtaataagttcactagtatcccagatgcaatggatattgtcctcgccaagactaatgcaaagaataggtcggacaggttatacagagaggcctgggacaaagacaagactcagattcacattatgccagatacgcctgacattgtcctggcaaaagcaaacctgattaataccagcgacaagctctatagaatgggctacgaggaactcaaacggaagggttacgacctacccgtggacgctattccgatcaaggcagctaaggcatcccgagaaatagcttcagaatacaagtacaaggaggggttccgcaagcaactggggcatcacattggtgctagaaatattgaggatgacccaaagatgatgtggagtatgcacgttgccaagatccagtcagacagagaatacaaaaaagattttgagaagtggaagacaaagttttcaagtcctgtcgatatgctaggggttgtgctcgccaagaagtgccagactcttgtctccgatgtggattacaagaattacttgcaccagtggacatgtttgccagatcagtctgatgtgatccacgctcggcaagcatacgacctccagagcgacaacctctacaaaagcgatctgcagtggttaaaaggcatcggctggatgacaagcgggagcctcgaggatgagaaaaataaaagggccactcagatactctcagatcatgtctaccggcaacaccctgaccagttcaagttctcctcactgatggattccatccccatggttctggccaagaataatgcaataacgatgaatcaccgcctgtacacagaggcatgggacaaggataagacaactgttcacattatgcctgatacgccagaggtgcttttggccaaacagaacaaagtgaattactctgagaaattatataagttggggctagaggaagctaagcgcaagggctacgatatgagagtggatgcaataccaatcaaggcagccaaagccagcagggatatcgcgtccgagtttaaatataaggaggggtaccggaagcagctgggtcatcatatcggggcacgagcaataagagatgaccctaagatgatgtggtctatgcacgtggccaaaatccaatctgaccgggagtacaaaaaagatttcgagaagtggaagacaaaattctcctcccctgtcgacatgcttggcgtcgtgctggccaaaaagtgccaaaccctggtaagcgatgtcgactacaagaactacctccaccagtggacctgtctacctgatcagagcgacgtgattcacgcccgtcaagcttatgacctacagtccgataatatgtacaagagcgatctgcagtggatgagaggcataggctgggtttcgatcgggtctctcgatgttgagaaatgcaaaagagcaacagaaatattgtcagataaaatatatcggcagcctcccgaccgcttcaagtttactagtgtgaccgatagcctggaacaggtactggccaagaacaacgccataacaatgaacaagcgcctctacactgaagcctgggataaggataagacccagatccacatcatgcccgacaccccggaaatcatgctggcccggatgaataaaatcaattatagcgaatctctgtataagctggcaaatgaggaggctaaaaaaaaaggttatgacctaagaagcgacgctatccctattgtcgctgccaaggcttcacgagatattatttctgattacaaatacaaagatggctattgcaaacagctcggtcaccacattggcgcccgtaacattgaagatgaccccaaaatgatgtggagcatgcacgtggccaagatccaatctgatagagagtacaaaaaggacttcgagaagtggaagacaaaatttagctcacctgttgatatgctgggcgtagtcctcgcaaaaaagtgccaaacactggtgtcagatgttgattacaagaactacttgcacgagtggacatgtcttcccgaccagtccgatgtcatccacgcacggcaagcatacgacctgcagtcggataatatctataagtctgacctgcagtggttgagaggcattggttgggtgccgatcgggtccatggatgtagttaaatgcaaacgcgctacagaaatactgtcagataacatttacagacaacctccagacaagctgaagtttactagcgttaccgatagtctagagcaggtgctggccaagaataacgccctgaatatgaacaagcgtctttacaccgaagcatgggacaaggataaaacccagattcacatcatgcccgacaccccggagataatgcttgcacgtcagaataaaattaactatagtgagactctttataaactcgcgaatgaggaagcaaagaaaaagggttatgatctgcggtctgacgcgatcccaatcgtggcggccaaggcctcccgcgacgtgatttccgattataaatataaggacggatacagaaagcagctcggacaccacataggagcgaggaacattgaagacgatcccaagatgatgtggtccatgcacgttgccaagatccagtcggacagggagtacaaaaaggatttcgagaaatggaagacgaagttttccagcccggtggatatgcttggagtggtcctggccaaaaagtgtcagaccctagtgagtgacgttgactacaaaaactatctccatgaatggacttgtcttcctgaccagaatgacgtcattcatgcacgccaggcctacgacctgcagtccgataacatttacaaatctgacctacagtggctcagagggattggatgggtgcctattggttccatggatgtggtgaaatgtaaaagggcagccgagatcctgagcgataatatctacagacaaccacctgataagcttaagtttacaagcgtgactgacagccttgagcaggtgctagcaaagaacaacgcattaaatatgaacaagcgcctctataccgaggcttgggacaaggacaaaacccaggttcatattatgccagatactccagaaattatgctagccagacagaataaaatcaactacagtgagtctctgtaccgtcaggccatggaggaggctaagaaggagggatatgatctgaggagcgatgcaatacctattgtagcagcaaaggcctcaagagacatcgcgtctgactacaaatataaggaggcttacaggaaacagctggggcaccacatcggagcgcgagccgtgcatgacgatcctaagatcatgtggtccttacatatcgctaaggtccagtcagatcgtgagtataagaaggattttgagaagtacaagacccggtacagcagtccggtcgatatgctcggaatcgtgctcgcaaagaagtgccaaaccctggtctctgatgtagattataaacaccctctgcacgagtggatatgtttgccagaccagaacgatattatccacgcacgaaaggcctatgatctgcagtcggacaacttatacaagagcgacctggagtggatgaagggcatcgggtgggttcctatcgattccctcgaagtggtccgcgctaagagagccggcgagctcctttccgataccatttataggcagcgtcccgaaacattgaagtttaccagtattaccgatactcccgaacaggtgcttgctaaaaacaatgccctgaatatgaataagcggctctacaccgaagcctgggacaatgacaagaagaccattcatgtcatgccagatactccagagatcatgttagcaaaactgaatagaatcaactacagcgacaagctgtacaagttagctctggaagaaagcaaaaaggagggttacgaccttaggctcgatgctatccctattcaggccgcgaaagcctctagggacatagcctctgactacaagtacaaagaaggctaccggaagcaactaggccatcatatcggcgctagaaacattaaggatgatccaaagatgatgtggtcaatccatgtggcgaaaatccaatcagatcgcgagtataagaaagaattcgagaaatggaaaaccaagttctcatctccagtggatatgctgggcgtggtgctggcaaaaaagtgccagattcttgtgtctgatatcgattataagcatcccttgcacgagtggacctgtttgccagatcagaacgatgtaatccaggcccgcaaagcgtacgatcttcagtcagacgcaatttacaagtcagacctcgagtggctgaggggcatcggctgggttcctatcggttctgtcgaggtggagaaggtgaagcgtgcaggcgagatcctctccgatagaaaatatcgtcagccggccgatcagctgaaattcacctgcatcacggacactcccgaaattgtcctcgctaaaaataacgccttgaccatgtccaaacatctctatacagaagcttgggacgctgacaagacatccattcacgtgatgccagacacgcctgacattttgcttgcgaaatctaattctgctaatatcagccagaagttgtataccaaggggtgggatgaatccaaaatgaaggactatgacctaagggccgacgccatttctatcaagtcagccaaggcctcgagggacatcgcatctgattacaaatataaggaagcctacgagaaacagaagggccaccacattggggcccagtccattgaggacgaccctaaaattatgtgtgccattcacgctggcaagatccaaagtgagcgtgagtataagaaagagttccagaagtggaagactaaattctcgagtccagtggacatgctttccatcctcttagcaaaaaaatgccagacactggtaaccgacatcgactacaggaattatcttcacgagtggacatgtatgccggaccagaatgacatcatccaagccaagaaggcttacgatctgcagagtgattcggtgtacaaagccgatttagaatggctccgaggaattggatggatgccagaaggatccgtagaaatgaatcgggtgaaggttgctcaggatttggtgaatgagcgcctgtacaggacccgtccagaagctcttagctttacaagtatagtggacaccccggaggtggtcctggcaaaggcaaactccctgcagatctccgagaagctgtaccaggaagcatggaataaagacaagtccaatattaccatcccgtcagatacccccgagatgctgcaagctcacatcaatgccctgcaaatatccaacaaactttatcagaaagattggaacgacgctaagcagaagggctacgatattagagctgatgctatcgagattaagcatgccaaagcctcaagggagatcgcctcagagtacaagtacaaggaggggtatagaaaacagctagggcatcatatgggctttaggacactgcaggatgacccaaagagcgtgtgggccatccatgcagcaaaaatccagagcgatcgggagtacaagaaggcttacgaaaagtccaagggtatccacaacacccccctggatatgatgagcatcgttcaggcaaagaagtgtcaggtattggtgagcgacattgactaccggaattatctgcatcagtggacctgcttacctgatcaaaacgatgtgattcaggccaaaaaagcctatgacttacagtccgataacctttacaaatccgaccttgagtggctcaagggcattggctggctcccagaaggttccgtcgaagtgatgcgagtcaaaaatgctcaaaacctgctgaacgagagactataccgaattaaacctgaggccctcaaattcacatcgatcgtggacactcctgaagtgattcaggctaagataaatgcagtgcagatctcagaaccactctatagggacgcttgggaaaaggaaaaagccaatgtaaacgtgccagcagacacacctctgatgttgcaatctaagatcaatgccctacaaatatcgaacaaacgctaccagcaggcgtgggaggacgttaagatgaccggctatgatctccgcgcagacgccataggaattcaacacgccaaggcatcccgggatattgcaagcgattatttgtacaagaccgcctacgagaaacagaagggacattatatcggttgtcgaagtgcgaaagaggaccccaaactggtgtgggccgccaacgtgctgaagatgcagaatgaccgactctataagaaagcatacaatgaccacaaggccaagatcagcattcctgttgatatggtaagcatttccgccgccaaggaaggccaggcgctggcgtccgacgtggactatcgccactacttgcaccattggagttgtttccccgaccagaacgacgtgatacaggcaagaaaagcctatgatttgcagtccgactcagtatataaggccgacttggagtggctgcgaggcattggctggatgcctgagggtagcgttgagatgaatcgggtgaaagtagcccaggacctcgttaacgaaaggttgtatcggaccagacccgaggcccttagttttacgtcaatagtggacacccctgaagtcgtactggctaaagccaactctctgcagattagcgaaaaactgtaccaggaggcctggaacaaagacaagagtaacattacaatcccgagcgatacacccgagatgctgcaggctcatattaacgcacttcagatcagtaacaagctctatcagaaggactggaacgacaccaagcagaagggctacgatatcagggctgacgcaatagagattaaacatgcaaaggccagccgtgaaatcgccagcgagtacaaatacaaagagggctaccgcaagcagctggggcaccatatgggtttccggacactgcaggacgaccctaagagtgtatgggccattcacgcagccaaaattcagagtgaccgagagtacaagaaggcttacgagaagtcaaaggggattcataatacaccattggacatgatgagcatcgtgcaggccaagaagtgccaggtgctggtatcggacatcgattaccgcaactacctacaccagtggacctgcctgcctgaccagaatgacgtaatccaagctaaaaaagcttatgacctccagagtgataacttgtacaaaagcgacctcgagtggttgaagggcatcggatggctgcccgagggctctgtggaggtcatgcgcgtcaagaatgcacagaatttgctaaacgagagattgtaccgaatcaaacccgaggccttgaagtttacaagcattgtggatacccccgaggtgatacaggctaaaataaatgctgtgcagatttcagagcccctgtatcgtaatgcttgggaaaaggagaaggccaatgtgaacgtgcccgcagacacacccctaatgttgcaaagcaagatcaacgcattgcaaatcagtaacaagcggtaccaacaagcatgggaggatgtcaagatgacagggtacgacctgcgggcagatgcaataggaattcagcacgcaaaggcctccagggatatcgccagcgactatttatacaaaacagcctacgaaaagcagaaagggcattatattggttgcaggagcgcaaaggaggatccaaaacttgtgtgggccgccaatgttctgaagatgcagaatgaccgtttgtacaagaaagcatataacgaccacaaagccaagatttcaatcccagtcgacatggtgtccatttcagccgccaaggagggccaagccttggcctctgacgtcgattacagacactacctgcaccactggtcctgcttcccagatcagaatgatgtcatacaggcacggaaggcctacgaccttcagtccgactcagtctacaaagccgacctagagtggctcaggggcatagggtggatgccggaagggagtgtggagatgaaccgggtcaaggtggcacaggatctggtgaacgagaggctgtaccgcacccgcccagaggctttaagcttcacctccattgtcgatactcccgaggttgtgcttgccaaagccaactcgctccaaatctcagagaagttgtatcaagaggcttggaataaagacaagtcaaatataaccattccttcggataccccggagatgttgcaggcccacattaacgcgctgcagattagtaacaaactgtaccagaaggactggaacgacacgaagcagaaggggtatgatataagggccgacgccattgagattaaacacgcaaaggcctctcgggagatcgccagcgagtacaaatacaaagaagggtaccgcaagcagcttggacaccacatgggcttccgcacactgcaggatgacccaaagagtgtttgggccatccacgccgctaagattcagagcgaccgagaatataaaaaagcctacgaaaaatccaagggaattcacaatacacctcttgatatgatgagcattgtgcaggccaagaagtgccaagtgttggtgtccgacatagactacaggaactatctacatcagtggacttgtctcccagaccagaatgacgtgatccaggcgaaaaaggcctatgacctccagtcagacaatctgtataaaagtgatttagagtggctgaagggcatcgggtggctgcctgaggggagcgtggaggtgatgcgggtaaagaacgcccagaacttactgaacgagcgcctgtataggatcaaaccggaagcgctcaaattcacgagcattgtggacactcccgaggtgatccaggcgaagatcaatgccgtacaaatcagcgaacccctgtatcgggacgcatgggaaaaggagaaagcaaatgtgaatgttcccgccgacaccccccttatgttacagtccaaaatcaacgcactccagatcagcaacaagaggtaccaacaggcctgggaggatgtgaaaatgacaggatatgacctcagagccgatgcaattgggattcagcacgcgaaagccagtcgcgacattgcctctgactacctctataagacagcatatgaaaaacagaagggccattatattgggtgtcgttccgcgaaagaggaccccaagctggtctgggcagcaaatgtgttgaagatgcagaacgatcgattgtataagaaagcttacaacgatcacaaagccaaaattagcatcccggtggacatggtgagcatctctgcagccaaggagggacaagctttagccagcgatgtggattaccgacactacttgcatcgatggtcttgctttcctgatcagaacgacgtaatccaagccaggaaggcttatgatctgcagtcagacgccctgtataaagccgacttggagtggctcaggggaatcggatggatgcctcaaggctctccggaggtgctgcgggtgaaaaacgctcaaaatatcttctgtgatagtgtgtataggaccccagtcgtgaatctgaagtacacctccatcgttgatactcccgaagtggtcttagctaaaagtaatgcagagaatattagcatcccaaaatacagagaggtgtgggataaagataagacatctatacacattatgccagatactccagaaattaaccttgcccgagccaatgctctcaatgtgagcaacaaactgtacagggaaggctgggacgagatgaaagctgggtgcgatgtgagactggatgcaatccccatccaggcggccaaagcctcgagggaaatcgcctccgattataaatacaaattagaccacgaaaagcagaaggggcactacgtggggactctgaccgccagggatgataacaagatcagatgggccttgatcgcggacaaattacagaatgaacgggaatacaggctagattgggccaaatggaaggcgaaaatccagtctcccgtcgatatgcttagcatcttgcactcaaagaattcacaggccctcgtatccgacatggattaccgcaattaccttcatcagtggacttgcatgcccgatcagaatgatgtcatccaggctaagaaggcatacgaactgcagtctgacaatgtttataaggctgatttggagtggctgcgcggcatcggctggatgcctaatgacagcgtgagcgtgaaccatgccaaacatgcagccgatattttcagcgaaaaaaagtacaggaccaagattgagactcttaactttacaccagtggacgatcgggttgattatgtaacagctaagcaatctggtgaaatcctggatgacattaaataccggaaagattggaatgctactaaatccaagtatacgctcaccgagacccccttattgcacaccgctcaggaggccgcccggatcctggaccaatacctgtacaaggagggttgggaaagacaaaaggccacaggctatatccttccacctgatgcagtcccttttgtccacgcccatcactgcaatgacgtgcagtccgaactgaagtacaaggcggaacacgtgaagcagaaggggcactacgtgggagtaccaactatgagagacgacccaaagttagtgtggttcgaacatgctggccagatacagaacgagcggctgtataaggaggattaccacaagacaaaagccaagataaatatccccgccgatatggtgtccgtgctcgcagcgaaacaaggtcagacattagtgagtgatatagactaccggaattatcttcatcaatggatgtgccaccctgaccagaacgatgtgattcaagcaagaaaggcatacgacctccagagcgataacgtctaccgcgctgatctagaatggctgagaggcatcgggtggattccactggattccgtggaccatgttagggtgactaagaaccaggagatgatgtcccagatcaagtataagaagaatgcattggagaattaccccaactttcgctctgttgtagacccccccgagattgttctggctaaaattaatagcgtcaaccagtcagatgtgaaatacaaagaaaccttcaacaaggcgaagggaaagtacaccttttccccggatacaccccacattagtcattctaaggacatgggaaagctgtatagtaccattctctataagggtgcatgggaaggaaccaaggcttatggttacacattggatgagaggtacatcccaatcgttggcgctaaacacgcagatctggttaatagtgaacttaagtacaaggaaacctatgagaaacagaagggccactacctggcaggcaaggtcattggggaattcccaggcgtcgtgcattgcctggactttcaaaaaatgcgatcggccctgaactaccgtaagcactacgaagataccaaggcaaacgtgcacatccctaatgacatgatgaaccatgtgcttgccaaacgatgtcagtacatcctctcagacctggagtatcggcactacttccatcagtggaccagtctcctggaagagcctaatgtgattagggtacgaaacgcacaggaaatcctaagcgacaacgtgtacaaggatgatttgaactggctgaaagggattggttgttatgtatgggataccccacagattctgcatgctaaaaagtcttacgatcttcagagccaactacagtacaccgcagccggcaaagagaacctccagaactataatctggtgactgacacacccctttacgttacagcggtgcagagcggaattaacgctagtgaggtaaagtataaggagaattaccaccagatcaaagataagtacaccacagttctggaaacggtggactatgaccgaactcggaatctcaaaaatttatattccagcaacctgtacaaggaggcctgggaccgtgtaaaggctacctcttatatcctcccctcctccacgttaagcctgacgcacgctaagaatcagaagcacttggcatctcatattaagtaccgtgaagaatatgaaaagtttaaggctttgtacaccttgcctcggagcgtagacgatgacccaaacaccgcaaggtgtctgagagtgggaaaattgaatatcgaccgactctatcggtccgtatatgagaaaaacaaaatgaaaatccacatcgtccctgatatggtggagatggttaccgccaaggattctcagaagaaggtgtccgagatcgactataggctccggctgcatgagtggatctgtcatccagatctacaagtcaatgaccatgttcgcaaggtcacggatcagattagcgatattgtgtacaaagacgacctgaattggttaaagggaatcgggtgctacgtgtgggatactccagaaattctacatgccaagcacgcctatgatctgcgggatgacatcaagtacaaggcccacatgctgaagacgcgcaatgattacaagctcgtgaccgacacacccgtttacgtgcaggccgtaaagagtggaaaacagcttagcgacgccgtctatcactacgattacgtgcactctgttagaggcaaggtggcacccacgacgaagacagtggatttagacagagctttgcacgcatataaattgcaatcttctaatctttacaaaaccagcctgcggactctgccgacgggatataggcttccaggtgacaccccacattttaagcatatcaaggatacacggtacatgtctagctacttcaagtacaaggaggcttacgagcatactaaggcatacgggtacaccctcgggccaaaggatgtcccttttgtgcatgtgcggcgtgtaaacaatgtaacatccgagcggctgtatcgggagctctatcacaagctaaaggataagatccatacaacccccgacacacccgaaattagacaggttaagaagacccaggaagcagtgtccgaactgatttacaagtcagatttcttcaaaatgcagggccatatgatttcattaccttataccccacaagtgattcattgtagatatgtgggtgacattacctcagacattaaatacaaagaggacctccaggtgttgaaggggttcggatgcttcctttacgatactcccgatatggtgcggtcccggcacctaaggaaactgtggagcaattatctctataccgacaaagcacgaaagatgagggataaatacaaggtagttctggacactccagaatatcgcaaggtccaggagctcaagacccacttaagcgaattagtctatcgagcagcaggcaaaaaacagaaatctattttcacctccgtcccagacacccccgacctcctcagagcaaagagagggcaaaaacttcagtcacagtacctttacgtagagctggctaccaaagaaaggcctcaccatcatgccggaaaccagacgaccgcacttaaacacgccaaggacgttaaagacatggtgagtgagaaaaagtataagattcagtacgaaaagatgaaagataagtacacccccgtgccagatacgcccattttgatacgggccaagcgcgcatattggaacgcgtctgatctccggtacaaggagactttccagaagaccaagggtaaatatcacactgttaaagatgctttggatatcgtttaccatcgcaaggtgactgacgacatctcgaagattaagtacaaggagaattatatgtcgcagctgggaatatggaggagtattcccgacaggccagagcactttcaccaccgagccgtgacagacacagtctctgacgtcaaatataaggaagatcttacttggctgaagggcattgggtgttacgcatacgacactcccgatttcaccctggccgaaaaaaataaaaccttgtattccaaatacaaatataaggaggtctttgagcgcaccaagagcgattttaaatatgtggccgactctcccatcaacaggcactttaagtacgccacacagctcatgaatgagaaaaaatacagggccgattacgagcagaggaaagataaatatcacttggttgttgacgaaccccgtcatctgctcgccaagaccgctggggaccaaatcagtcagataaagtaccgcaagaactacgaaaagtccaaggacaaatttactagcatcgtagacactcccgaacatcttcgaaccacaaaggtcaataaacaaatctccgacatactgtataaactcgagtacaataaggccaaacctagaggatataccacaattcatgatacccccatgttactgcatgtcaggaaagttaaagatgaggttagcgaccttaagtataaggaagtctaccagaggaacaagagcaattgcacgattgaacctgatgctgtccatatcaaggccgccaaagacgcttacaaagtcaacaccaatttggattacaagaagcagtatgaggcgaacaaggcacattggaaatggacacctgacaggcccgactttctccaggccgctaagtcttccctccagcagagcgattttgagtataagctggacagagaatttctgaagggatgcaaactgagtgtaacggacgataaaaacaccgtgttggcccttcgtaatactttgatcgaaagtgatttgaagtataaagaaaaacacgtgaaagagcgcggaacttgccacgctgtgccggacacaccacagatactcttggctaagactgtcagcaatttagtgtcagagaataagtacaaggatcatgtcaaaaagcacctcgcgcaggggagttacaccactctgcctgaaactcgagatacggtccatgtgaaagaagtgaccaagcacgtttcagataccaactataaaaagaagttcgtcaaggagaaaggcaagagtaattattcgattatgctggagcccccggaggtcaagcatgccatggaagtggcaaaaaagcaaagcgacgtcgcttacagaaaggatgcgaaggagaatctgcattataccacggtcgcggaccgccccgacataaaaaaagcaacccaagccgcaaagcaagcttctgaggtcgagtacagagccaaacatcgtaaggaagggtcccacgggcttagcatgctaggccggcccgatatcgagatggcaaaaaaggctgccaagctgagcagccaagtgaagtaccgagagaactttgacaaagagaaaggtaagactcccaaatacaatcctaaagacagtcagctgtacaaggttatgaaggatgccaataacttagcctccgaggtgaagtataaggctgacttgaagaaactccataagcctgtgactgatatgaaagagagtctaattatgaaccacgtgctcaacacaagtcagcttgccagctcataccaatataagaagaagtacgaaaaatccaaagggcactaccacactatacctgataacctggagcaactgcacctcaaagaggctaccgaactgcagtcaattgtcaaatacaaagaaaaatatgaaaaggagcggggtaagccaatgctggactttgaaaccccaacgtacattaccgcaaaagagtcacagcagatgcaatccgggaaagagtaccggaaagattacgaggagtcaatcaaaggcagaaatctgactggcctggaggtgacgcccgctctccttcacgtgaaatacgccactaagattgcgtccgagaaggagtaccgtaaggacctggaggagtctattcgggggaagggactgaccgaaatggaagacaccccggacatgctcagggctaagaacgccactcagattctgaatgagaaggagtacaaacgggacctcgaactggaggtgaagggacgagggttgaatgctatggccaacgaaactccagattttatgcgggcaaggaacgccacggacatagcttcgcagatcaagtacaagcagtctgctgagatggagaaagccaatttcacatctgtcgtcgacacacctgagatcattcatgcacagcaggtgaagaacctgagctctcagaaaaagtataaagaagacgccgaaaaatcaatgtcctattacgagaccgtccttgacactccagaaatccagcgcgtgcgtgagaaccagaaaaacttcagcttgctgcaataccagtgcgacctgaagaacagcaaaggaaaaataacagtggtacaggatacccccgaaattctgagggtgaaggaaaatcagaagaatttcagtagtgtcctgtacaaggaggacgtttctcccggtaccgccattggcaagacaccagagatgatgcgagtcaagcaaacacaggatcacatatctagcgtgaaatacaaggaggcgatcggccagggcactccaattccagatctccccgaggtgaagcgagtgaaggaaacccagaagcatatcagtagcgtgatgtacaaagagaaccttggcacaggcatccccacaactgtgaccccggagatcgagcgggtgaaaagaaaccaagagaacttctcctccgtgttgtataaggagaacctgggcaaaggaatccccacacctattaccccagaaatggagcgagttaaacgaaaccaagagaatttctcctccattctttacaaggaaaaccttagcaaaggaacacccctgcccgtcacccctgaaatggaaagggtaaagctgaatcaggaaaacttctccagtgtgctatacaaagagaacgtcggcaaggggatacctatcccaattactccagaaatggaaagagtgaaacataatcaggagaacttttccagcgtgttatacaaggagaatctaggcactggtatccctattcctatcacgccagaaatgcagagagtaaaacacaatcaggaaaaccttagttctgtgctgtataaagaaaacatgggaaaaggaaccccactgcccgtgacccctgaaatggagcgggtgaaacacaatcaagaaaatataagctccgttttgtataaggagaacatgggtaaaggaacacccctgccagtaactccagagatggaacgcgtgaagcataatcaggagaatatctcgtccgtcctctataaggaaaatatgggaaagggcactccattagctgtcacaccagagatggagcgggtcaagcacaaccaggagaatataagctcagtactgtacaaagaaaatgtgggtaaagctacagctacccctgtaacgcctgagatgcagagggtcaagagaaaccaggagaatatttctagtgtcctatacaaggagaacctgggaaaggccacccctacaccgttcacccctgagatggaaagggttaaacgcaaccaggagaacttcagttcagtcctttacaaggagaatatgaggaaagcaactcccacccccgtcacccccgagatggagcgggctaagagaaatcaagaaaatatctctagcgtactctattctgactcctttaggaagcagatccaggggaaggccgcctatgtgcttgatacccccgaaatgcggagggtccgcgaaacccagagacatatctccacagttaagtatcacgaagatttcgagaagcacaaagggtgtttcactcccgttgtgactgatcctattactgaaagagtgaagaaaaatatgcaggacttcagcgatatcaattacagggggattcagaggaaggtagtcgagatggagcagaagcgcaacgaccaggaccaggagaccatcaccggcctgcgggtctggaggactaatccaggtagtgtgtttgactatgatcctgcagaggataacatccagtctaggtcactgcacatgattaacgtgcaggcgcagagacgcagtcgagaacagagccggagcgcaagcgccctctccatctccgggggagaggaaaagtccgagcactcagaagcccccgaccatcatctgtcaacctattcagacggaggggtttttgctgtgtcaacggcctacaagcatgccaaaacaaccgagttgccgcagcagcggtcatctagcgttgctacgcagcaaaccacagtgtccagcattccatcccacccttctactgccggtaaaatcttccgggctatgtatgattacatggctgccgacgcggatgaggtgagcttcaaggatggcgatgcaataattaatgtccaagcgattgacgaaggttggatgtatggcacagttcagcggacagggaggaccggaatgctgcccgctaactatgtggaagctatctag

SEQ ID NO: 62984 - DNA, 25578 bp, Artificial Sequence
  derived and/or modified sequence
atggctgatgatgaagattatgaggaggtggtggagtactacacagaggaggtggtgtatgaggaggtgcctggagagaccatcaccaagatctatgagaccaccaccaccaggaccagtgactatgagcagagcgagaccagcaagccagccctggcccagcctgccctggcccagcctgccagcgccaagcctgtggagaggaggaaggtgatcaggaagaaggtggaccccagcaagttcatgaccccctacatcgcccacagccagaagatgcaggacctcttcagccccaacaagtacaaggagaagtttgagaagaccaagggccagccctatgccagcaccacagacaccccagagctgcggcgcatcaagaaggtgcaggaccagctgtctgaggtgaagtacaggatggatggagatgtggccaagaccatctgccacgtggatgagaaggccaaggacattgaacatgccaagaaggtgtcccagcaggtgtccaaggtgctgtacaagcagaactgggaggacaccaaggacaagtacctgctgcccccagatgcccctgagctggtgcaggccgtgaagaacacagccatgttcagcaagaagctgtacacagaggactgggaggccgacaagagcctcttctacccctacaatgacagccctgagctgcggcgggtggcccaggcccagaaggccctgagtgatgtggcctacaagaagggcctggccgagcagcaggcccagttcacccccctggccgaccccccagacatcgagtttgccaagaaggtgaccaaccaggtgtccaagcagaagtacaaggaggactatgagaacaagatcaagggcaagtggagcgagaccccctgctttgaggtggccaatgccaggatgaatgctgacaacatcagcaccaggaagtaccaggaggactttgagaacatgaaggaccagatctacttcatgcagacagagaccccagagtacaagatgaacaagaaggccggcgtggccgccagcaaggtgaagtacaaggaggactatgagaagaacaagggcaaggctgactacaacgtgctgcctgccagcgagaacccccagctgcggcagctgaaggctgctggagatgccctgagtgacaagctgtacaaggaaaattatgagaagaccaaggccaagagcatcaactactgtgagacccccaagttcaagctggacacagtgctgcagaacttcagcagtgacaagaagtacaaggacagctacctgaaggacatcctgggccactacgtgggcagctttgaggacccctaccacagccactgcatgaaggtgacagcccagaacagcgacaagaactacaaggccgagtatgaggaggaccggggcaagggcttcttcccccagaccatcacccaggagtatgaggccatcaagaagctggaccagtgcaaggaccacacctacaaggtgcacccagacaagaccaagttcacccaggtgacagacagccctgtgctgctgcaggcccaggtgaacagcaagcagctgagtgacctgaactacaaggccaagcatgagagcgagaagttcaagtgccacatccccccagacaccccagccttcatccagcacaaggtgaatgcctacaacctgagtgacaacctgtacaagcaggactgggagaagagcaaggccaagaagtttgacatcaaggtggatgccatccccctgctggccgccaaggccaacaccaagaacaccagtgatgtgatgtacaagaaggactatgagaagaacaagggcaagatgattggagtgctgagcatcaatgatgaccccaagatgctgcacagcctgaaggtggccaagaaccagagcgaccggctgtacaaggaaaattatgagaagaccaaggccaagtccatgaactactgtgagacccccaagtaccagctggacacccagctgaagaacttcagcgaggcccgctacaaggacctgtatgtgaaggatgtgctgggccactacgtgggctccatggaggacccctaccacacccactgcatgaaggtggccgcccagaacagcgacaagagctacaaggccgagtatgaagaagataaaggcaagtgctacttcccccagaccatcacccaggagtatgaggccatcaagaagctggaccagtgcaaggaccacacctacaaggtgcacccagacaagaccaagttcaccgctgtgacagacagccctgtgctgctgcaggcccagctgaacaccaagcagctgagtgacctgaactacaaggccaagcatgaaggagagaagttcaagtgccacatcccagcagatgccccccagttcatccagcaccgggtgaatgcctacaacctgagtgacaacgtgtacaagcaggactgggagaagagcaaggccaagaagtttgacatcaaggtggatgccatccccctgctggccgccaaggccaacaccaagaacaccagtgatgtgatgtacaagaaggactatgagaagagcaagggcaagatgattggagccctgagcatcaatgatgaccccaagatgctgcacagcctgaagacagccaagaaccagagcgaccgggagtacaggaaggactatgagaagagcaagaccatctacacagcccccctggacatgctgcaggtgacccaggccaagaagagccaggccatcgccagtgatgtggactacaagcacatcctgcacagctacagctaccccccagacagcatcaacgtggacctggccaagaaggcctatgccctgcagagtgatgtggagtacaaggctgactacaacagctggatgaagggctgcggctgggtgcccttcggcagcctggagatggagaaggccaagagggccagtgacatcctgaatgagaagaagtaccggcagcacccagacaccctgaagttcaccagcattgaagatgcccccatcaccgtgcagagcaagatcaaccaggcccagaggagtgacatcgcctacaaggccaagggggaggagatcatccacaagtacaacctgcccccagacctgccccagttcatccaggccaaggtgaatgcctacaacatcagcgagaacatgtacaaggctgacctgaaggacctgagcaagaagggctatgacctgaggacagatgccatccccatccgggccgccaaggccgcccggcaggccgccagtgatgtgcagtacaagaaggactatgagaaggccaagggcaagatggtgggcttccagagcctgcaggatgaccccaagctggtgcactacatgaatgtggccaagatccagagcgaccgggagtacaagaaggactatgagaagaccaagagcaagtacaacacccctcatgacatgtttaatgtggtggccgccaagaaggcccaggatgtggtgtccaatgtgaactacaagcacagcctgcaccactacacctacctgcctgatgccatggacctggagctgagcaagaacatgatgcagatccagagcgacaacgtgtacaaggaggactacaacaactggatgaagggcatcggctggatccccatcggcagcctggatgtggagaaggtgaagaaggctggagatgccctgaatgagaagaagtaccggcagcacccagacaccctgaagttcaccagcatcgtggacagccctgtgatggtgcaggccaagcagaacaccaagcaggtgtctgacatcctgtacaaggccaagggggaggatgtgaagcacaagtacaccatgagcccagacctgccccagttcctgcaggccaagtgcaatgcctacaacatcagtgatgtgtgctacaagagggactggtatgacctgattgccaagggcaacaacgtgctgggagatgccatccccatcacagctgccaaggccagcaggaacatcgccagtgactacaagtacaaggaggcctatgagaagagcaagggcaagcacgtgggcttccgcagcctgcaggatgaccccaagctggtgcactacatgaatgtggccaagctgcagagcgaccgggagtacaagaagaactatgagaacaccaagaccagctaccacacccctggggacatggtgtccatcacagctgccaagatggcccaggatgtggccaccaacgtgaactacaagcagcccctgcaccactacacctacctgcctgatgccatgagcctggagcacaccagaaatgtgaaccagatccagagcgacaacgtgtacaaggatgagtacaacagcttcctgaagggcatcggctggatccccatcggcagcctggaggtggagaaggtgaagaaggctggagatgccctgaatgaaaggaagtaccggcagcacccagacacagtgaagttcacctctgtgcctgacagcatgggcatggtgctggcccagcacaacaccaagcagctgagtgacctgaactacaaggtggagggggagaagctgaagcacaagtacaccatcgaccctgagctgccccagttcatccaggccaaggtgaatgccctgaacatgtctgatgcccactacaaggctgactggaagaagaccatcgccaagggctatgacctgcggccagatgccatccccatcgtggccgccaagagcagcaggaacatcgccagtgactgcaagtacaaggaggcctatgagaaggccaagggcaagcaggtgggcttcctgagcctgcaggatgaccccaagctggtgcactacatgaatgtggccaagatccagagcgaccgggagtacaagaagggctatgaggccagcaagaccaagtaccacacccccctggacatggtgtctgtgacagctgccaagaagagccaggaggtggccaccaatgccaactaccggcagagctaccaccactacaccctgctgcctgatgccctgaatgtggagcacagcagaaatgccatgcagatccagagcgacaacctgtacaagagtgacttcaccaactggatgaagggcatcggctgggtgcccatcgagagcctggaggtggagaaggccaagaaggccggggagatcctgtctgagaagaagtaccggcagcaccctgagaagctgaagttcacctacgccatggacaccatggagcaggccctgaacaagagcaacaagctgaacatggacaagaggctgtacacagagaagtggaacaaggacaagaccaccatccacgtgatgccagacaccccagacatcctgctgagccgggtgaaccagatcaccatgtctgacaagctgtacaaggccggctgggaggaggagaagaagaagggctatgacctgcggccagatgccatcgccatcaaggccgcccgggccagccgggacatcgccagtgactacaagtacaagaaggcctatgagcaggccaagggcaagcacatcggcttccgcagcctggaggatgaccccaagctggtgcacttcatgcaggtggccaagatgcagagcgaccgggagtacaagaagggctatgagaagagcaagaccagcttccacacccctgtggacatgctgtctgtggtggccgccaagaagagccaggaggtggccaccaatgccaactacagaaatgtcatccacacctacaacatgctgcctgatgccatgagctttgagctggccaagaacatgatgcagatccagagcgacaaccagtacaaggctgactatgctgacttcatgaagggcatcggctggctgcccctgggcagcctggaggccgagaagaacaagaaggccatggagatcatcagcgagaagaagtaccggcagcacccagacaccctgaagtacagcaccctgatggacagcatgaacatggtgctggcccagaacaatgccaagatcatgaatgagcacctgtacaagcaggcctgggaggccgacaagaccaaggtgcacatcatgccagacatcccccagatcatcctggccaaggccaatgccatcaacatgtctgacaagctgtacaagctgagcctggaggagagcaagaagaagggctatgacctgcggccagatgccatccccatcaaggccgccaaggccagccgggacatcgccagtgactacaagtacaagtacaactatgagaagggcaagggcaagatggtgggcttccgcagcctggaggatgaccccaagctggtgcacagcatgcaggtggccaagatgcagagcgaccgggagtacaagaagaactatgagaacaccaagaccagctaccacaccccagctgacatgctgtctgtgacagctgccaaggatgcccaggccaacatcaccaacaccaactacaagcacctgatccacaagtacatcctgctgcctgatgccatgaacatcgagctgaccaggaacatgaaccgcatccagagcgacaatgagtacaagcaggactacaatgagtggtacaagggcctgggctggagccctgctggcagcctggaggtggagaaggccaagaaggccacagaatatgccagtgaccagaagtaccggcagcaccccagcaacttccagttcaagaagctgacagacagcatggacatggtgctggccaagcagaatgcccacaccatgaacaagcacctgtacaccatcgactggaacaaggacaagaccaagatccacgtgatgccagacaccccagacatcctgcaggccaagcagaaccagaccctgtacagccagaagctgtacaagctgggctgggaggaggccctgaagaagggctatgacctgcctgtggatgccatctctgtgcagctggccaaggccagccgggacatcgccagtgactacaagtacaagcagggctacaggaagcagctgggccaccacgtgggcttccgcagcctgcaggatgaccccaagctggtgctgtccatgaatgtggccaagatgcagagcgagcgggagtacaagaaggactttgagaagtggaagaccaagttcagcagccctgtggacatgctgggcgtggtgctggccaagaagtgccaggagctggtgtctgatgtggactacaagaactacctgcaccagtggacctgcctgcctgaccagaatgatgtggtgcaggccaagaaggtgtatgagctgcagagtgaaaatctctacaagagtgacctggagtggctgcggggcatcggctggagccccctgggcagcctggaggccgagaagaacaagagggccagcgagatcatcagcgagaagaagtaccggcagcccccagacaggaacaagttcaccagcatcccagatgccatggacatcgtgctggccaagaccaatgccaagaacagaagtgaccggctgtaccgggaggcctgggacaaggacaagacccagatccacatcatgccagacaccccagacatcgtgctggccaaggccaacctgatcaacaccagtgacaagctgtacaggatgggctatgaggagctgaagaggaagggctatgacctgcctgtggatgccatccccatcaaggccgccaaggccagccgggagatcgccagcgagtacaagtacaaggagggcttcaggaagcagctgggccaccacatcggggccaggaacattgaagatgaccccaagatgatgtggagcatgcacgtggccaagatccagagcgaccgggagtacaagaaggactttgagaagtggaagaccaagttcagcagccctgtggacatgctgggcgtggtgctggccaagaagtgccagaccctggtgtctgatgtggactacaagaactacctgcaccagtggacctgcctgcctgaccagagtgatgtgatccacgcccggcaggcctatgacctgcagagcgacaacctgtacaagagtgacctgcagtggctgaagggcatcggctggatgaccagcggcagcctggaggatgagaagaacaagagggccacccagatcctgagtgaccacgtgtaccggcagcacccagaccagttcaagttcagcagcctgatggacagcatccccatggtgctggccaagaacaatgccatcaccatgaaccaccggctgtacacagaggcctgggacaaggacaagaccaccgtgcacatcatgccagacaccccagaggtgctgctggccaagcagaacaaggtgaactacagcgagaagctgtacaagctgggcctggaggaggccaagaggaagggctatgacatgagggtggatgccatccccatcaaggccgccaaggccagccgggacatcgccagcgagttcaagtacaaggagggctacaggaagcagctgggccaccacatcggggcccgggccatcagagatgaccccaagatgatgtggagcatgcacgtggccaagatccagagcgaccgggagtacaagaaggactttgagaagtggaagaccaagttcagcagccctgtggacatgctgggcgtggtgctggccaagaagtgccagaccctggtgtctgatgtggactacaagaactacctgcaccagtggacctgcctgcctgaccagagtgatgtgattcatgcccggcaggcctatgacctgcagagcgacaacatgtacaagagtgacctgcagtggatgaggggcatcggctgggtgtccatcggcagcctggatgtggagaagtgcaagagggccacagagatcctgagtgacaagatctaccggcagcccccagaccgcttcaagttcacctctgtgacagacagcctggagcaggtgctggccaagaacaatgccatcaccatgaacaagaggctgtacacagaggcctgggacaaggacaagacccagatccacatcatgccagacaccccagagatcatgctggccaggatgaacaagatcaactacagcgagagcctgtacaagctggccaatgaggaggccaagaagaagggctatgacctgcggagtgatgccatccccatcgtggccgccaaggccagccgggacatcatcagtgactacaagtacaaggatggctactgcaagcagctgggccaccacatcggggccaggaacattgaagatgaccccaagatgatgtggagcatgcacgtggccaagatccagagcgaccgggagtacaagaaggactttgagaagtggaagaccaagttcagcagccctgtggacatgctgggcgtggtgctggccaagaagtgccagaccctggtgtctgatgtggactacaagaactacctgcacgagtggacctgcctgcctgaccagagtgatgtgatccacgcccggcaggcctatgacctgcagagcgacaacatctacaagagtgacctgcagtggctgcggggcatcggctgggtgcccatcggctccatggatgtggtgaagtgcaagagggccacagagatcctgagtgacaacatctaccggcagcccccagacaagctgaagttcacctctgtgacagacagcctggagcaggtgctggccaagaacaatgccctgaacatgaacaagaggctgtacacagaggcctgggacaaggacaagacccagatccacatcatgccagacaccccagagatcatgctggcccggcagaacaagatcaactacagcgagaccctgtacaagctggccaatgaggaggccaagaagaagggctatgacctgcggagtgatgccatccccatcgtggccgccaaggccagcagagatgtgatcagtgactacaagtacaaggatggctacaggaagcagctgggccaccacatcggggccagaaatattgaagatgaccccaagatgatgtggagcatgcacgtggccaagatccagagcgaccgggagtacaagaaggactttgagaagtggaagaccaagttcagcagccctgtggacatgctgggcgtggtgctggccaagaagtgccagaccctggtgtctgatgtggactacaagaactacctgcacgagtggacctgcctgcctgaccagaatgatgtgattcatgcccggcaggcctatgacctgcagagcgacaacatctacaagagtgacctgcagtggctgcggggcatcggctgggtgcccatcggctccatggatgtggtgaagtgcaagagagctgctgagatcctgagtgacaacatctaccggcagcccccagacaagctgaagttcacctctgtgacagacagcctggagcaggtgctggccaagaacaatgccctgaacatgaacaagaggctgtacacagaggcctgggacaaggacaagacccaggtgcacatcatgccagacaccccagagatcatgctggcccggcagaacaagatcaactacagcgagagcctgtaccggcaggccatggaggaggccaagaaggagggctatgacctgcggagtgatgccatccccatcgtggccgccaaggccagccgggacatcgccagtgactacaagtacaaggaggcctacaggaagcagctgggccaccacatcggggcccgggctgtgcatgatgaccccaagatcatgtggagcctgcacatcgccaaggtgcagagcgaccgggagtacaagaaggactttgagaagtacaagacccgctacagcagccctgtggacatgctgggcatcgtgctggccaagaagtgccagaccctggtgtctgatgtggactacaagcaccccctgcacgagtggatctgcctgcctgaccagaatgacatcatccacgccaggaaggcctatgacctgcagagcgacaacctgtacaagagtgacctggagtggatgaagggcatcggctgggtgcccatcgacagcctggaggtggtgcgggccaagagagctggggagctgctgagtgacaccatctaccggcagaggcctgagaccctgaagttcaccagcatcacagacaccccagagcaggtgctggccaagaacaatgccctgaacatgaacaagaggctgtacacagaggcctgggacaatgacaagaagaccatccacgtgatgccagacaccccagagatcatgctggccaagctgaaccgcatcaactacagcgacaagctgtacaagctggccctggaggagagcaagaaggagggctatgacctgcggctggatgccatccccatccaggccgccaaggccagccgggacatcgccagtgactacaagtacaaggagggctacaggaagcagctgggccaccacatcggggccaggaacatcaaggatgaccccaagatgatgtggagcatccacgtggccaagatccagagcgaccgggagtacaagaaggagtttgagaagtggaagaccaagttcagcagccctgtggacatgctgggcgtggtgctggccaagaagtgccagatcctggtgtctgacatcgactacaagcaccccctgcacgagtggacctgcctgcctgaccagaatgatgtgatccaggccaggaaggcctatgacctgcagagtgatgccatctacaagagtgacctggagtggctgcggggcatcggctgggtgcccatcggctctgtggaggtggagaaggtgaagagagctggggagatcctgagtgacaggaagtaccggcagcctgctgaccagctgaagttcacctgcatcacagacaccccagaaattgtgctggccaagaacaatgccctgaccatgagcaagcacctgtacacagaggcctgggatgctgacaagaccagcatccacgtgatgccagacaccccagacatcctgctggccaagagcaacagcgccaacatcagccagaagctgtacaccaagggctgggatgagagcaagatgaaggactatgacctgcgggcagatgccatcagcatcaagagcgccaaggccagccgggacatcgccagtgactacaagtacaaggaggcctatgagaagcagaagggccaccacatcggggcccagagcattgaagatgaccccaagatcatgtgtgccatccacgccggcaagatccagagcgagcgggagtacaagaaggagttccagaagtggaagaccaagttcagcagccctgtggacatgctgagcatcctgctggccaagaagtgccagaccctggtgacagacatcgactacagaaactacctgcacgagtggacctgcatgccagaccagaatgacatcatccaggccaagaaggcctatgacctgcagagcgacagcgtgtacaaggctgacctggagtggctgcggggcatcggctggatgcctgagggctctgtggagatgaacagagtgaaggtggcccaggacctggtgaatgaaagactctaccgcaccaggcctgaggccctgtccttcaccagcatcgtggacaccccagaggtggtgctggccaaggccaacagcctgcagatcagcgagaagctgtaccaggaggcctggaacaaggacaagagcaacatcaccatccccagcgacaccccagagatgctgcaggcccacatcaatgccctgcagatcagcaacaagctgtaccagaaggactggaatgatgccaagcagaagggctatgacatccgggcagatgccatcgagatcaagcacgccaaggccagccgggagatcgccagcgagtacaagtacaaggagggctacaggaagcagctgggccaccacatgggcttccgcaccctgcaggatgaccccaagtctgtgtgggccatccatgctgccaagatccagagcgaccgggagtacaagaaggcctatgagaagagcaagggcatccacaacacccccctggacatgatgagcatcgtgcaggccaagaagtgccaggtgctggtgtctgacatcgactacagaaactacctgcaccagtggacctgcctgcctgaccagaatgatgtgatccaggccaagaaggcctatgacctgcagagcgacaacctgtacaagagtgacctggagtggctgaagggcatcggctggctgcctgagggctctgtggaggtgatgagggtgaagaatgcccagaacctgctgaatgaaaggctgtaccgcatcaagccagaggccctgaagttcaccagcatcgtggacaccccagaggtgatccaggccaagatcaatgctgtgcagatcagcgagcccctgtacagagatgcctgggagaaggagaaggccaacgtgaatgtgcctgctgacacccccctgatgctgcagagcaagatcaatgccctgcagatcagcaacaagcgctaccagcaggcctgggaggatgtgaagatgacaggctatgacctgcgggcagatgccatcggcatccagcacgccaaggccagccgggacatcgccagtgactacctgtacaagacagcctatgagaagcagaagggccactacatcggctgccgcagcgccaaggaggaccccaagctggtgtgggccgccaacgtgctgaagatgcagaatgaccggctgtacaagaaggcctacaatgaccacaaggccaagatcagcatccctgtggacatggtgtccatctctgctgccaaggagggccaggccctggccagtgatgtggactaccgccactacctgcaccactggagctgcttcccagaccagaatgatgtgatccaggccaggaaggcctatgacctgcagagcgacagcgtgtacaaggctgacctggagtggctgcggggcatcggctggatgcctgagggctctgtggagatgaacagagtgaaggtggcccaggacctggtgaatgaaagactctaccgcaccaggcctgaggccctgtccttcaccagcatcgtggacaccccagaggtggtgctggccaaggccaacagcctgcagatcagcgagaagctgtaccaggaggcctggaacaaggacaagagcaacatcaccatccccagcgacaccccagagatgctgcaggcccacatcaatgccctgcagatcagcaacaagctgtaccagaaggactggaatgacaccaagcagaagggctatgacatccgggcagatgccatcgagatcaagcacgccaaggccagccgggagatcgccagcgagtacaagtacaaggagggctacaggaagcagctgggccaccacatgggcttccgcaccctgcaggatgaccccaagtctgtgtgggccatccatgctgccaagatccagagcgaccgggagtacaagaaggcctatgagaagagcaagggcatccacaacacccccctggacatgatgagcatcgtgcaggccaagaagtgccaggtgctggtgtctgacatcgactacagaaactacctgcaccagtggacctgcctgcctgaccagaatgatgtgatccaggccaagaaggcctatgacctgcagagcgacaacctgtacaagagtgacctggagtggctgaagggcatcggctggctgcctgagggctctgtggaggtgatgagggtgaagaatgcccagaacctgctgaatgaaaggctgtaccgcatcaagccagaggccctgaagttcaccagcatcgtggacaccccagaggtgatccaggccaagatcaatgctgtgcagatcagcgagcccctgtacagaaatgcctgggagaaggagaaggccaacgtgaatgtgcctgctgacacccccctgatgctgcagagcaagatcaatgccctgcagatcagcaacaagcgctaccagcaggcctgggaggatgtgaagatgacaggctatgacctgcgggcagatgccatcggcatccagcacgccaaggccagccgggacatcgccagtgactacctgtacaagacagcctatgagaagcagaagggccactacatcggctgccgcagcgccaaggaggaccccaagctggtgtgggccgccaacgtgctgaagatgcagaatgaccggctgtacaagaaggcctacaatgaccacaaggccaagatcagcatccctgtggacatggtgtccatctctgctgccaaggagggccaggccctggccagtgatgtggactaccgccactacctgcaccactggagctgcttcccagaccagaatgatgtgatccaggccaggaaggcctatgacctgcagagcgacagcgtgtacaaggctgacctggagtggctgcggggcatcggctggatgcctgagggctctgtggagatgaacagagtgaaggtggcccaggacctggtgaatgaaagactctaccgcaccaggcctgaggccctgtccttcaccagcatcgtggacaccccagaggtggtgctggccaaggccaacagcctgcagatcagcgagaagctgtaccaggaggcctggaacaaggacaagagcaacatcaccatccccagcgacaccccagagatgctgcaggcccacatcaatgccctgcagatcagcaacaagctgtaccagaaggactggaatgacaccaagcagaagggctatgacatccgggcagatgccatcgagatcaagcacgccaaggccagccgggagatcgccagcgagtacaagtacaaggagggctacaggaagcagctgggccaccacatgggcttccgcaccctgcaggatgaccccaagtctgtgtgggccatccatgctgccaagatccagagcgaccgggagtacaagaaggcctatgagaagagcaagggcatccacaacacccccctggacatgatgagcatcgtgcaggccaagaagtgccaggtgctggtgtctgacatcgactacagaaactacctgcaccagtggacctgcctgcctgaccagaatgatgtgatccaggccaagaaggcctatgacctgcagagcgacaacctgtacaagagtgacctggagtggctgaagggcatcggctggctgcctgagggctctgtggaggtgatgagggtgaagaatgcccagaacctgctgaatgaaaggctgtaccgcatcaagccagaggccctgaagttcaccagcatcgtggacaccccagaggtgatccaggccaagatcaatgctgtgcagatcagcgagcccctgtacagagatgcctgggagaaggagaaggccaacgtgaatgtgcctgctgacacccccctgatgctgcagagcaagatcaatgccctgcagatcagcaacaagcgctaccagcaggcctgggaggatgtgaagatgacaggctatgacctgcgggcagatgccatcggcatccagcacgccaaggccagccgggacatcgccagtgactacctgtacaagacagcctatgagaagcagaagggccactacatcggctgccgcagcgccaaggaggaccccaagctggtgtgggccgccaacgtgctgaagatgcagaatgaccggctgtacaagaaggcctacaatgaccacaaggccaagatcagcatccctgtggacatggtgtccatctctgctgccaaggagggccaggccctggccagtgatgtggactaccgccactacctgcaccgctggagctgcttcccagaccagaatgatgtgatccaggccaggaaggcctatgacctgcagagtgatgccctgtacaaggctgacctggagtggctgcggggcatcggctggatgccccagggcagccctgaggtgctgcgggtgaagaatgcccagaacatcttctgtgacagcgtgtaccgcacccctgtggtgaacctgaagtacaccagcatcgtggacaccccagaggtggtgctggccaagagcaatgctgagaacatcagcatccccaagtaccgggaggtgtgggacaaggacaagaccagcatccacatcatgccagacaccccagagatcaacctggcccgggccaatgccctgaatgtgagcaacaagctgtaccgggagggctgggatgagatgaaggccggctgtgatgtgcggctggatgccatccccatccaggccgccaaggccagccgggagatcgccagtgactacaagtacaagctggaccacgagaagcagaagggccactacgtgggcaccctgacagccagagatgacaacaagatccgctgggccctgattgctgacaagctgcagaatgaaagagagtaccgcctggactgggccaagtggaaggccaagatccagagccctgtggacatgctgagcatcctgcacagcaagaacagccaggccctggtgtctgacatggactacagaaactacctgcaccagtggacctgcatgccagaccagaatgatgtgatccaggccaagaaggcctatgagctgcagagcgacaacgtgtacaaggctgacctggagtggctgcggggcatcggctggatgcccaatgacagcgtgtctgtgaaccacgccaagcatgctgctgacatcttcagcgagaagaagtaccgcaccaagattgagaccctgaacttcacccctgtggatgacagagtggactatgtgacagccaagcagagcggggagatcctggatgacatcaagtacaggaaggactggaatgccaccaagagcaagtacaccctgacagagacccccctgctgcacacagcccaggaggccgcccgcatcctggaccagtacctgtacaaggagggctgggagcggcagaaggccaccggctacatcctgcccccagatgctgtgccctttgtgcacgcccaccactgcaatgatgtgcagagcgagctgaagtacaaggccgagcacgtgaagcagaagggccactacgtgggcgtgcccaccatgagagatgaccccaagctggtgtggtttgaacatgctggccagatccagaatgaaaggctgtacaaggaggactaccacaagaccaaggccaagatcaacatcccagctgacatggtgtctgtgctggccgccaagcagggccagaccctggtgtctgacatcgactacagaaactacctgcaccagtggatgtgccacccagaccagaatgatgtgatccaggccaggaaggcctatgacctgcagagcgacaacgtgtacagagctgacctggagtggctgcggggcatcggctggatccccctggacagcgtggaccacgtgcgggtgaccaagaaccaggagatgatgagccagatcaagtacaagaagaatgccctggagaactaccccaacttccgctctgtggtggaccccccagagatcgtgctggccaagatcaacagcgtgaaccagagtgatgtgaagtacaaggagaccttcaacaaggccaagggcaagtacaccttctccccagacaccccccacatcagccacagcaaggacatgggcaagctgtacagcaccatcctgtacaagggggcctgggagggcaccaaggcctacggctacaccctggatgagcgctacatccccatcgtgggcgccaagcatgctgacctggtgaacagcgagctgaagtacaaggagacctatgagaagcagaagggccactacctggccggcaaggtgattggagagttccctggggtggtgcactgcctggacttccagaagatgaggtctgccctgaactacaggaagcactatgaggacaccaaggccaacgtgcacatccccaatgacatgatgaaccacgtgctggccaagcgctgccagtacatcctgagtgacctggagtaccgccactacttccaccagtggaccagcctgctggaggagcccaacgtcatccgggtgagaaatgcccaggagatcctgagtgacaacgtgtacaaggatgacctgaactggctgaagggcatcggctgctacgtgtgggacaccccccagatcctgcacgccaagaagagctatgacctgcagagccagctgcagtacacagctgctgggaaggagaacctgcagaactacaacctggtgacagacacccccctgtatgtgacagctgtgcagagcggcatcaatgccagcgaggtgaagtacaaggagaactaccaccagatcaaggacaagtacaccaccgtgctggagaccgtggactatgacaggaccaggaacctgaagaacctgtacagcagcaacctgtacaaggaggcctgggacagagtgaaggccaccagctacatcctgcccagcagcaccctgagcctgacccacgccaagaaccagaagcacctggccagccacatcaagtaccgggaggagtatgagaagttcaaggccctgtacaccctgcccaggtctgtggatgatgaccccaacacagcccgctgcctgcgggtgggcaagctgaacatcgaccggctgtacagatctgtgtatgagaagaacaagatgaagatccacatcgtgcctgacatggtggagatggtgacagccaaggacagccagaagaaggtgtctgaaattgactaccgcctgcggctgcacgagtggatctgccacccagacctgcaggtgaatgaccacgtgaggaaggtgacagaccagatcagtgacatcgtgtacaaggatgacctgaactggctgaagggcatcggctgctacgtgtgggacaccccagagatcctgcacgccaagcacgcctatgacctgagagatgacatcaagtacaaggcccacatgctgaagaccagaaatgactacaagctggtgacagacacccctgtgtatgtgcaggccgtgaagagcggcaagcagctgagtgatgctgtgtaccactatgactatgtgcacagcgtgcggggcaaggtggcccccaccaccaagacagtggacctggaccgggccctgcacgcctacaagctgcagagcagcaacctgtacaagaccagcctgcggaccctgcccaccggctaccgcctgcccggggacaccccccacttcaagcacatcaaggacacccgctacatgagcagctacttcaagtacaaggaggcctatgagcacaccaaggcctacggctacaccctgggccccaaggatgtgccctttgtgcacgtgagaagagtgaacaacgtgaccagcgagcggctgtaccgggagctgtaccacaagctgaaggacaagatccacaccaccccagacaccccagagatccggcaggtgaagaagacccaggaggccgtgtctgagctgatctacaagagtgacttcttcaagatgcagggccacatgatcagcctgccctacaccccccaggtgatccactgccgctacgtgggggacatcaccagtgacatcaagtacaaggaggacctgcaggtgctgaagggcttcggctgcttcctgtatgacaccccagacatggtgcgcagccgccacctgaggaagctgtggagcaactacctgtacacagacaaggccaggaagatgagggacaagtacaaggtggtgctggacaccccagagtacaggaaggtgcaggagctgaagacccacctgtctgagctggtgtacagagctgctgggaagaagcagaagagcatcttcacctctgtgcctgacaccccagacctgctgcgggccaagaggggccagaagctgcagagccagtacctgtatgtggagctggccaccaaggagcggccccaccaccacgccggcaaccagaccacagccctgaagcacgccaaggatgtgaaggacatggtgtctgagaagaagtacaagatccagtatgagaagatgaaggacaagtacacccctgtgcctgacacccccatcctgatccgggccaagagggcctactggaatgccagtgacctgcgctacaaggagaccttccagaagaccaagggcaagtaccacacagtgaaggatgccctggacatcgtgtaccacaggaaggtgacagatgacatcagcaagatcaagtacaaggagaactacatgagccagctgggcatctggaggagcatcccagacaggcctgagcacttccaccacagagctgtgacagacacagtgtctgatgtgaagtacaaggaggacctgacctggctgaagggcatcggctgctacgcctatgacaccccagacttcaccctggccgagaagaacaagaccctgtacagcaagtacaagtacaaggaggtgtttgagaggaccaagagtgacttcaagtatgtggccgacagccccatcaacagacacttcaagtatgccacccagctgatgaatgagaagaagtacagagctgactatgagcagaggaaggacaagtaccacctggtggtggatgagcccaggcacctgctggccaagacagctggggaccagatcagccagatcaagtacaggaagaactatgagaagagcaaggacaagttcaccagcatcgtggacaccccagagcacctgcggaccaccaaggtgaacaagcagatcagtgacatcctgtacaagctggagtacaacaaggccaagccccggggctacaccaccatccatgacacccccatgctgctgcacgtgaggaaggtgaaggatgaggtgtctgacctgaagtacaaggaggtgtaccagaggaacaagagcaactgcaccatcgagccagatgctgtgcacatcaaggccgccaaggatgcctacaaggtgaacaccaacctggactacaagaagcagtatgaggccaacaaggcccactggaagtggaccccagacagaccagacttcctgcaggccgccaagagcagcctgcagcagagcgactttgagtacaagctggaccgggagttcctgaagggctgcaagctgtctgtgacagatgacaagaacacagtgctggccctgaggaacaccctcatcgagagtgacctgaagtacaaggagaagcacgtgaaggagcggggcacctgccacgctgtgcctgacaccccccagatcctgctggccaagacagtgagcaacctggtgtctgagaacaagtacaaggaccacgtgaagaagcacctggcccagggcagctacaccaccctgcctgagacccgggacacagtgcacgtgaaggaggtgaccaagcacgtgtctgacaccaactacaagaagaagtttgtgaaggagaagggcaagagcaactacagcatcatgctggagcccccagaggtgaagcacgccatggaggtggccaagaagcagagtgatgtggcctacaggaaggatgccaaggagaacctgcactacaccaccgtggccgacagaccagacatcaagaaggccacccaggccgccaagcaggccagcgaggtggagtaccgggccaagcacaggaaggagggcagccacggcctgtccatgctgggccgcccagacatcgagatggccaagaaggccgccaagctgagcagccaggtgaagtaccgggagaactttgacaaggagaagggcaagacccccaagtacaaccccaaggacagccagctgtacaaggtgatgaaggatgccaacaacctggccagcgaggtgaagtacaaggctgacctgaagaagctgcacaagcctgtgacagacatgaaggagagcctcatcatgaaccacgtgctgaacaccagccagctggccagcagctaccagtacaagaagaagtatgagaagagcaagggccactaccacaccatcccagacaacctggagcagctgcacctgaaggaggccacagagctgcagagcatcgtgaagtacaaggagaagtatgagaaggagcggggcaagcccatgctggactttgagacccccacctacatcacagccaaggagagccagcagatgcagagcggcaaggagtacaggaaggactatgaggagagcatcaagggcaggaacctgaccggcctggaggtgaccccagccctgctgcacgtgaagtatgccaccaagatcgccagcgagaaggagtacaggaaggacctggaggagagcatccggggcaagggcctgacagagatggaggacaccccagacatgctgcgggccaagaatgccacccagatcctgaatgagaaggagtacaagagggacctggagctggaggtgaagggccggggcctgaatgccatggccaatgagaccccagacttcatgagggccagaaatgccacagacatcgccagccagatcaagtacaagcagagcgctgagatggagaaggccaacttcacctctgtggtggacaccccagagatcatccacgcccagcaggtgaagaacctgagcagccagaagaagtacaaggaggatgctgagaagtccatgagctactatgagaccgtgctggacaccccagagatccagagggtgcgggagaaccagaagaacttcagcctgctgcagtaccagtgtgacctgaagaacagcaagggcaagatcaccgtggtgcaggacaccccagagatcctgcgggtgaaggagaaccagaagaacttcagctctgtgctgtacaaggaggatgtgtccccaggcacagccatcggcaagaccccagagatgatgagggtgaagcagacccaggaccacatcagctctgtgaagtacaaggaggccatcggccagggcacccccatcccagacctgcctgaggtgaagagggtgaaggagacccagaagcacatcagctctgtgatgtacaaggagaacctgggcaccggcatccccaccaccgtgaccccagaaattgagcgggtgaagaggaaccaggagaacttcagctctgtgctgtacaaggagaacctgggcaagggcatccccacccccatcaccccagagatggagcgggtgaagaggaaccaggagaacttcagcagcatcctgtacaaggagaacctgagcaagggcacccccctgcctgtgaccccagagatggagcgggtgaagctgaaccaggagaacttcagctctgtgctgtacaaggaaaatgtgggcaagggcatccccatccccatcaccccagagatggagcgggtgaagcacaaccaggagaacttcagctctgtgctgtacaaggagaacctgggcaccggcatccccatccccatcaccccagagatgcagagggtgaagcacaaccaggagaacctgagctctgtgctgtacaaggagaacatgggcaagggcacccccctgcctgtgaccccagagatggagcgggtgaagcacaaccaggagaacatcagctctgtgctgtacaaggagaacatgggcaagggcacccccctgcctgtgaccccagagatggagcgggtgaagcacaaccaggagaacatcagctctgtgctgtacaaggagaacatgggcaagggcacccccctggccgtgaccccagagatggagcgggtgaagcacaaccaggagaacatcagctctgtgctgtacaaggaaaatgtgggcaaggccacagccacccctgtgaccccagagatgcagagggtgaagaggaaccaggagaacatcagctctgtgctgtacaaggagaacctgggcaaggccacccccacccccttcaccccagagatggagcgggtgaagaggaaccaggagaacttcagctctgtgctgtacaaggagaacatgaggaaggccacccccacccctgtgaccccagagatggagcgggccaagaggaaccaggagaacatcagctctgtgctgtacagcgacagcttcaggaagcagatccagggcaaggccgcctacgtgctggacaccccagagatgagaagagtgcgggagacccagaggcacatcagcacagtgaagtaccacgaggactttgagaagcacaagggctgcttcacccctgtggtgacagaccccatcacagagcgggtgaagaagaacatgcaggacttcagtgacatcaactaccggggcatccagaggaaggtggtggagatggagcagaagagaaatgaccaggaccaggagaccatcaccggcctgcgggtgtggaggaccaaccctggctctgtgtttgattatgaccctgctgaggacaacatccagagccgcagcctgcacatgatcaacgtgcaggcccagaggaggagccgggagcagagccgcagcgccagcgccctgagcatctctggaggagaggagaagtctgagcacagcgaggccccagaccaccacctgagcacctacagtgatggcggcgtgtttgctgtgtccacagcctacaagcacgccaagaccacagagctgccccagcagaggagcagctctgtggccacccagcagaccaccgtgagcagcatccccagccaccccagcacagctgggaagatcttccgggccatgtatgactacatggccgcagatgctgatgaggtgtccttcaaggatggagatgccatcatcaacgtgcaggccattgatgagggctggatgtatggaacagtgcagaggactggaagaacaggcatgctgcctgccaactacgtggaggccatctag

SEQ ID NO: 62985 - DNA, 25578 bp, Artificial Sequence
  derived and/or modified sequence
atggccgacgacgaggactacgaggaggtggtggagtactacaccgaggaggtggtgtacgaagaagtccctggtgagaccattacgaagatctacgagactaccaccacccgcactagcgactacgagcaatctgaaacttctaaaccagcgcttgcgcagcccgcccttgctcaacccgctagcgcaaaaccagtcgagcggcgtaaagtgatacgcaagaaagtcgacccatccaaattcatgaccccatatatcgcacactcacagaagatgcaagacctgttctcccccaacaagtataaggagaaattcgagaagacaaaggggcaaccctacgccagtaccactgacactcctgaactgaggcggataaagaaggtgcaggaccagcttagtgaggtgaaatacaggatggatggggatgttgctaagacgatctgtcacgttgatgagaaggctaaagatatcgagcacgcaaagaaagtatctcagcaggtgagcaaggtcctctacaagcagaactgggaagatacaaaggacaaatacctgctgccacccgatgctcctgaactggttcaagcagtcaagaacaccgcaatgttctctaagaaactttacacagaggactgggaagccgacaagtccttattttacccctataatgactcacctgaactgaggcgggtggctcaagcccagaaggccctgagcgacgtagcatacaagaagggactcgccgagcaacaggcccagttcactcctcttgcggacccaccagatatcgagtttgccaagaaggtgactaaccaggtcagtaagcagaagtacaaggaagattatgagaataaaatcaaagggaagtggtccgagacgccttgcttcgaggtggcaaacgcgcgaatgaatgccgacaacattagcactcgaaaataccaggaagactttgagaatatgaaagaccagatctacttcatgcagacagaaactcctgaatacaaaatgaataagaaggccggtgtggctgcctcaaaggtgaagtataaagaggattacgagaaaaataaaggcaaggcagactataacgtgctgcccgcgtccgaaaacccacaactgcgacagcttaaggcagcaggcgacgcactttctgacaaactctataaggagaattatgagaaaactaaagctaagagtataaactactgcgagactccaaagttcaagctcgatacagtcctacagaattttagttcagacaaaaagtacaaggattcttacctaaaagatatcctcggacattacgttggctcctttgaggacccttatcactcccattgcatgaaagtcacagcgcaaaattccgataagaattataaggccgaatacgaagaggataggggcaaaggtttttttccccagaccatcacacaagaatacgaggccatcaagaagctcgaccagtgcaaggaccatacttacaaggtacatccagacaaaaccaagtttacgcaggtgacagactctcctgtgctgctgcaggctcaggtcaattctaaacaactgtcagacctgaattataaggcaaaacatgagtcagaaaaatttaaatgccatattcctccagatactcctgcatttattcaacataaggtcaatgcatataaccttagtgacaatctttacaaacaggattgggagaaatctaaggctaagaagtttgatatcaaggtggatgccatccctctcctggctgcgaaggcaaatacaaagaatacctccgatgtcatgtataagaaggattacgagaaaaacaagggcaaaatgatcggcgtattaagtataaacgacgatcctaaaatgctccactctttaaaagtggctaagaatcaaagcgatcgactgtacaaggaaaattacgaaaagaccaaggctaagtccatgaactattgcgagacacccaaatatcagctggacacccaactgaagaacttttcggaggctaggtacaaggacctctatgtgaaagacgtgttaggacactacgtcggatcaatggaggacccttaccatactcattgcatgaaagtcgcagcacagaacagtgacaagtcgtacaaggccgagtacgaggaggataaagggaaatgctatttccctcagacaataacccaggaatatgaagccattaagaaactcgatcagtgtaaagaccatacctataaagtgcacccggataaaaccaaattcaccgcagttacggacagccctgtcctgctgcaggctcagctgaatacgaaacaattaagcgacctgaactataaagctaagcacgagggcgaaaaatttaagtgccacatcccggccgatgcaccccagttcattcagcaccgggtgaacgcatataacttgagtgacaatgtgtataagcaggactgggaaaaaagtaaggcgaagaagtttgatattaaggtggacgccattcccctcctcgccgccaaggctaacacgaagaataccagtgacgttatgtacaagaaagattacgagaagtctaaaggcaagatgataggggccctgagcataaatgacgaccccaagatgcttcactccttgaagactgccaaaaaccagagtgatagggagtataggaaagattatgagaagagcaagacgatctacaccgctcccctggatatgttgcaggtgacccaggccaagaaaagccaagccatcgcctctgacgtcgattataaacacatactccactcctactcctaccctcccgatagcatcaacgtcgacctggctaaaaaagcatacgcactgcagtctgatgtagaatacaaagctgactataattcatggatgaaaggttgcggttgggttccattcgggtcgcttgaaatggaaaaagctaaacgcgcctctgatattctgaatgaaaagaagtataggcagcaccccgatactctgaaatttacatcaatcgaggacgcaccaatcacagtccagagcaagatcaaccaggcgcagcggtctgacattgcctacaaggccaagggagaggagatcatacacaagtacaatctgcctcctgacctgcctcaattcatccaggctaaagtcaacgcctacaatatcagcgagaacatgtataaagctgatctgaaggacctgtccaaaaaggggtatgatctgcgcactgatgcgatcccaatcagggcagccaaggcggctcgccaggctgcgtccgacgtgcagtataagaaagattacgaaaaggcaaagggtaaaatggtgggatttcagagtctacaggacgatcccaaactggtacattacatgaatgttgctaagatacagtccgacagggaatataagaaggattatgaaaagacaaagagtaaatataacacaccccatgatatgtttaacgtggtggccgctaagaaggcacaggatgtcgtgtcaaatgttaattacaagcattcactgcatcactacacctatctgcccgatgccatggacctggagctctcgaaaaatatgatgcagatccagagcgacaacgtctacaaagaggattataacaactggatgaaaggcatcgggtggatccctatcggcagtcttgacgttgaaaaggtaaagaaagctggggatgctctcaatgaaaaaaagtatcgccagcacccggacacactgaaatttacatcgattgttgactccccggtgatggtgcaggcaaaacaaaacacgaaacaagtgtcagacatactttataaagctaagggcgaggatgtaaaacacaagtatacaatgtctcccgacctccctcagtttctgcaagctaagtgtaatgcgtacaatatctcagatgtgtgttataagagggattggtatgatctcattgcaaaaggcaataatgtgcttggagatgcaatcccaattacagcggccaaggctagccgcaatatcgcatcagactataagtacaaagaggcttatgaaaagtccaaaggtaaacatgttggattcagatctctgcaagacgaccccaagcttgtgcactatatgaacgtcgccaagctgcagagtgacagggagtacaagaaaaattatgagaacacaaagacatcttatcacacaccaggcgacatggtgtctattactgcagccaagatggcccaggacgtagcaactaacgtcaattacaaacagcctctccaccattacacctatctgcccgatgctatgtcactcgaacacacacgaaatgttaatcagattcagtcggataatgtttataaagacgaatacaattctttcctaaagggaatcggttggattcccattgggagcctggaggtcgagaaggtgaaaaaagctggggacgcgctgaacgaacgtaagtatagacagcaccccgacacggtcaagttcactagcgtccccgattccatggggatggtgcttgctcagcacaataccaaacagcttagtgatctgaattacaaggtggagggggaaaaactcaaacataagtatactattgaccccgagctgccccagtttattcaggccaaagtgaatgcccttaatatgagcgatgcacactacaaggctgactggaaaaagactattgccaagggttacgatttaaggccagatgccatccctattgttgcggccaaatctagccggaacatcgccagcgattgcaagtataaggaggcttatgagaaggctaagggaaagcaggttggctttcttagcctacaggatgatcccaaactggtgcactacatgaacgttgccaaaatacagagtgatagagaatacaaaaagggctacgaggcaagcaagactaaatatcacactcctctggacatggtgtccgtaacagccgccaaaaaatctcaggaggttgctacgaacgctaactaccggcagagctaccaccactatactcttctcccagacgcattaaatgttgagcactctaggaatgccatgcagatccagtcagataatctgtataagagcgacttcacaaactggatgaagggaataggttgggttccgattgagtccctcgaagttgaaaaggccaaaaaagcaggcgagattctttccgagaagaagtataggcagcatccagagaagctcaagttcacctacgctatggacacaatggaacaggccctaaacaagtccaataaactaaatatggataaaaggctgtacacagagaaatggaacaaggacaagacaactatccacgttatgcccgacaccccggatatcctactttcacgagtcaatcaaatcacgatgtctgataagctttacaaagccggatgggaagaggagaaaaaaaagggatatgatcttcggcctgacgctatcgccattaaggccgcacgggcgagccgcgacatagcgagcgactataaatacaagaaggcctacgaacaggctaagggcaagcatatagggtttcgcagtctggaagacgacccaaagcttgtacactttatgcaggtggccaagatgcagagtgatcgcgaatacaaaaagggctatgaaaagtccaagacctccttccacacgcccgtggatatgctctccgtcgtagccgccaaaaagagccaggaagtcgcgaccaatgccaattatagaaacgtcatacacacttataacatgctgcctgatgccatgtccttcgagctggccaaaaacatgatgcaaattcaaagcgataaccagtacaaagcggactatgcggacttcatgaaaggtatcgggtggctgccactgggatcactcgaggcagaaaagaacaagaaggctatggagatcatctccgagaaaaagtaccggcagcaccccgacaccctgaaatattcaactctcatggacagcatgaatatggtgctggcccagaataatgcgaagattatgaatgaacatctgtataagcaagcatgggaagctgataaaactaaggttcacattatgcccgacattccacaaatcattctggccaaggctaacgcaatcaatatgtccgataaactttacaagcttagtctggaagaatctaagaagaagggctatgatctccgacccgatgctatacctatcaaggccgcaaaagcctcccgtgacatcgcatcggactacaaatataagtataactatgagaaggggaaggggaagatggtgggttttcgatccctggaggacgatcccaagctggtacattcaatgcaggtagctaagatgcagagcgacagagagtacaagaagaactacgagaacacaaagacatcttaccatacccccgctgatatgctatccgttactgccgcaaaggacgcccaagctaacatcacaaatacaaactacaagcacctcatccacaaatatatccttttgccagacgcgatgaacatagagctgaccagaaacatgaatcgtatacagtctgacaacgaatataagcaggactacaacgaatggtacaaaggactcgggtggagtcccgccgggtctctggaggtcgaaaaggccaagaaagccaccgaatatgcttccgaccaaaaatacaggcagcatccctccaacttccagttcaaaaaactcaccgactccatggatatggtgctggctaagcaaaatgcacacacaatgaacaaacacttgtacactattgattggaacaaagacaagaccaagatacatgttatgcctgatactccggatatcctgcaagcaaaacagaaccagactttatatagccagaaactctataaactggggtgggaggaggcactgaaaaaaggttacgacctgcctgtggacgccatctcagtgcagttagcaaaggcctctcgggacattgcctctgactacaaatacaaacagggttaccggaagcagctgggacatcacgtgggcttcaggtcgttacaggatgaccctaagctggtactgtccatgaatgtcgctaagatgcaaagcgagagggagtacaagaaggatttcgaaaagtggaagaccaagttcagtagccctgtggacatgttgggggtagttctagccaagaaatgccaggagctagtgagtgacgttgattataagaactacctccatcagtggacctgcctgcctgaccagaacgacgttgtgcaggcgaagaaggtgtatgagcttcaaagcgagaatctgtacaaatctgatctagaatggctccgcgggatcgggtggtcccctctcggctcactcgaagccgagaagaacaagcgggcatcagagatcatcagtgagaaaaagtatcgccaaccgccggaccggaataagttcacaagcattcctgatgccatggacatcgtgctggccaagaccaacgctaaaaaccgctccgataggctgtaccgggaggcatgggataaggataagacccaaatacacattatgcccgacactccagacatcgtgctggccaaggccaatttaataaacacctctgataagctctaccgcatgggatacgaggagctcaaacgcaaaggatacgacctacctgtcgacgccatcccaatcaaggcagcaaaggcgagcagggaaatcgcatcagaatataagtacaaggagggttttaggaagcaacttgggcaccatatcggagcgcgcaacattgaggacgacccaaagatgatgtggtctatgcacgttgctaaaattcagagcgaccgagagtacaagaaagactttgaaaagtggaaaactaaattctcctcccctgtggacatgctcggggtggtcctggcaaaaaagtgtcagaccctcgtatctgatgtggattataaaaactacctgcaccagtggacgtgcctgcccgaccaatccgatgtaattcacgcccgtcaggcgtatgatctccaatccgacaacttatacaaaagtgacctacagtggctcaagggaatcgggtggatgacaagcggtagtctcgaagacgaaaagaataaacgcgccacgcagatcctctccgaccacgtttatcggcaacatcctgatcagtttaaattctctagcttgatggattctatccccatggtgctggccaaaaataatgccatcacaatgaaccatagattgtatactgaggcgtgggacaaggacaagaccaccgtccatatcatgccggacacaccagaagtactattagccaagcagaataaggtaaactactctgaaaaattgtacaagctggggttggaggaggcaaagaggaaaggctatgacatgagagtagacgccattcctatcaaagctgcaaaggcctcgcgcgatatcgccagcgagttcaagtacaaggagggctaccggaagcagctcggccaccatatcggagcccgtgcaattagggacgatcctaagatgatgtggtctatgcacgtggctaaaattcagtccgacagagaatataaaaaggatttcgagaagtggaaaaccaaattttcgtcgccggtggacatgttgggtgttgtgttagccaagaagtgccagaccctagtgtcagatgtcgattacaaaaactatttgcatcagtggacttgtttgcctgaccagagcgatgtcatacacgcccgccaggcctatgatctgcaatctgacaacatgtataagtccgatctccagtggatgaggggaataggctgggtgtctatcgggtccttggatgttgagaagtgcaagagagcaactgagatactgtccgacaagatctatcggcagccaccagataggttcaagttcacttctgtgacagactcactcgaacaggtgctggccaagaacaacgcgatcaccatgaataaaaggctctacaccgaggcctgggataaagataagacacaaatccacataatgccagatacacccgagatcatgctcgccagaatgaacaaaatcaactactctgagagcctttacaagctggcaaacgaggaggcaaagaagaaggggtatgatctgcgctccgacgctattcctattgtggctgctaaggctagccgcgatattatctcagactataaatacaaggacggctactgtaagcagcttgggcatcacattggcgccagaaatatcgaggatgaccctaagatgatgtggtctatgcatgtggctaagatccagtcagatagggagtataagaaagactttgagaaatggaagacaaagttcagctcacccgtcgatatgttgggcgtcgtattagcaaaaaaatgccagacactggtgtcagatgtggattacaagaactacctgcacgaatggacatgtctaccagatcagagtgatgtcattcacgcaagacaggcatacgatttgcagagtgacaacatctacaaatccgacctgcagtggctgcgtggcattggatgggttcctatcggctctatggacgttgtcaagtgcaagcgcgcgacagagattctatctgataatatctaccgacaacccccggataaactcaagttcacaagcgtgaccgactcactggagcaggtcctcgccaagaataatgccctgaatatgaacaagaggctgtacacggaagcctgggataaggacaaaacccagattcacattatgcctgacacacccgagatcatgcttgcgcgccagaacaagatcaattatagcgaaacgctgtacaagctggcaaacgaagaggcgaaaaagaaaggatatgacctgagatccgatgcaataccaattgttgctgcaaaagcatcccgagatgtgatctcggactacaaatacaaggacggctatcgcaaacagctgggccaccatatcggtgctcgaaacatcgaggacgacccaaaaatgatgtggagcatgcatgtggcaaagatccagagcgatcgcgaatataaaaaagatttcgagaagtggaaaactaagttttcaagcccggtcgacatgctgggagtggtactggctaagaagtgccaaactctggtgagcgatgtcgactacaagaactacttacacgagtggacatgtctgcctgaccagaatgacgtcattcacgcccgccaggcgtacgacctgcagtccgacaacatctataagtctgacttgcaatggttgagaggaatcgggtgggtcccaattggttccatggatgtggtgaaatgcaaaagagccgctgaaatcctgtctgataatatttaccgtcagccccccgacaagctcaaatttacctcagttacagacagcctggaacaggtgctggccaaaaacaatgctcttaacatgaataagcggttgtatacggaggcgtgggataaagacaaaacccaagtccacatcatgccagacacacctgagattatgctcgcccggcagaacaagatcaactactctgaatcactctataggcaggcaatggaggaagcgaaaaaggagggttacgatctccgtagtgatgctattcctatcgtcgccgcgaaggcctcccgagacatcgcaagcgactataagtacaaagaggcttataggaaacaattaggtcaccacatcggcgctagagcagtgcatgatgatcctaaaattatgtggtcgctacatatcgctaaggtgcaatccgaccgcgagtataagaaggattttgaaaagtacaagacacggtatagctcccctgtcgacatgctgggcatcgtgctcgcaaagaaatgccagacactggtttctgacgtggactataagcacccactgcatgagtggatttgtctaccagatcagaacgacatcattcacgcacgcaaggcctatgacctccagagcgataacctatataaatcagatttggaatggatgaagggtattggatgggttccaatagattctttggaggtggtgagagccaagcgtgcaggcgaactgttgtccgatactatttatcgtcagcggcccgaaactctcaagttcacaagcatcactgacacacccgaacaagttctagccaaaaacaatgctcttaatatgaacaagaggctgtataccgaggcttgggacaatgataaaaaaacgatccatgtaatgcctgataccccggagattatgctggccaagctgaatagaataaactacagcgacaagctgtacaaactcgccctggaggagtctaagaaggagggctacgacttacgcctggacgccattcccatacaggctgcaaaggcatcccgggatattgcatccgactacaaatacaaagagggctatcggaagcagttggggcaccacataggagctcgaaacatcaaagatgacccaaagatgatgtggtcgatccatgtcgctaagatccagtccgaccgcgagtacaaaaaggagtttgaaaagtggaagaccaagttctcttctccggtcgatatgctcggagtggtcctcgctaagaagtgtcagatcctggtgagcgacatcgactataagcatccactgcacgaatggacttgcctccctgatcagaatgatgtgatacaggcgcggaaggcttacgacttgcagagtgacgctatctacaagagcgatctggaatggctgcggggcataggatgggtgccgattggcagcgttgaggtcgagaaagtgaagcgcgctggcgagatcctaagcgaccgcaagtatagacagcccgctgaccagttgaaatttacgtgcattacagatacgcccgagattgtactcgcaaagaacaatgccctgacaatgtctaagcacctctacaccgaggcatgggatgctgacaaaaccagcatccatgtcatgcccgataccccagacatcctattagcaaagagcaatagcgctaacatctcccagaagctgtacactaaggggtgggacgagtctaaaatgaaggattacgacttacgggccgacgccatctcgattaagagcgccaaagcttccagagatattgcgtccgactacaaatataaggaggcttacgaaaaacagaaaggacatcatatcggagctcagtcaatagaggatgaccccaagattatgtgcgccatacacgcggggaagatccaaagcgagcgggagtacaagaaagaattccaaaaatggaagacaaagtttagttcaccggtggatatgctgagtattctgctggctaaaaagtgtcagactttagtgaccgatatcgattatcgtaattacctgcatgaatggacatgcatgccagatcagaacgatatcattcaagctaaaaaagcctatgatcttcagtctgactccgtgtataaggctgacttggaatggctgcgcggcattggatggatgccagaaggctctgtggagatgaatagggtcaaagtagcacaggatcttgtgaatgagcggctgtaccgcacacgacctgaggccttatcctttactagcatcgtagatacccccgaggtggtgcttgcaaaagccaatagccttcagatttctgagaagctgtatcaggaggcttggaataaagataagtcaaatatcacaatacctagtgacacacccgagatgctacaggcccacatcaacgctttgcagatcagcaacaagctgtaccagaaggattggaatgatgccaagcagaagggatatgatatccgggcggacgcgatcgagataaagcatgcaaaggcgtcccgtgaaatcgcctccgagtacaagtacaaagaggggtaccggaaacagttagggcatcacatgggctttcgtactctccaagacgatcccaaatcagtgtgggctattcacgcagcaaagatccagtccgatcgggagtataagaaagcctacgaaaagtcaaagggaattcataacactccattggacatgatgtcaattgtacaagcgaagaagtgtcaggttctggtctcagacatcgactacaggaattatctgcatcagtggacctgtctgccagatcagaatgacgtcattcaggcaaagaaggcctatgatttacagtcagataatctgtacaaatcagatctggagtggttgaagggcatagggtggctccccgaggggagcgtagaggtgatgcgggtgaagaatgctcagaatctcctcaatgagcgactgtatagaatcaagcctgaggcactcaaatttacatcaattgtagatacacctgaggtgatacaggcaaaaattaacgctgttcagatctctgagcccctctatagggatgcctgggagaaagaaaaagcaaatgttaatgttccagccgacacaccgttgatgttacagtcgaaaatcaacgcgcttcagatctccaacaagaggtaccagcaggcctgggaagatgtgaaaatgaccgggtatgacctcagggctgacgccataggtatccagcatgctaaagccagccgagatattgcctctgactacctctataaaactgcctatgagaagcagaagggccactacatcggctgcaggtccgcaaaagaagacccaaagttagtgtgggccgctaatgtactgaaaatgcagaacgatagattgtataaaaaggcttataacgatcataaggccaagatttccattccagttgatatggtctccattagtgccgccaaagaggggcaggcactggcatcagatgtggactaccgacattatctccatcactggtcctgcttccccgaccaaaatgacgttatccaagctcgaaaagcttatgacctccagtctgactcagtctataaggccgatttagaatggctacggggcatcggttggatgcctgagggcagcgtggagatgaacagggtcaaagtggcccaagatctggtaaacgaacgactttaccggaccaggcctgaagctctgagcttcacctccatagtggatacaccagaagtggtattggctaaggccaattcccttcagatttctgaaaagttatatcaggaagcctggaacaaagacaaaagcaatattaccatcccttcggatacaccagagatgttgcaagcccatataaatgctctgcaaatcagcaataagctctaccagaaggactggaacgacacaaagcaaaagggatatgatattagagccgacgccattgagatcaaacacgctaaagccagccgcgagattgcgtctgagtataaatacaaggaggggtatcgtaaacagctcgggcaccatatgggctttcggaccctgcaggatgatcccaaatctgtctgggctatccatgccgctaaaattcagtctgatagggagtacaaaaaggcttatgagaagtctaaggggatccacaatactcccctggatatgatgtccatcgtacaagcaaagaagtgtcaggtactcgtgtctgacatcgactaccgcaactacctccatcagtggacttgtctgccagatcagaatgacgtgatccaagccaaaaaagcctatgatcttcagtctgacaacctgtacaagagcgatctggagtggttgaaggggatcggatggctgccagagggaagcgtcgaggtcatgagagttaagaacgcacagaacctgcttaacgaacggctttataggattaagcccgaggccctgaaatttaccagtatagttgacacccccgaggttatccaggctaaaattaatgcggtgcagataagcgaacccctatatcgcaatgcttgggagaaagagaaagcgaacgtgaatgtccctgctgacactcctctcatgctccaaagtaaaattaatgcactccagataagcaacaagcggtaccagcaggcgtgggaagatgtgaagatgaccggttacgatttgcgggccgatgctattggcatacaacatgctaaggccagccgcgatattgctagtgattatctatataagactgcatatgaaaagcagaaaggccactacatcggctgtaggagcgctaaagaagaccccaagctcgtgtgggcagcaaacgtgcttaaaatgcagaatgacagactctataagaaagcatataacgaccataaggccaagatcagcatccccgttgatatggtctctatcagcgcagctaaagaagggcaggccctcgcttctgatgtagattatcgccactacctgcatcactggtcttgtttccctgaccagaacgatgttattcaagcccggaaggcatacgacctgcagtctgacagtgtgtacaaggccgacctcgaatggctcagaggtatcggttggatgcctgaaggatctgtggagatgaaccgcgtcaaggtggcccaggatctcgtcaacgaacggctctatcgaactagaccggaagcgctgagcttcacatccatcgtggatacgcctgaagtcgtgttggcaaaggcaaatagccttcaaatatccgagaagttgtatcaagaggcttggaataaggacaagagcaacattactatcccatccgacacaccagagatgctgcaggctcacattaatgcactacaaatctctaacaaactgtaccaaaaggattggaacgatacaaagcagaaaggctacgacataagggccgatgcgatagagattaaacatgccaaggcctcccgggaaattgcatccgaatacaaatacaaagaaggataccgcaagcagctggggcaccacatggggtttcgcacgctgcaagatgaccctaagtctgtctgggccatccacgccgcgaaaatacaaagcgatagggagtacaagaaggcctacgagaagtcgaagggcatccataatactcccctggacatgatgagcatcgttcaggctaagaagtgccaggtactggttagcgatatcgactatcgcaattacctacatcagtggacctgcctacctgatcagaatgacgtgattcaggcaaagaaggcatacgacctgcagagcgacaatctgtacaagagcgatcttgaatggctgaagggcataggctggctgcctgagggatccgtggaagtcatgcgagtaaagaatgcacagaacctgctcaacgaaaggctctaccgcattaagccagaagctctgaaattcacttctatagtggatacccccgaggtgatacaggcgaagataaacgccgtgcagatatctgaaccactctatcgcgacgcctgggaaaaagaaaaagcgaacgtgaatgtccccgctgacactcctttaatgttgcagagcaaaattaatgccttacagatcagcaacaagaggtatcagcaggcatgggaagacgtgaagatgactggctatgatttgcgtgccgatgccatcggaatccaacatgctaaagcttctagagacatcgcctccgattacttgtacaaaactgcctacgaaaagcaaaaaggtcactacatcggctgtaggtcggccaaggaagatcccaagctggtgtgggccgcgaatgttcttaaaatgcagaacgaccgcctctataaaaaggcatacaacgaccacaaggccaagatcagtatcccggtcgacatggtttcaatttcagccgccaaagaggggcaggcattggctagtgacgtagattatcgccactacttacatcgttggtcctgcttccctgatcagaacgacgtgattcaggcccgtaaggcgtacgatttgcagagcgatgctctttataaagctgacttagaatggctcagggggattggatggatgccccaaggtagcccagaggtcctgagagtgaaaaatgcccagaacattttctgcgattccgtgtataggactcccgtggtgaatctcaagtatacatcaatcgtggacacaccagaagttgtgctggcaaaaagtaacgccgagaatatttctattcccaagtaccgggaggtttgggataaagataagacctctatacatattatgccagacaccccagaaatcaatcttgcccgagcaaatgctttgaacgtgtcgaacaaactttatagagaaggatgggatgaaatgaaggctggatgtgacgtaagactggacgctatccctatccaagccgctaaagcttctagagagattgcatccgattacaagtacaaactggaccatgagaagcagaaaggccattacgttgggacgcttacagccagggacgataataaaatccgatgggcactgatagcagataaattgcaaaacgaaagggaatatcgcttagattgggctaagtggaaggcaaagattcaaagtcccgtcgatatgctgagtattttgcattctaagaactcccaggccctagtgtcagacatggattaccgtaattacctccaccagtggacatgtatgcccgaccagaacgatgtgattcaggccaaaaaggcgtacgaacttcagagtgacaatgtgtacaaggcggatctcgagtggctgagaggaatcggctggatgcccaatgactctgtctctgtgaatcatgctaagcacgccgctgacatcttttcagagaagaaatatcgtaccaaaatcgaaaccctgaactttacgcctgtggatgaccgggtggactatgtcaccgccaagcaaagcggggagatccttgacgatattaaatatagaaaggactggaacgccacaaaaagcaaatatacacttactgagacacctctgctccatacagcgcaggaagcagccagaattctcgaccagtatctgtacaaggagggctgggaacgtcagaaggccacggggtacatcctcccgcccgacgcagtgcccttcgtccatgctcaccattgcaatgacgtgcagtctgaactgaagtataaggctgagcacgtgaaacagaaggggcattacgtaggtgtccccactatgagggacgatccgaaactcgtgtggtttgagcacgcaggccaaatacagaatgagcggctttacaaagaggactaccataaaacaaaagcaaagatcaatattcctgccgacatggtgtccgtcctggccgcaaagcaaggccaaaccttagtgtctgatattgattaccgcaattacctccaccaatggatgtgtcatcccgatcagaacgacgtgattcaggcaagaaaagcttatgacctccagagcgacaatgtctatagggctgacctggagtggctgcgcggaatcggttggatccctctcgacagcgttgaccatgtcagagtgaccaagaaccaagagatgatgagtcaaatcaagtacaagaagaacgctcttgaaaattaccccaatttcaggtcagtggtggatccacctgaaatcgtgctggcaaagataaattctgtaaaccagtctgacgtcaagtacaaagagactttcaataaggccaagggcaagtacaccttttctccagacacaccgcatataagtcatagcaaagatatgggtaaactctacagcactatcctctataagggcgcatgggaaggaacgaaagcgtacggttacacgctcgatgagcggtatataccaatagtgggcgcaaagcatgctgatctcgtgaacagtgagctgaagtacaaagaaacttatgaaaagcagaaggggcactacctcgcggggaaagtcataggcgagtttcctggggtggttcattgtcttgacttccagaaaatgaggagtgcattaaactatcgcaaacactatgaagacaccaaagctaatgtccatatcccaaatgacatgatgaaccatgtgctggccaaacgttgtcagtacattttatctgacctggagtatcggcattactttcaccagtggacttcattactagaggagccgaatgtcattcgggtccggaacgcccaggaaatccttagtgacaacgtatataaggatgacttgaattggctgaaaggtattggatgctacgtttgggatacaccccaaatactccacgcaaagaaatcttacgatctgcagtcccagctccagtatacagcagccggtaaggagaatcttcagaactataacctggtgacagacacccctctgtacgtgacggcagttcagagtgggataaacgcctccgaggtgaagtataaagagaactatcaccaaattaaagacaagtacaccacagtgttggaaacagtggactatgacaggacaagaaatttgaaaaacctgtatagttccaacctctacaaagaggcctgggatcgcgttaaagccactagttacattctcccatcatccacgctctcgctcacacacgctaaaaatcaaaagcacttggccagtcacattaagtatcgcgaggaatatgagaagttcaaggctctgtatacgttgccgcggagcgtcgacgacgacccgaacaccgccaggtgtctgcgcgtaggcaagctgaatatagaccggctgtacaggagcgtgtatgagaaaaacaagatgaagattcatattgtgccagacatggttgaaatggtgaccgcgaaggactctcaaaagaaggtgagcgagattgattatagattgagactgcacgagtggatctgtcacccagacttacaggtgaacgatcacgtgcggaaagtgaccgatcagatttctgacatagtgtataaagatgacttaaactggctgaagggaatcgggtgttacgtctgggatacaccagaaatcctccacgcgaagcacgcctacgaccttcgggatgacataaagtacaaagctcacatgctaaaaactcgcaacgactataaactggtgaccgacactcctgtgtacgtccaggccgtgaagagcggcaagcaactcagtgacgccgtttaccactacgattacgttcatagtgtccgcggtaaggttgctccgactactaagaccgtggatttggaccgagccctccatgcttacaagttacagtccagcaacctgtataagacttcactccgtaccctgccaacaggatacagactgccaggcgatacaccgcatttcaagcatatcaaagacactcgctatatgagctcttattttaaatataaagaggcttatgagcacactaaggcgtacggatatacactgggtccaaaggacgtgccctttgtccatgttaggcgcgtgaataacgtaactagcgaacgattgtacagagaactgtaccataagctgaaagataaaattcacacaacccccgatacgccagagatccgccaagtgaaaaaaacccaagaggctgtttcagaacttatatataagtcagacttctttaagatgcagggacacatgatttctttgccatataccccacaggtgattcactgcagatacgttggggacattacgtctgatatcaagtataaggaggacctgcaagtactgaaaggatttggctgtttcttgtacgacacccctgatatggtgcgctctcgtcacctaagaaaactgtggagcaactatctctacaccgataaagcccgaaaaatgcgggacaaatacaaagtcgtgttggacacccccgaatacagaaaagtccaggaattgaagactcatctttcagaactggtctatcgggccgctggcaaaaagcagaaatcaatcttcacgagtgttcccgacaccccagacctcctgcgggcgaagcggggccaaaaactacaatcgcagtacctctacgtggagttagctaccaaagagagacctcatcaccatgccgggaaccagactactgcattgaagcacgccaaggacgtaaaagacatggtgagcgagaaaaaatacaagatacagtacgagaaaatgaaagacaaatataccccggtccccgacacgccaatcctcatcagggcgaagcgcgcttattggaatgcatccgatcttcgttataaagagacattccaaaagacaaaggggaaataccacactgtcaaggatgccctggatattgtgtatcaccgaaaagtcaccgacgatattagcaaaataaagtataaggaaaactatatgtcacaactgggcatctggagaagcatccccgacagacccgagcacttccatcaccgcgccgttacagacacagtgagcgatgtgaagtacaaggaggaccttacctggcttaagggcatcggatgctacgcctacgatacaccagactttactctggccgaaaaaaacaaaacactttacagtaaatataaatataaagaggtctttgagaggacaaaaagtgactttaaatatgtggcagatagcccaattaaccggcacttcaaatacgctacccagttaatgaatgagaagaaatatcgggctgattatgagcagcggaaggacaaataccacctggtggtcgacgagccacgccatctgttagccaagactgctggtgatcagatctctcagataaagtacaggaagaactatgaaaagagtaaggacaagttcacctctatcgtggacacacccgaacacctgagaacaactaaagtcaacaaacagatttctgatatattgtacaagttggaatacaataaagcaaaaccccgcgggtatacgacaattcacgatacaccaatgcttttgcatgtgaggaaggtgaaagacgaggtcagtgacttaaagtacaaggaggtgtaccagaggaataaaagtaattgtacaattgaacccgacgctgttcacattaaagcagctaaggacgcatacaaggtaaacacaaaccttgactacaagaaacagtacgaggccaacaaagcccattggaaatggacacccgaccggccagactttctgcaggccgcaaagagcagtttgcaacagtcagattttgaatacaaacttgaccgggagttcctgaagggatgcaaactgagcgttaccgatgacaagaataccgtgctggctctgcgaaacactctcattgagagtgatctcaaatacaaggagaaacacgtgaaggaacgggggacctgtcacgccgttccggacacaccccagatattattggccaagactgttagtaaccttgtgagcgagaacaaatataaggaccacgtgaagaaacatcttgcgcagggttcttacacgacattacccgaaaccagagacaccgtgcacgtaaaggaggtgacaaaacatgtctccgatacaaactataagaagaagttcgtgaaagagaagggtaagtctaattactcaattatgctggaacccccagaggtgaaacacgctatggaagtggctaagaagcagtctgacgtggcatatcgaaaggatgcaaaagagaatcttcactacaccactgtggcggaccgcccagacatcaaaaaagcgacacaagcagcgaagcaggcttccgaggttgaataccgtgccaaacaccggaaagagggctcccacgggctgagcatgttgggacgcccagatatcgagatggctaagaaagcagctaagcttagctctcaggtgaagtatcgggagaatttcgataaggaaaaggggaaaacccctaagtataatcccaaagactctcagctgtacaaagttatgaaagatgcaaataacctagccagcgaggtaaaatacaaggccgacttgaagaaattgcataaacccgtcaccgacatgaaagaatctctgattatgaatcatgtgctcaatacctctcagctggcttcttcctatcagtataagaaaaaatatgagaaaagtaaaggccactatcacaccatccctgataatctagagcaactccacctgaaggaggccaccgagttgcagtctatcgttaagtacaaagaaaaatacgagaaggaaagaggtaagccaatgcttgatttcgaaaccccaacttatattacagcaaaggaaagtcagcagatgcagagcggcaaggaataccggaaggactacgaggagtctatcaaaggcaggaacctcacaggcctggaggtgaccccagccttacttcatgtgaaatacgcgacaaaaatagctagcgagaaggaatatcgaaaagacctagaggaaagcatcaggggtaagggacttactgagatggaagacacaccggatatgctccgcgcaaagaacgctacccaaatacttaatgagaaggaatacaaacgggatctcgaactggaagtcaagggaaggggactgaatgcgatggccaacgaaactccggattttatgagagctcgcaacgccacagatatagcctcacaaatcaagtacaagcaatccgccgaaatggagaaagccaactttacctccgtggtggacactccagaaattatacacgcccaacaggtaaagaacctgtcgagccagaagaaatacaaggaagacgccgaaaagtctatgtcctattacgagaccgtcctggacacgcccgagatccagagagttcgcgagaaccaaaaaaacttctcacttctgcaataccagtgcgatctgaaaaattccaaagggaagatcacagtcgtacaagacaccccagagatcctcagggttaaggaaaatcagaagaatttctcctctgtcctgtataaggaagacgtctctcctggcaccgcaataggcaagacacctgaaatgatgagagttaaacagactcaggaccatatctcttcagtgaagtacaaggaggcaatcggccaggggaccccgattcctgacctgcccgaggtgaagcgagttaaagagacccaaaaacacattagtagtgtgatgtataaagaaaatcttggcaccggcatccccaccactgtaactcctgagatcgagagagtgaaacgtaatcaagaaaacttttctagcgtactctacaaggagaatctgggcaagggcatccctaccccaatcactccggagatggagcgagttaagaggaatcaggagaactttagttctatactttataaggaaaacttatccaagggaactcctttaccagtgacaccagagatggaacgagttaagctgaatcaggagaatttcagcagcgtcctgtacaaagagaatgtgggcaagggtatcccaattcctataacccctgagatggaacgcgtcaagcataaccaggaaaacttctcatccgtgctgtacaaagagaatttaggaactggcattcctatcccaatcacccctgagatgcagcgcgtaaagcacaatcaggagaatctttcatctgttttatataaagagaatatgggcaagggaacaccgctgccagtgacgcctgagatggaaagggttaaacataaccaggagaatatttcgagcgttctgtacaaggagaacatgggcaaaggtaccccactcccagtgacccctgaaatggagcgcgtgaagcacaatcaggaaaacattagctccgtgctatataaagaaaatatgggcaaaggcacccctttagccgtcactcccgaaatggagcgggtgaagcataatcaggagaacattagctccgttctctacaaggagaatgtgggtaaagcaactgctacacccgtgaccccagagatgcagcgggtgaagcgcaaccaggaaaatatctcttctgtgttgtacaaggagaatttaggcaaagcaacaccgacaccgtttacacccgagatggaaagagtgaaacgtaaccaggagaactttagcagtgtgctttataaagaaaatatgcgcaaagctacccctacccccgtgactcctgagatggagcgtgctaaaagaaatcaggagaacatttcatctgtcttgtacagcgactcatttcggaaacagatccagggaaaagccgcatacgtgttggacacgcccgagatgaggcgggtgagagaaacacagaggcacatcagcaccgtgaagtatcacgaagattttgagaagcacaagggctgttttacccctgtcgtgacagatcccataactgagcgggtgaagaagaatatgcaggatttctccgacataaactatcgcggcattcaaagaaaggttgtcgagatggaacaaaaaagaaacgaccaggatcaggaaacgataacaggattgagagtctggcggacgaatcctggctctgttttcgattatgatccggccgaagataacattcagtctagatcccttcatatgatcaacgtgcaggcccagagacgttcacgcgagcagagcaggagcgcatccgctctaagcattagcgggggggaagaaaaatctgagcactccgaggcaccggatcaccacctcagtacttattctgatggcggtgtgtttgccgtgagcaccgcttataaacatgctaaaaccacagaacttcctcagcaacggtcctcttccgtggctacacagcaaacgaccgttagttcaattccaagccatcccagcacggcaggtaagatcttccgggcaatgtatgattacatggccgccgatgccgatgaagtctcgtttaaggatggagacgccattattaacgttcaggccatcgacgagggctggatgtatggtaccgtccagcgtacagggcgaaccgggatgttaccagccaactacgtggaagccatctag

SEQ ID NO: 62986 - DNA, 26202 bp, Artificial Sequence
  derived and/or modified sequence
aggcatcacgctggcttttgcctggggttctcaggaggggagagttgggagaggctttgctgctgaggaaatttatttggtagattgaaggtttgaacgagagctacagaaacgaaagaaaaagtctgtataagccaatggtgttcgggaagaaaataaccccattgccttgagtttgtaggtgccactactactctggaaaaatggcagatgacgaagactatgaggaggtggtggagtactacacagaagaagtggtttacgaagaggtgccgggagagacaataacaaaaatttatgagactacgacaacaaggacatctgactatgagcaatcagaaacttccaaaccagctctggcacagccagcactggcacagccagcatcagcaaagccggtggagaggaggaaggtcatccggaagaaagtggatccttcaaagttcatgaccccctacattgcacacagtcagaaaatgcaggatctttttagcccaaataaatacaaggagaagtttgagaaaacaaaaggacagccatacgccagcacaacagatactccagaacttcgcagaatcaaaaaagtacaagatcaactcagtgaggttaagtatcgaatggatggtgatgttgctaagactatatgtcacgtagatgaaaaagcaaaggatattgaacatgcaaagaaagtgtcgcagcaagtcagtaaggttttatacaagcagaactgggaagacaccaaggataagtacctgcttcctcctgatgcccctgaacttgtccaggccgttaagaacaccgccatgttcagcaagaaactgtacactgaagactgggaagcagacaaaagtttgttttacccctataatgatagcccggaactgaggagagttgcccaggcccagaaagctctcagtgatgttgcctacaaaaaaggtctcgctgaacagcaagctcaattcacgcctctggctgatcctccagatatagaatttgccaagaaagtaaccaatcaagtgagcaagcaaaaatacaaagaagactatgaaaataaaatcaaaggcaaatggagtgagacaccttgctttgaagttgcaaatgccagaatgaatgctgataacattagcacaaggaaataccaggaagattttgaaaacatgaaagaccagatctacttcatgcagaccgaaacaccagagtataaaatgaataaaaaagctggtgtggcagctagcaaggtaaaatacaaagaagactatgaaaagaataaaggaaaagcagattataatgtgcttcctgcttcagagaacccacagcttaggcagctgaaggcagcaggagatgccctaagtgacaaactatacaaggaaaactatgaaaagacaaaagcaaagagcataaattactgcgagacccccaaattcaagctcgatactgttctgcagaacttcagtagtgataaaaaatataaagattcctacttaaaagatattttgggacattatgtaggcagcttcgaggatccataccattcacactgcatgaaagtcacagctcaaaacagtgataaaaactacaaagcagaatacgaagaagacagaggcaaaggcttcttccctcagaccataactcaagaatatgaagcaattaagaaactagatcagtgtaaagaccacacctacaaagtccatccagataagacaaaattcacccaagttacagactctcctgttctgctacaagcccaagtcaattccaaacaactgagtgacttaaattacaaagcaaaacatgaaagtgaaaagttcaagtgccatatcccccctgatactcctgcttttatccagcacaaagtcaatgcctataacttgagtgataatctttataagcaagactgggagaagagcaaagccaaaaagtttgacattaaagtggatgccattcccctgctggcagccaaagccaacaccaagaacaccagcgatgtgatgtacaagaaagactatgaaaaaaacaaagggaaaatgattggagtcctcagcattaatgacgatcccaagatgctgcactccttgaaggtggccaaaaaccagagtgatagattatacaaggaaaactatgagaagacaaaggcaaagagtatgaattactgtgagaccccaaaatatcaacttgatactcagctgaagaacttcagtgaggctagatataaagacttatatgtaaaggatgttttgggacattatgtaggcagcatggaggacccatatcacacacactgcatgaaagttgcagctcaaaacagtgataaaagttacaaagcagaatatgaagaagataaaggaaaatgctatttccctcagacaataacacaagaatatgaagcaatcaagaagctggaccagtgtaaagatcatacctacaaagttcatccagataagaccaaattcacggcagtcactgattctcctgtactgttgcaagcccagctcaacacgaaacagcttagtgatctgaattacaaagcaaaacatgaaggtgagaagttcaagtgccatataccagcagatgctccacagtttatccaacacagagtcaatgcctataatctgagtgataatgtttataagcaagactgggagaagagcaaagccaagaagtttgacattaaagtggacgccattcccctgttggcagccaaagccaacaccaagaacaccagcgatgtgatgtacaagaaagactatgaaaagagcaaagggaaaatgattggagccctcagcattaatgacgatccaaagatgctgcactccttgaagacagccaaaaaccagagtgatcgcgaatatcgaaaagattatgaaaagtcaaaaactatctacacggcacctcttgatatgctccaagtcactcaagctaagaaatctcaggcaattgccagcgacgttgattataagcacatcttacacagttacagctacccccctgatagcatcaatgtggaccttgccaagaaggcatatgcgctgcagagcgatgttgaatacaaagctgactacaatagctggatgaaaggttgtggctgggtgccttttgggtccttagaaatggaaaaggcaaagcgagcttcagacatcctcaatgagaaaaaatatcgccaacatccagacaccctcaagtttacctcgattgaagatgctccaattacagtacagtctaaaattaaccaggcccagaggagtgatatcgcttacaaagccaaaggagaggaaattattcacaaatacaacctgccaccagacctgccccagttcatccaggctaaagttaatgcctacaatatcagtgagaatatgtacaaagcagacttgaaagacttgagcaagaagggatatgacctgagaactgatgcgattcccatcagagctgccaaagctgccaggcaggcggcgagtgacgttcagtacaaaaaagactatgaaaaggctaaagggaaaatggttggcttccaaagtcttcaagatgaccctaaactggttcattatatgaacgtggccaagatacaatcagatcgggagtataaaaaagactatgagaagacaaagtccaaatacaacacgccccatgatatgttcaatgtcgtggcggctaagaaagcccaggatgtggtcagcaatgtcaactataagcattctctccatcattacacctacttgcctgacgccatggacctggagctgtctaagaacatgatgcagatacagagtgataacgtctacaaggaagactacaacaactggatgaaaggcattggctggattcctattggcagtctcgacgtcgaaaaagttaaaaaggccggtgatgctctgaatgaaaagaagtacaggcaacatccagacaccctcaaatttaccagcattgtggactccccagttatggtccaggcaaaacagaacacgaagcaagtcagtgatatcttatacaaggctaaaggagaagatgtgaaacataaatacaccatgagtcctgatcttcctcagtttctccaggccaagtgcaatgcttacaatataagtgacgtctgttataaacgggattggtatgacttaatagccaagggcaacaatgtgctgggcgatgctattcccatcactgcagccaaggcatcgagaaacattgccagtgattataaatacaaggaagcttatgagaagtcaaagggaaagcatgtgggtttcagaagcctccaggatgatcccaagctggtccactatatgaatgtggcaaagctgcagtctgatcgtgaatacaagaagaactatgagaacaccaaaaccagctaccatacccctggggacatggttagcatcacagctgcaaagatggcccaggatgtcgctaccaatgtcaactacaaacagccattgcatcattacacatacctacctgacgccatgagtcttgagcatacgaggaatgtcaatcaaattcagagtgataatgtgtataaagacgagtataacagcttcttgaagggcatcggatggatccctattggttccctggaggtggagaaggtcaagaaagcaggcgatgcattaaatgagaggaagtatcgacagcacccagataccgtcaagttcacaagtgtgcctgattccatgggcatggtgttggctcagcataacacaaagcagctaagtgatttgaactacaaggtagagggagagaaactgaagcacaagtatactattgaccctgaattgcctcagtttattcaagccaaagtcaacgccctcaacatgagtgatgctcattataaagcagattggaagaaaaccattgccaagggctatgatttgagaccagatgccatcccaattgttgctgcaaaaagttcaaggaatattgctagtgattgcaaatataaggaggcctacgagaaagccaaaggcaagcaagttggatttctcagtcttcaggatgatcctaaactggttcactacatgaatgtggccaaaatccagtctgatcgtgagtacaaaaagggctatgaagccagcaagaccaagtaccacacacctctggatatggtcagtgtgacagctgcaaagaaatctcaggaggttgccaccaacgccaactacagacagtcataccaccactacactctcctgcccgatgccttgaatgtggagcactccaggaatgccatgcagattcagagtgataatctgtacaaatctgacttcaccaattggatgaaagggatcggctgggtgcccatagagtccctggaggtggagaaggcaaagaaagcaggagagattcttagtgagaagaagtatcgccagcaccccgagaagctgaagttcacttacgccatggacacaatggaacaggcacttaacaagagtaacaaactgaacatggacaagaggctctacactgaaaaatggaacaaggacaagaccaccattcatgtcatgcctgacacaccggatattttactctccagagtaaaccaaatcaccatgagtgataaactgtacaaagctggctgggaagaggaaaagaagaaaggatatgacctgaggcctgatgccattgcaataaaggctgcaagagcctctagagacattgccagtgattacaaatacaagaaagcctatgaacaagccaaagggaaacacattggcttccggagcctggaagatgaccccaagctggtgcacttcatgcaagtggccaagatgcagtcagaccgggaatacaagaagggatatgagaaatccaagacctccttccacaccccggtggacatgctcagtgtggtggcagccaagaagtctcaggaagtggccaccaatgccaactacaggaacgtgatccatacctacaacatgcttcctgatgccatgagctttgaattggccaaaaatatgatgcagattcaaagtgataatcagtacaaggctgactatgctgacttcatgaagggcattggatggctccctctgggctccctggaagcagagaaaaacaagaaagccatggagattattagtgaaaagaagtaccgccagcacccagacactttgaagtattccacactcatggactcgatgaacatggttttggcccagaataatgcaaaaattatgaacgaacatctctacaaacaagcatgggaggctgacaaaaccaaagtccacatcatgcctgatatcccccagattattttggcaaaggcaaatgcaattaatatgagtgataaactctacaaactttccttggaagagtctaaaaagaaaggctatgatctcagacctgatgcaattcctatcaaagctgccaaggcttccagagatattgcaagtgattataaatacaagtacaattatgaaaaagggaaggggaaaatggttggtttccgcagtctcgaggatgatcccaaattagtccattccatgcaagtggctaagatgcaatctgatcgggagtacaagaaaaactatgagaacacaaagaccagctaccacacccctgccgacatgctcagtgtcacggctgcaaaggatgcccaagccaacatcaccaacactaactacaagcacctgattcacaagtacatcctccttccagatgcaatgaacattgagctgaccaggaatatgaatcgcatacagagtgataatgaatataagcaagattacaatgaatggtacaaagggcttggctggagtccagcaggttctctggaagtggagaaggccaagaaagcaactgaatatgccagtgatcagaaataccgccagcacccgagcaacttccagtttaagaagctgactgattccatggacatggtgcttgccaagcagaatgcacataccatgaacaagcatttatacaccattgattggaataaagataagaccaagattcatgtgatgcctgatacaccagatattttacaagccaagcagaatcaaacactgtatagtcagaaactctataaacttggatgggaagaagctttgaagaaaggctatgatctcccagttgatgcaatttctgtacagctagctaaagcttcaagagacattgctagtgattataaatacaaacaaggctaccgaaagcaacttggccaccatgttggattccggagtctgcaagatgacccaaaacttgtgttgtccatgaatgtagccaaaatgcagagtgaaagagaatacaagaaggactttgagaagtggaaaactaagttctccagcccagtggacatgttgggagtggtactggccaagaagtgtcaggagttggttagtgacgtggactacaagaactacctgcatcagtggacatgtctgcctgatcagaacgatgttgtgcaagctaagaaagtttatgaactgcaaagtgagaatctatataaatctgaccttgagtggctgagaggcataggatggagtcccttgggttctttagaggcagaaaagaacaagcgggcttcggaaatcatcagtgagaagaaatatcgtcagcctccagacagaaacaagttcaccagcattcctgatgccatggatatagttctggcaaagacaaatgccaaaaataggagtgatagactttatagagaagcttgggacaaagacaagactcagatccacatcatgcctgatacacctgacattgttctggctaaagcaaacttaatcaacacaagtgataaactctaccgaatgggttatgaggagctgaagagaaaaggttacgatcttcctgttgatgccataccaatcaaagcagcaaaagcctcccgggaaattgccagtgaatacaagtacaaggaaggctttcgcaagcagctcggccaccacattggtgcccggaacattgaagatgaccccaagatgatgtggtccatgcatgtggccaagatccagagtgacagggagtacaagaaggactttgagaagtggaagaccaagttcagcagcccagtggacatgctgggggtggtgttggccaagaagtgccagaccttagtcagcgacgtggactacaagaactacctgcaccagtggacatgcctgcccgaccagagcgatgtcatccatgctcggcaggcctatgacctccagagcgataatttgtacaagtcagaccttcagtggctaaaaggcattggctggatgactagtggttctctcgaggatgagaaaaataaacgagccacccagattttgagtgaccatgtttaccgtcagcacccagatcaatttaagttttccagccttatggattccataccaatggttttggcaaaaaacaatgctattaccatgaatcatcgcctctatacagaagcttgggataaagataaaaccactgtccacattatgccagatacccctgaagttttattagctaaacaaaacaaagtaaattacagtgagaaattgtataagcttggcctagaagaagccaagaggaaaggttatgacatgcgggtagatgccattcctatcaaggcagccaaggcctccagagatattgcaagtgaattcaagtacaaagaaggctatcgtaagcagctcggccaccacattggtgcccgagctatacgtgatgaccccaagatgatgtggtccatgcacgtggccaagatccagagtgacagggagtacaagaaggactttgagaagtggaagaccaagttcagcagcccagtggacatgctgggggtggtgctggccaagaagtgccagaccttagtcagcgatgtggactacaagaactacctgcaccagtggacatgcctgcccgaccagagcgacgtcatccatgctcggcaggcctatgacctccagagcgataatatgtacaagtctgatctccagtggatgagaggcattggctgggtgtccattggctctttggatgtggaaaaatgcaaaagggcaactgaaattttgagtgataaaatctatcgccagcctccagacagattcaaatttaccagtgtgactgactctctggaacaagtgttggccaaaaataatgccatcactatgaacaagcgtttatacacagaagcctgggacaaagacaagactcagatccacataatgccagacacaccagaaattatgttggcaagaatgaacaaaatcaactacagtgagagtctgtacaaacttgctaatgaagaagcaaagaagaaaggctatgacttgcgaagcgacgccatccccatcgtggcggccaaggcctccagggacatcatcagtgactacaaatataaagatggttactgcaagcaacttggccaccatattggagcccggaacattgaagatgaccccaagatgatgtggtccatgcacgtagccaagatccagagtgacagggagtacaaaaaggactttgagaagtggaagaccaagttcagcagcccagtggacatgctgggggtggtgctggccaagaagtgccagaccttagtcagtgacgtggactataagaactacctgcacgagtggacatgcctgcctgaccagagcgatgtcatccatgctcggcaggcctatgacctccagagtgacaatatttacaagtcagatctccagtggctgagaggcattggctgggtccccattgggtctatggatgtggtcaagtgcaagagagctaccgaaatactgagtgataacatctaccgccagcctccggacaagctgaaatttaccagtgtgactgattctctagagcaggtgctggccaagaacaatgctctcaacatgaataagcgtttatacacagaggcctgggacaaagacaagactcaaattcacataatgcctgatacaccagagattatgttggcaaggcagaacaaaatcaactacagtgagactctatacaaacttgccaatgaagaagcaaaaaagaaaggctacgacttgcgaagtgacgccatccccatcgtggctgccaaggcctccagggacgttatcagtgattacaaatacaaagatggttaccgcaagcagctcggccaccacattggagcccggaacattgaagatgaccccaagatgatgtggtccatgcatgtggccaagatccagagtgacagggagtataagaaggactttgagaagtggaagaccaagttcagcagcccagtggacatgctgggagtggtgttagccaagaagtgccagaccttagtcagcgatgtggactacaagaactacctgcacgagtggacgtgcctgcccgaccagaatgatgtcatccatgctcggcaggcctatgacctccagagcgataacatttacaaatctgatctccagtggctgagaggcattggctgggtccccattgggtctatggatgtggtcaagtgcaagagagctgctgaaatactgagtgataacatctaccgccagcctccggacaagctgaaatttaccagtgtgactgactctctagagcaggtgctggccaagaacaatgctctcaatatgaacaagcgcttatacacagaagcctgggacaaagacaagacccaagtccatattatgcctgatacacctgaaatcatgttggcaagacaaaataaaataaattatagtgagagcctctatcgtcaggccatggaagaagccaagaaagaaggctatgacttgagaagtgatgccattcccattgtggctgccaaggcctctcgggatattgccagtgattacaaatacaaagaagcatatcgtaaacagttgggtcaccacattggcgcccgagcagtacacgatgaccccaagataatgtggtccctccacattgccaaagtgcagagtgaccgtgagtacaagaaagattttgagaaatacaagacaaggtacagcagcccagtggacatgcttggtatcgttttggccaagaagtgtcagaccttggtcagcgatgtggactataaacatcctctgcatgaatggatctgcctgcccgaccagaatgacatcattcatgcacggaaagcctatgacctccagagtgacaatttgtataagtcagaccttgaatggatgaaaggcattggctgggttccgattgattccttggaagttgttagggccaagagagctggagaattacttagtgatactatctaccgtcagcgtccagaaacgctgaaatttaccagtataacggacactccggagcaggtgctggcaaaaaacaatgctttaaacatgaataagcgcttatatactgaagcctgggacaatgacaagaaaactattcatgtcatgcctgatacaccagaaatcatgttagccaaactcaaccgaataaactacagtgataaactctataaacttgctttggaagagtccaagaaggaaggctatgacttgcgtctggatgccattccaatccaagcagccaaggcttcaagagatattgctagtgattacaagtacaaggaaggctaccgcaaacagcttggccaccatattggggcccggaacattaaggatgacccgaagatgatgtggtccatccatgtggccaagatccagagtgacagggagtacaagaaggagtttgagaagtggaagaccaagttcagcagcccagtggacatgctgggggtggtgctggccaagaagtgtcagatccttgtaagcgacatagactacaagcatcccctgcatgaatggacctgcctgcctgatcagaatgacgtcattcaggctcggaaggcctatgacctgcagagtgatgctatttacaaatctgatcttgagtggctgagaggcataggatgggttcccattggctctgtagaggtcgagaaagtgaagagagctggagaaatcctgagtgacaggaagtatcgccagcctgcagaccagctcaaattcacatgcattaccgacactccggaaattgtcctagcaaagaataatgccctgacaatgagcaagcatttatacacagaagcttgggatgctgacaaaacctccatccacgtgatgccagacaccccagatatcctgctggccaagagtaattctgccaatatcagccaaaaactttacaccaagggatgggatgaatcaaagatgaaggactatgatctgagagcagatgctatttccatcaaaagtgccaaggcctccagggacatcgccagtgactacaaatacaaggaagcctatgagaaacagaaaggccaccacattggagcccagagcattgaagatgatcccaagattatgtgtgccatacatgcaggaaaaattcaaagtgaaagggagtacaagaaggaattccaaaagtggaaaaccaagttctctagcccagtggacatgttaagcatcttgctggccaagaaatgtcagactttggtcactgacattgattatcgcaattacctgcatgaatggacatgcatgccggatcaaaacgacattatccaagcaaaaaaggcctatgacctgcagagtgatagtgtgtataaggcagacctggagtggctgcgtggcatcggctggatgccagaaggctcagtggaaatgaacagagtgaaggttgctcaagacctcgtgaatgaaagactctataggacacgtccagaagctttgtcattcaccagcattgtcgacactccagaagttgtcttggcaaaagccaattctctgcaaataagtgagaaactgtatcaggaagcctggaataaagataaaagcaacatcaccattccttctgatactccggagatgctgcaggcccacatcaatgccttgcaaatcagcaataaactctaccaaaaagactggaatgacgccaagcagaaaggctatgacataagggcagatgccattgaaatcaagcacgccaaggcctccagagaaattgccagtgagtacaaatacaaagaaggttaccgtaagcaactgggccaccacatgggtttccgcaccctacaagatgaccccaagtcagtatgggctatacatgctgccaagatccagagtgacagagaatataagaaagcttatgagaagtctaaaggaattcacaacacaccgttggacatgatgtcaattgttcaagccaagaaatgccaggtcctggttagcgacattgattatcgcaattatctgcaccagtggacgtgtctgccagatcagaacgatgtgatccaggccaagaaagcctacgacctgcagagcgataacttgtacaagtcagacctggaatggctgaagggtattggatggctgccagagggttctgtggaagtgatgagagtgaagaatgcccagaatctcttgaatgaaaggctgtatcgtataaagcctgaggccctcaaattcaccagcattgttgacaccccggaagtaatccaggcaaagatcaatgctgtacagatcagtgagccattgtatcgcgatgcctgggagaaagagaaggctaatgtgaacgtgccagctgacactcccctgatgctgcaatccaaaatcaatgccctgcagatcagcaataaacgctatcagcaagcttgggaagatgtcaagatgactggttatgacctgcgagcagatgccattgggatccagcatgccaaggcttccagggatattgccagtgactatctgtacaaaactgcttatgagaaacagaaaggccattacattggctgtcgcagcgccaaggaagaccctaaactggtttgggcagcaaatgtgttgaagatgcagaatgacaggctgtacaaaaaggcctacaacgaccacaaagccaagatctccatccctgtggacatggtgtccatcagcgctgccaaagaaggtcaggcactggcaagtgatgtggactatcgccattacctgcaccactggtcttgctttcccgaccagaatgatgtgatccaagccaggaaagcctacgacctacagagcgacagtgtgtataaggcagacctggagtggctgcgtggcatcggctggatgccagaaggctcagtggaaatgaacagagtgaaggttgctcaagacctcgtgaatgaaagactctataggacacgtccagaagctttgtcattcaccagcattgtcgacactccagaagttgtcttggcaaaagccaattctctgcaaataagtgagaaactgtatcaggaagcctggaataaagataaaagcaacatcaccattccttctgatactccggagatgctgcaggcccacatcaatgccttgcaaatcagcaataaactctaccaaaaagactggaatgacaccaagcagaaaggctatgacataagggcagatgccattgaaatcaagcacgccaaggcctccagagaaattgccagtgagtacaaatacaaagaaggttaccgtaagcaactgggccaccacatgggtttccgcaccctacaagatgaccccaagtcagtatgggctatacatgctgccaagatccagagtgacagagaatataagaaagcttatgagaagtctaaaggaattcacaacacaccgttggacatgatgtcaattgttcaagccaagaaatgccaggtcctggttagcgacattgattatcgcaattatctgcaccagtggacgtgtctgccagatcagaacgatgtgatccaggccaagaaagcctacgacctgcagagcgataacttgtacaagtcagacctggaatggctgaagggtattggatggttgccagagggttctgtggaagtgatgagagtgaagaatgcccagaatctcttgaatgaaaggctgtatcgtataaagcctgaggccctcaaattcaccagcattgttgacaccccggaagtaatccaggcaaagatcaatgctgtacagatcagtgagccattgtatcgcaatgcctgggagaaagagaaggctaatgtgaacgtgccagctgacactcccctgatgctgcaatccaaaatcaatgctctgcagatcagcaataaacgctatcagcaagcttgggaagatgtcaagatgactggttatgacctgcgagcagatgccattgggatccagcatgccaaggcttccagggatattgccagtgattatctgtacaaaactgcttatgagaaacagaaaggccattacattggctgtcgcagcgccaaggaagaccctaaactggtttgggcagcaaatgtgttgaagatgcagaatgacaggctgtacaaaaaggcctacaacgaccacaaagccaagatctccatccctgtggacatggtgtccatcagcgctgccaaagaaggtcaggcactggcaagtgatgtggactatcgccattacctgcaccactggtcttgctttcccgaccagaatgatgtgatccaagccaggaaagcctacgacctacagagcgacagtgtgtataaggcagacctggagtggctgcgtggcatcggctggatgccagaaggctcagtggaaatgaacagagtgaaggttgctcaagacctcgtgaatgaaagactctataggacacgtccagaagctttgtcattcaccagcattgtcgacactccagaagttgtcttggcaaaagccaattctctgcaaataagtgagaaactgtatcaggaagcctggaataaagataaaagcaacatcaccattccttctgatactccggagatgctgcaggcccacatcaatgccttgcaaatcagcaataaactctaccaaaaagactggaatgacaccaagcagaaaggctatgacataagggcagatgccattgaaatcaagcacgccaaggcctccagagaaattgccagtgagtacaaatacaaagaaggttaccgtaagcaactgggccaccacatgggtttccgcaccctacaagatgaccccaagtcagtatgggctatacatgctgccaagatccagagtgacagagaatataagaaagcttatgagaagtctaaaggaattcacaacacaccgttggacatgatgtcaattgttcaagccaagaaatgccaggtcctggttagcgacattgattatcgcaattatctgcaccagtggacgtgtctgccagatcagaacgatgtgatccaggccaagaaagcctacgacctgcagagcgataacttgtacaagtcagacctggaatggctgaagggtattggatggttgccagagggttctgtggaagtgatgagagtgaagaatgcccagaatctcttgaatgaaaggctgtatcgtataaagcctgaggccctcaaattcaccagcattgttgacaccccggaagtaatccaggcaaagatcaatgctgtacagatcagtgagccattgtatcgcgatgcctgggagaaagagaaggctaatgtgaacgtgccagctgacactcccctgatgctgcaatccaaaatcaatgccctgcagatcagcaataaacgctatcagcaagcttgggaagatgtcaagatgactggttatgacctgcgagcagatgccattgggatccagcatgccaaggcttccagggatattgccagtgactatctgtacaaaactgcttatgagaaacagaaaggccattacattggctgtcgcagcgccaaggaagaccctaaactggtttgggcagcaaatgtgttgaagatgcagaatgacaggctgtacaaaaaggcctacaacgaccacaaagccaagatctccatccctgtggacatggtgtccatcagcgctgccaaagaaggtcaggcactggcaagtgatgtggactatcgccattacctgcaccgctggtcttgctttcccgaccagaatgatgtgatccaagccaggaaagcctacgacctacagagcgacgccctctacaaggctgacttggagtggttgcgtggcattggctggatgccccaagggtctcctgaagtgttgagagtcaaaaacgcccagaatatcttttgtgacagtgtctatcggacgcctgtggtgaaccttaagtacacaagcattgttgacacacctgaagtggtccttgctaaatcaaatgctgaaaatattagtattccaaagtacagagaggtttgggacaaggataaaacttcaatacacataatgccagatactccagaaattaatctcgctagagcaaatgctcttaatgtgagcaataaactttaccgtgagggctgggatgaaatgaaggcgggctgtgatgtccggctggatgccatccccatccaggctgccaaggcctccagggagattgccagtgactataaatataagcttgaccatgagaagcagaagggacactacgtgggcaccctcacagccagggatgacaacaagatccgctgggccctcatagctgacaagctccagaatgaacgagagtaccggctggactgggccaaatggaaggccaagatccagagccctgtggacatgctttccatcctgcactctaaaaattcccaggctctggtcagtgacatggattaccgcaattacctgcaccagtggacctgcatgcccgaccagaacgatgtgattcaggccaagaaggcctacgaactgcagagcgataatgtttacaaggctgacttggaatggttgcgtggaattgggtggatgccaaatgactccgtgtccgtcaatcatgccaaacatgccgcggacatcttcagtgagaaaaaatatcgcacaaaaatagaaactctcaactttacgcctgtggatgacagagttgattatgtgacagcgaaacaaagtggcgagatcctcgatgatattaaataccggaaagactggaatgccaccaaatcaaagtacaccctcacagaaacccccctgctgcacactgcccaggaggctgctaggatactggaccagtatctctacaaggaaggctgggagagacaaaaagccacaggttacattttgcctccagatgctgtgccatttgttcatgcccatcactgcaatgacgttcagagtgagctgaaatacaaagctgaacatgtgaagcaaaaaggtcattatgttggtgtcccgacgatgagagatgatcctaagctggtttggtttgagcatgcaggccagattcagaatgagagactatacaaagaggactatcacaaaacaaaggccaaaatcaatatacctgctgatatggtgtcagtcttggccgccaagcaggggcagacccttgtcagtgatattgattatcgtaattacttgcaccaatggatgtgtcatcctgaccagaacgatgttattcaggcaagaaaggcctatgacctacagagtgataatgtctacagagctgacctggagtggctccgaggcattggctggatcccactggattctgtggaccatgtaagggttactaagaaccaggaaatgatgagtcagatcaaatataagaaaaatgcccttgaaaactatcctaactttagaagtgtggtggatcctccagagattgttttagccaagattaattctgtcaatcaaagtgatgtaaaatataaagaaacatttaataaagcaaagggcaaatatacgttttcaccagatacaccacatatctcccactccaaagacatgggaaaactctacagtactatactgtataaaggggcgtgggagggcaccaaggcctatggctacaccctggatgagcgctacattcccattgttggagccaagcatgctgatctggtgaacagtgagcttaaatacaaagagacatatgagaagcagaaaggtcactacctggctggaaaagtgatcggtgaattccctggtgtggttcactgtctggatttccaaaagatgaggagtgcgttgaactacagaaaacattatgaggataccaaagcaaatgttcatatccccaatgacatgatgaatcacgtgctggctaaaaggtgccagtacatcctcagtgacctggagtatcgacactatttccaccagtggacgtctcttctggaagaacccaatgttatacgcgtccgaaacgcccaggagatcttgagtgataatgtgtataaagatgacctgaattggttgaaaggcattggttgctacgtttgggatacaccccaaatcctccatgccaagaaatcatacgaccttcagagtcagctacaatatacagcagcaggtaaagaaaatctacaaaactataatctggtcacagacacgcccctctatgtgactgctgttcagagtggcattaatgccagtgaggtaaaatataaagaaaattatcatcagattaaggacaaatacacaacagttctagaaacagtggattatgacagaaccagaaacctgaagaatctttacagcagtaacctgtacaaggaggcctgggatagagtgaaagccaccagctacatcctgccttccagcaccttgtccctgacacacgccaagaaccagaagcatctggccagccatatcaaatatcgggaagaatatgaaaagttcaaagctctttatacgttaccaagaagtgttgacgatgatccgaacacagcacggtgcctccgagttggcaagcttaacatcgatcgcctgtacagatcagtttatgaaaagaacaagatgaaaatccacatcgtgcccgacatggtagagatggttactgccaaggattcccagaagaaagtcagtgagattgattaccgcctgcgcctccacgaatggatttgccaccccgacttgcaagtcaatgatcacgtcaggaaagtcacagatcagatcagcgatattgtatacaaggatgacctcaactggctgaaaggcattggttgctacgtctgggacactcctgaaatcctccatgccaagcatgcttatgatctacgtgatgatatcaagtataaagctcacatgttgaaaacaaggaatgactacaagcttgtcacagatacaccagtctacgtgcaggctgtcaaaagtgggaaacagctaagtgacgctgtctaccactatgactatgtgcacagtgtcagaggcaaagtggctccaactaccaaaaccgtggatctggaccgggcccttcatgcatacaagctccagagttcgaatctatacaaaaccagcctgcgcaccctgcccactggatatagacttccaggtgacactcctcacttcaaacacatcaaggacacccgttacatgagcagttatttcaagtacaaagaagcctatgaacacaccaaggcatatgggtatacacttggccccaaagatgttccatttgtccacgtccggagagtcaacaatgttaccagcgagagactgtatcgggaattgtaccacaaactgaaagacaagatccatacaactcccgatacccctgagatccgccaagtcaagaagacacaagaggctgtcagtgagttgatctacaaatcagacttcttcaagatgcagggccacatgatctctctgccatacacaccccaagtgatccattgccgctatgtgggagacatcaccagtgatattaaatacaaagaggacttgcaggtcctgaagggatttggctgcttcctgtatgacactcctgacatggtccgctcccggcacctgcggaagctctggtctaattacctatacactgataaggcaaggaagatgcgagacaaatacaaagtggtgcttgacactccagaatacagaaaagtgcaagaactgaagacacatctgagtgagctggtctacagagctgcaggcaagaagcagaagtcaatctttacttcagttcctgatactcctgatcttttaagagccaagcgagggcagaagcttcagagtcagtatctgtatgttgaacttgccaccaaagagagaccccatcatcacgctggaaaccagaccacagccttgaagcatgctaaagacgtgaaggacatggtcagtgagaaaaagtacaagattcaatatgaaaagatgaaagacaagtacactccggttccagatacgccaatcctcatcagagccaagagggcttactggaatgccagtgatctacgctacaaagaaacatttcaaaagaccaaagggaaataccacacggtgaaagatgccctagacattgtctatcatcgcaaagtcacagatgacatcagtaaaataaaatacaaggagaactacatgagccagttgggtatctggaggtccattcctgatcgtccagagcatttccaccaccgagcagtcactgacacagtcagtgatgtaaaatataaagaagacttgacttggcttaaaggcattggttgctatgcctatgatacccctgatttcactctggctgaaaagaacaagactctctacagcaagtataagtataaagaagtatttgaaaggacaaagtcagatttcaagtatgttgccgactctccgatcaataggcatttcaagtatgcaactcaattgatgaatgagaaaaaatacagagctgattatgagcagcggaaagataaataccacctggtagtcgatgagcctagacatctgctggctaagaccgcaggcgaccagatcagtcagatcaaatacaggaaaaactatgaaaaatcaaaggacaaatttacctcaattgtggatactccagaacacctgcgtactacaaaagtcaacaaacaaatcagcgatatcctttataaattggaatacaacaaggccaaacccagaggctacaccacaatccacgacacacccatgttgctgcatgtccgcaaggttaaagatgaagtcagtgatctgaaatacaaagaagtataccaaagaaataaatccaactgcaccattgagccagatgctgttcatatcaaagcagccaaggacgcctacaaagtcaacaccaatctggactataagaaacagtacgaagccaacaaagcccactggaagtggactcctgaccgaccggacttcctccaggctgccaagtcatccctgcagcaaagcgattttgaatataagctggaccgggagttcctcaagggttgcaagctttctgtcactgatgacaaaaacacggtgctcgccctcaggaatactttaatagaaagtgatctgaaatacaaagagaaacatgtcaaggaaagaggaacctgccatgccgtacctgacacgcctcagatcctgctggcgaagactgtcagcaacctggtgtctgagaacaagtacaaggaccatgtcaagaagcacttggcacagggctcatacacaacactaccagagacccgggacactgttcacgtcaaggaagtgaccaagcatgtcagtgatacaaattacaaaaagaagtttgtcaaggagaaaggaaaatccaactactccatcatgctggagccaccagaggtgaaacatgctatggaagtggccaagaagcaaagtgatgtcgcttacagaaaagatgccaaagagaacctgcattacaccacagtggctgatcgaccagacatcaagaaggccacacaggcagccaaacaggccagtgaggtggagtacagagccaagcaccgcaaggaaggcagccatggcttaagcatgctcggtcgcccagacatagaaatggccaagaaggcagccaagctgagcagccaggttaaataccgagaaaatttcgataaagaaaagggcaagacaccaaaatacaatccaaaagacagccagctctacaaagtcatgaaagatgctaataatcttgcaagtgaggttaaatacaaggctgacctgaagaaacttcacaaacccgtgactgacatgaaggagtctctgatcatgaatcatgtcctgaatacaagccaacttgccagttcttaccagtacaagaagaagtatgagaagagtaaaggccactaccacaccatacccgataatctggagcagcttcacctaaaagaggccacagaattacagagtatagtgaaatacaaagaaaagtatgaaaaggaacgaggaaaacccatgctggactttgaaacaccaacgtacatcactgccaaagagtctcagcagatgcagagtgggaaagaatataggaaagattatgaagagtccattaaaggcagaaacctgactggcctggaggtcacgccagctttgttacatgtcaaatatgcaactaaaatagcaagcgagaaagagtacaggaaagatctagaggaaagcatccgtgggaagggcctcactgaaatggaagatacacctgacatgctaagagcaaagaatgccactcaaatcctcaatgagaaagaatataagcgagacctggaactggaagtcaaaggaagaggcctgaatgccatggccaatgaaactccggattttatgagggccaggaatgctactgatattgccagtcagattaagtataagcaatcagcagaaatggagaaagccaatttcacttctgtggttgatactccagagatcattcatgcccaacaagtcaagaatctttcaagccagaaaaagtacaaggaagatgctgagaagtccatgtcgtattatgagactgttttggacaccccagagatacagagagtccgggagaaccaaaagaacttcagccttctccaataccagtgtgaccttaaaaacagtaaaggaaaaattacagttgttcaagacacgccagaaatactgcgtgtaaaagaaaatcagaagaatttcagctcggttttatataaagaggatgtctcaccaggaacggctatcggaaagacacctgagatgatgagagtgaaacaaacacaggaccacattagctcggtgaagtataaggaagcaataggacaaggaactccaatccctgacctgcctgaagtgaaacgtgtgaaggagacgcagaagcacattagctcggttatgtacaaagaaaacttgggaacaggcattccaaccactgtgactccagagattgagagagtcaaacgcaatcaagagaactttagctcggttttgtacaaagaaaatttggggaaaggaatcccaacacctatcactccagagatggagagagtcaaacgcaatcaagagaactttagctcgatattgtacaaagagaacttgagcaaggggactcccctacctgtcactcctgagatggagcgagtcaaactcaatcaagaaaactttagctcggtgttgtataaagaaaacgttggaaaagggattccaatccccatcactccagagatggagagagtcaaacacaatcaagaaaactttagttcggtgctatacaaagaaaacctggggacaggaattccaatccccatcactcctgagatgcagagagtcaaacacaatcaagaaaaccttagctcggtgttatacaaagaaaacatgggcaagggaacccctttacctgtcactcccgagatggaaagagtcaaacacaatcaagaaaatattagctcggtgttatacaaagaaaacatgggcaagggaacccctctacctgtcactcctgagatggagagagtcaaacacaatcaagaaaatattagctcggtgttatacaaagaaaacatgggcaagggaactcctttagctgtcactcccgagatggagcgagtcaaacacaatcaagaaaatattagctcggttttgtacaaagaaaatgtggggaaagccaccgcaacccctgtcactcctgagatgcagagagtcaaacgcaatcaagaaaacattagctcggtgttatacaaagagaacctggggaaagcaacccccacaccctttactcctgagatggaaagagtgaaacgcaatcaagaaaactttagctcggtattgtacaaagagaacatgagaaaagcaactccgacacctgttactccagagatggagagagctaagcgcaaccaagaaaacattagctcggttctttattctgatagtttccggaaacaaatacaaggcaaagctgcctatgtattggatacccccgagatgagacgggtgagggagacccaacggcacatctcaacggtgaaatatcatgaagactttgagaaacacaagggttgcttcacaccagtggtgacagatcctatcactgaacgagtaaagaagaacatgcaggacttcagtgacattaactaccgaggtattcagaggaaagtggtagaaatggaacaaaaacggaatgaccaagatcaggagactattacaggtttacgtgtctggcgtactaatcctggttcggtttttgactatgatccagcagaagacaacatccagtcccgaagcttacacatgattaatgtccaagctcagcgccggagccgggagcagtcacgatctgccagtgcactaagcatcagtgggggtgaggagaagtctgagcattcagaagcaccagaccaccacctttcgacttacagcgacgggggtgtctttgcagtctcaacagcttacaaacatgcaaaaaccacagagctcccacaacaacgatcatcttcagttgctacccaacagacaacggtatcttccatcccatctcatccatctactgctggaaaaatcttccgtgccatgtatgactatatggctgctgatgcagatgaggtgtccttcaaggatggagatgccatcataaatgttcaagcaattgatgaaggctggatgtatggcactgtgcagaggactggcaggaccggaatgctcccagccaactacgttgaagctatttaggcatttcaaagcatcacacttgtctgcaggacttacagatcctgcagtcaatgtttcggtttagactctccactgttacctaagttctcaagctgcctatggtttttctgtgtcaatgtgatttatggtagtaccatcctttctcctttgggttttaaaataagttgcagaacagacactttaaaagcttctgcaatattatttctgtgcctagagtctttctccattataaacatgttttaacattatttcttttctaaaacagggattttgaatatgccaaacacattaaaggaaaaatagcagagatgttcaccttttccttgctgattgctaatgcttattatttctaattcagttctgaagttataaacttataatcaatacaaaccagcaactaataaaacctctaattctgcaa

SEQ ID NO: 62987 - DNA, 25577 bp, Artificial Sequence
  derived and/or modified sequence
atggcagatgacgaggattacgaggaagttgtcgaatattataccgaggaggtggtgtacgaagaagttcctggggaaacaatcacaaaaatctatgagaccaccaccactcgtaccagtgactacgaacagagtgagaccagcaagccggctctggctcaacccgctttggctcagcccgcaagcgccaagcctgttgagagaaggaaggtaatccgaaaaaaggtcgaccctagcaaatttatgaccccctatatcgcacactcccaaaagatgcaggatttgttctcccccaacaaatacaaggagaagtttgaaaagaccaagggccagccgtacgcgtccacgaccgatacccccgaactgcgcaggatcaagaaagttcaggaccagctctcagaagtgaaataccgcatggatggcgacgtcgccaagaccatttgtcatgtggacgagaaggccaaggatatcgagcacgccaagaaagtgtcacagcaagtgagtaaagtgttgtataaacaaaactgggaggatacgaaggacaagtacctgctgcccccagacgctccagaactggtgcaggccgtgaaaaacaccgctatgttctccaaaaagttgtacactgaggattgggaggctgacaaatccctattttacccttacaatgactcacccgagttgagaagggttgcccaggcccaaaaggcactctccgatgtggcgtataagaaaggattggcagaacagcaggcacagtttacacccctcgccgatccacccgatatcgaatttgccaaaaaagtgaccaatcaggtcagtaaacaaaagtataaggaggattacgagaacaaaattaaggggaagtggagtgaaaccccttgtttcgaagtcgctaacgccagaatgaacgcggataacatcagcacccggaaatatcaggaagactttgaaaatatgaaggatcagatttatttcatgcagactgaaacccccgaatataagatgaacaagaaggcgggagtcgctgctagcaaggtgaagtacaaggaggattacgagaaaaacaaagggaaggccgactacaacgtgctgcccgcaagtgagaatccgcaactgagacaactcaaggctgctggcgatgctctgtctgataaattatataaggaaaactacgaaaagacaaaggcaaaaagtattaactattgcgaaactcccaagttcaagcttgatacagtcctccagaacttttcatcagataaaaaatacaaagacagctatctgaaggatatccttggccattatgtcggctcattcgaggacccataccactcccattgcatgaaagtgacagcccagaattccgacaaaaactataaagcggagtatgaggaagaccggggtaagggcttctttccacaaacaatcacgcaagagtatgaggctattaaaaagctcgaccagtgcaaagatcacacgtacaaagtgcatcccgacaaaacgaaattcacgcaggtcacggactcaccagtgttactccaagctcaagtgaattcgaagcagctaagcgacctgaactacaaagccaagcacgagagcgagaagttcaagtgtcacataccacctgatactccggctttcatccagcataaggtgaatgcatacaacttgagcgataatttgtataaacaggattgggaaaaaagtaaagccaaaaaatttgacattaaggtggatgcaatccccctgctcgctgccaaagctaacactaagaacacatctgacgtgatgtacaaaaaagactatgagaagaacaaagggaagatgattggagttttgtcaatcaatgatgacccaaaaatgctccacagcttaaaggttgccaagaatcaatcagataggttatacaaggagaattacgagaagaccaaagccaagtctatgaattactgcgagacacccaaataccagctcgatacacagcttaaaaacttctctgaagccaggtacaaagatttatatgtgaaggacgtcctcggtcactatgtcggctccatggaagatccttatcacacacattgtatgaaagtggccgcacagaattctgataagtcttataaggccgaatatgaggaggataaggggaaatgttatttcccccaaaccataacgcaggagtatgaagcgattaaaaagctcgatcaatgtaaagatcatacttacaaggtccaccctgacaagaccaagttcacggcagtgacagattcaccggtcctgctgcaggcccagctcaacactaagcaattatccgatctgaactataaggccaaacacgagggtgaaaagtttaagtgccacatccccgcagatgctccccagtttattcagcaccgagtcaacgcctataacctgtctgacaacgtgtataagcaagattgggaaaaatctaaggcaaaaaaatttgacatcaaggtggatgcaatcccactcctcgccgctaaggccaacacgaagaacacgtcagacgtgatgtataaaaaggactatgaaaagagtaaggggaagatgatcggagcgctgtcaataaacgatgacccaaagatgctccactccctgaaaacggctaagaatcaatctgatagagagtaccgcaaggactacgagaagtctaaaacaatctataccgccccattggacatgctgcaggtcacacaagccaagaagtcacaggctattgcatctgatgtagattacaagcatatcctacatagctatagctaccctccggattcaatcaatgtggaccttgccaaaaaagcgtatgctttacagagcgatgttgagtacaaagctgattataattcttggatgaaggggtgtggttgggtgcccttcgggagtttggagatggagaaggccaaaagagcatccgacattctgaatgagaagaagtaccgtcaacaccctgacacccttaaatttacctcaattgaggacgccccaattacagtgcaaagcaaaatcaaccaagctcagcgtagtgatatcgcatacaaagccaagggggaggaaatcatacataagtacaacttaccgccagacctcccccagtttattcaggccaaagttaatgcgtataacatatctgaaaacatgtacaaggcagatctgaaggacttgagcaagaagggctacgatctgaggacagatgctattccgatccgggctgctaaagccgcacgtcaagcagcttcagatgtgcaatacaaaaaagactacgaaaaggccaaggggaagatggttggatttcagtcgttgcaggacgacccgaagctcgtgcactacatgaatgtggctaaaattcagtcggatagggagtataaaaaggactatgagaagaccaagtctaagtacaatacaccacacgatatgtttaatgtcgtggctgccaaaaaagcccaggacgtggtatccaacgtgaactataagcattccctgcatcactatacatacctgcctgatgctatggatttggagctgagcaagaatatgatgcagattcagtcggacaatgtttataaggaggactacaataattggatgaaggggatcggatggataccaattggatcactcgacgttgagaaggttaaaaaggccggtgacgctctgaatgagaaaaagtaccggcagcaccctgatacacttaaattcacctcaattgtcgactctccggttatggtgcaggcaaagcaaaatacaaagcaggtgtctgatatcctgtataaagctaagggagaagacgtcaagcacaagtataccatgtctcccgacctacctcagttcctacaagcgaagtgtaacgcctacaacatctccgatgtctgctataagagagattggtatgacctcatagccaaagggaataacgtcctcggagatgccatacctataacagccgctaaggcttcaagaaatatcgcttccgactacaagtacaaggaagcgtatgagaaaagtaaggggaaacacgtagggttccgaagcctgcaagatgacccaaagctggttcattacatgaacgtggccaagttgcaatcggacagagagtataagaaaaactatgaaaataccaagaccagctaccacacacctggggatatggtttccataacagccgctaaaatggcccaggatgtggctacaaatgtgaactacaagcaaccgctccaccactatacatacttgccagatgccatgagtttggaacacaccaggaacgttaaccaaattcagtccgataatgtgtacaaggacgagtataacagctttctcaagggcatagggtggatccctatcggatcattggaagtcgaaaaagtgaaaaaggcaggcgacgcgctgaacgaacgaaagtacagacagcatcctgacaccgtgaagttcacgagcgtgcccgacagcatgggaatggtgttagcacaacataacaccaagcagctctccgacctgaattacaaggtggagggggagaaactgaagcataagtataccattgacccggaactcccccaattcatccaagccaaagtgaatgctttgaatatgagcgacgcccattacaaagctgactggaagaaaactatcgccaaaggttatgacctgcggcctgatgccattcctatcgttgcggcaaaatcctctagaaatatagccagcgattgtaaatataaggaggcatatgagaaagccaaaggcaagcaggtgggctttctttccctgcaggacgatcctaaacttgttcactacatgaatgtcgcgaagattcagtccgatcgagaatacaagaaaggatatgaggcaagcaaaaccaagtaccatactcctctcgacatggtgagtgttaccgctgcaaagaagtcccaggaggtggctacaaacgcaaactacaggcagagctatcatcactacaccctgctgccagatgctcttaacgtggaacactctaggaacgcaatgcaaattcagagcgataacctttacaaatctgattttactaattggatgaaaggaattggctgggtgcctattgagtcattagaggtcgagaaggctaagaaggccggagaaatcctcagtgagaaaaagtacaggcaacacccagaaaagctgaaattcacgtacgcaatggacactatggaacaagctctgaataaatccaataagttgaacatggataagcgcctgtacaccgaaaagtggaacaaagataaaacaactatccatgttatgccggatacaccagatattctactgtctagggttaaccagatcacaatgagcgacaaactgtataaggccggatgggaagaggaaaagaagaagggctatgacctgagacccgatgccatagcaatcaaagcggcacgggcaagccgggacatcgcttccgattataagtataagaaggcctacgagcaagctaagggaaaacatatcggctttagatcactcgaggacgatcccaaattagtccatttcatgcaggtcgctaaaatgcagagcgatagagaatataaaaaggggtacgaaaaatcaaaaacttccttccacaccccagttgacatgctgtccgttgtggccgcaaagaagagccaggaggtggccacaaacgctaactaccgcaacgttattcatacttacaacatgctcccagatgctatgtccttcgaactggccaaaaatatgatgcagatccagagcgataaccagtacaaggcagattatgcagactttatgaagggcataggctggctgcctctcggcagcctcgaggcagagaagaataagaaggctatggagatcatcagcgagaagaagtatcgccagcatccagacacactaaaatacagcacccttatggacagcatgaacatggtcctggcccaaaataacgcgaaaatcatgaatgaacatctctataagcaggcatgggaggcagataagacaaaagtccatatcatgccggacatcccacaaataatcttggcgaaagcaaacgcaattaacatgtccgacaaattatataaactgtctttagaggaaagcaaaaaaaaaggctatgatcttcgccctgatgctatcccgattaaggcggcaaaggcatccagggacattgctagcgattacaaatacaaatataattatgagaaagggaaaggtaaaatggtcggcttccgatccctcgaggacgaccccaagctcgtgcactccatgcaggttgccaagatgcaaagtgatcgtgagtataagaagaattatgagaatactaagacttcttatcatacacctgccgatatgctgtccgtgaccgccgcaaaggatgcacaagccaacattactaacactaactacaaacacctgattcacaagtatatactgctgcccgacgccatgaacatcgaactcacaagaaacatgaatcgaatccagagtgacaatgagtacaagcaggattacaatgaatggtataagggtcttggatggtcccccgcaggaagcctggaggtcgagaaagccaagaaggctactgagtatgcctctgaccagaagtaccgccagcatcccagtaatttccagtttaagaaattgacagacagcatggacatggtgctcgccaagcagaatgcgcacacaatgaataaacacctgtatactattgactggaataaggacaagaccaaaattcacgtcatgcccgatacgccagacattctgcaagcgaagcaaaatcaaaccttgtatagccaaaagctgtacaagctgggctgggaagaggccctgaagaaaggatatgacttgcctgtagatgcaattagcgtgcagctggctaaagcaagccgagatatcgcgagcgactacaagtacaagcaggggtataggaaacaactcggtcaccatgtggggttccggtctcttcaggacgaccctaaactggtcttgagcatgaacgtggcaaagatgcagtcggagagggagtacaaaaaagacttcgagaagtggaagaccaagttcagctctcctgtagacatgttgggcgttgtgctggcaaagaaatgtcaggagctggtgtcagatgtggactacaaaaactatttgcaccagtggacatgcctgcctgatcagaacgacgttgtccaggctaaaaaggtctatgaactccaatcagagaatttgtacaaaagcgatttggagtggctgcggggtataggctggtctccattgggcagcctggaggcggaaaaaaacaagcgggcatctgaaatcatatctgagaaaaagtaccgacagccccctgatcgtaataaattcacctccatacccgacgcaatggacatcgtgcttgctaagacgaatgccaaaaacagatcggatcggctgtatcgcgaagcatgggataaagataaaacccagattcacattatgcctgacacaccggatattgtgctagccaaagctaatctgataaacacgagcgataagctgtatcgtatgggctacgaggagctgaaacgaaagggatacgatctgcctgtggatgccataccaataaaagccgctaaggccagcagagagattgcttctgagtacaaatataaggagggcttcaggaagcagctgggccaccacatcggcgctaggaatattgaggacgaccccaagatgatgtggagcatgcacgttgccaaaatccagtctgatagggagtataaaaaagactttgaaaaatggaagactaaattctccagtcctgtagatatgctgggggttgttctggcaaagaagtgccagacactggtctccgacgtagactacaagaattatttgcaccagtggacatgcctgcctgatcagagtgacgtgatccatgcaagacaggcttacgaccttcagagcgataatctgtataaatccgatttgcagtggttaaaggggattggctggatgacttcaggttcattagaggacgaaaagaataagcgcgctacacagattctcagcgatcatgtttaccgtcagcacccagaccagttcaaattttcgagtctcatggatagcattccaatggtgctggcaaaaaacaatgcaattactatgaatcatcgtctgtataccgaggcctgggataaagataaaaccaccgtgcatatcatgccagacaccccggaggtgctactggccaagcagaacaaggtcaattatagtgagaagctctataaattaggcctggaggaggcaaaacgaaaagggtatgatatgagggtggacgcaattcccataaaagccgcaaaggcctcaagagatatagcgtcagaatttaagtataaagagggataccggaaacagctagggcatcacatcggagccagggctattagggacgatcccaagatgatgtggtcaatgcacgtggcgaaaatccagagcgacagggaatataagaaggactttgagaagtggaaaacaaagttctctagtccagtggatatgctcggggtcgtgctcgctaaaaagtgccagacactggtgagcgacgtcgactataaaaactacttgcaccagtggacctgccttcctgaccagtccgatgtgatacacgctcggcaggcctacgacctgcaaagcgacaacatgtataaatctgatctgcagtggatgcggggaatcggctgggtgtcaatcggaagtctggacgtcgaaaagtgcaagagagctaccgagatactgtccgacaagatttaccgacagccacctgatcgctttaagtttacatctgtcacagactctctggaacaggtcctggcgaaaaacaatgctattacgatgaacaaaagactctacaccgaggcgtgggataaagataaaacacagatccacatcatgccagacaccccagagatcatgctagctagaatgaataagattaactactccgagtccctctacaagctggcgaatgaagaagcaaaaaaaaagggttatgacctccggtctgacgccatccctatcgtcgccgctaaggcgagtcgcgatatcatcagcgattacaagtacaaggacggctattgtaagcagctgggacaccacattggggcacgaaatatcgaggatgatccaaaaatgatgtggagcatgcacgtcgctaagatccagtccgacagggaatacaagaaagatttcgaaaaatggaagacaaagttttctagtccagtcgacatgctgggcgtggtgttagccaagaagtgtcaaaccctagtgtcggacgttgattacaagaattatttacacgagtggacatgcctccctgatcaatccgacgtcatccatgcccgacaggcatacgatctgcagagcgacaatatttacaagtctgacctccagtggctgcggggaatcggatgggtaccaatcggctccatggacgtcgtgaaatgtaagcgagccactgagattctgagcgataatatttaccgacagccacctgacaaacttaaatttacctcagtcaccgattctctggagcaggttctcgccaagaacaacgccctcaacatgaacaagcggttgtacaccgaggcatgggacaaggacaagacacagatacatataatgccagacacccctgaaattatgctggctcgccagaataaaatcaactacagtgaaacgctgtacaagctggctaatgaggaagccaagaagaaaggctatgacctgcgctctgatgctattccaatcgtggccgcaaaagcctctcgcgacgtcataagcgactacaaatataaagatggataccgaaaacagctcggtcatcatattggggctcgaaatattgaggacgaccctaagatgatgtggtccatgcatgtagccaagatacagagtgacagggaatacaagaaagatttcgaaaaatggaagaccaagttctcatcacctgtggatatgctcggcgttgttctggccaagaagtgtcagacattggtgagtgacgtggactataagaactatctgcacgagtggacatgtctccccgatcagaacgatgttattcatgccagacaagcctatgacctccagtctgacaacatctacaagtctgacttgcaatggctgcgtgggatcggctgggtcccgattggatccatggacgtggtgaagtgtaagcgtgctgccgagatcctgtccgataacatttaccgtcaacctccagataagctcaaattcacctcggtcactgactccttagagcaggtcctagccaaaaataatgcccttaatatgaataagaggctttacacagaagcctgggataaagacaagactcaggtgcacatcatgcctgacacgcctgagataatgctcgccaggcagaacaaaattaattacagcgagtcattgtatcgccaggccatggaggaggccaaaaaggagggatatgatctccgcagtgacgccattccaatcgtggctgcaaaagcatcacgcgatattgcgtccgattataagtacaaggaagcatacagaaaacagctgggtcaccacatcggggctagggccgttcatgatgatccaaagatcatgtggagcctacacattgcaaaggtgcagagcgaccgggaatataaaaaggacttcgaaaagtataaaacacgctacagctcacctgttgatatgttagggattgtgctggctaagaagtgtcagactctggtgtccgacgtcgactacaaacatccactgcacgagtggatttgtctgcccgaccagaatgatatcatccatgccagaaaggcatatgatcttcagtctgataacttgtacaaatctgacctagagtggatgaagggcattggctgggtcccaatagatagcctggaggtggtcagagccaaacgggcaggcgagctactgagcgacaccatctatagacaaaggccagaaacattaaagttcacaagcatcaccgacacgccagaacaggtattggctaagaacaacgcgctcaacatgaataagaggctgtacacagaagcatgggacaacgacaagaagactatccacgtcatgccagatacacctgagattatgctggccaaactgaatcgtataaattattcggacaagctctataaactggcgttggaggagtccaaaaaggaaggttacgatttgagactcgacgcaattccgattcaggctgccaaggcaagcagggatattgcctccgattacaagtataaagagggatatagaaaacaacttgggcaccatatcggggcaagaaacatcaaagatgacccgaaaatgatgtggagcatccacgtggccaagatacaaagtgacagggaatacaagaaagagttcgagaaatggaaaacgaaattcagtagccctgtcgatatgcttggcgtggtgctcgccaagaagtgccagattctcgtgtctgatattgactataaacatccactgcacgaatggacgtgtcttcctgatcagaacgacgtcatacaggctcgcaaggcctatgatctgcaaagcgacgccatctacaagtctgatctggagtggctgcgcggtattggctgggtcccaatcggctcagtagaagtggagaaagtcaaacgggctggggagattctgtccgaccggaagtaccggcagccagccgatcagcttaaattcacgtgtattactgatactcccgagattgtcttagctaagaataacgcgcttacaatgtctaaacacctgtacacagaggcctgggacgccgacaagacatccatacatgtgatgccagacacaccggacatccttctcgcaaagtctaacagcgcaaacatttcacagaagttatataccaaaggctgggatgaaagcaagatgaaggattatgacttgcgcgctgacgccatctcaatcaagtccgccaaagcaagtagggatatcgcttccgattacaagtacaaagaggcctacgagaagcaaaaaggtcaccacatcggagcacagtctatcgaagatgatccgaaaatcatgtgcgctattcatgcgggaaagatccagagtgagcgtgaatataagaaggagtttcagaaatggaagactaagttcagctcccccgtcgatatgcttagtattttgctagccaaaaaatgtcagacccttgtgaccgacatcgattaccgcaattatctgcatgagtggacctgtatgccagaccagaatgatattattcaggccaaaaaagcttatgacttgcaatccgatagtgtatacaaagccgatctggaatggctgcgtggaatcggctggatgccggaggggtctgtagagatgaaccgagtgaaagtagcccaggacctcgtgaacgaacggctgtaccgcactagaccagaagcccttagtttcacgagcatagtcgacacccccgaggtggtccttgctaaggcaaacagtctgcagatcagcgagaagttgtatcaagaggcctggaataaagacaagtctaacatcacaatcccaagcgatacgcccgagatgttgcaggcccatattaacgcactgcaaattagcaataaactgtaccagaaagattggaacgatgcaaaacaaaaaggttatgatattcgagcagatgccattgagattaagcatgctaaggcctcacgggagatcgccagtgaatataagtataaagagggataccgtaaacagctgggacatcatatggggtttagaaccctacaagatgaccccaagagcgtgtgggccatccatgcagcaaagatccaatccgatagagagtacaagaaagcctacgagaagtctaaggggatccacaatactccgctggacatgatgtcgatcgtccaggccaaaaagtgccaggttctggtttctgacatagattacagaaattaccttcatcagtggacatgcctccccgatcaaaatgacgtgatccaggcaaaaaaagcttatgacctgcagagtgacaacctatacaagtctgacctcgagtggttgaagggcattggttggctcccagagggatcggtggaggtgatgagagtgaagaacgcccagaacctgttgaacgagcggttgtaccgcattaagccagaagccctgaagttcactagcattgttgatacacctgaagtcattcaggctaagattaatgccgtgcagattagtgagccactttatcgggacgcgtgggagaaagaaaaagctaatgtgaatgtgccagccgatactccgctgatgctacaatccaaaatcaacgccttgcaaattagcaataagagataccaacaggcatgggaggacgtgaaaatgaccggttatgatttgagggccgatgctatcgggatccagcacgccaaagcatctagagatattgcatcggactatctgtataagacagcctatgagaagcagaagggtcattacattggttgccggtccgccaaggaggatccgaagctggtctgggcggctaacgtattaaagatgcagaatgatagactctataaaaaggcttacaatgaccacaaagccaaaatttccattccagtcgacatggtgtccatcagcgcagccaaagaaggtcaagcgctggcctccgacgtggactatagacactatctgcaccattggtcttgctttccagatcagaacgacgtgatccaggccagaaaagcctatgacctgcagtctgattctgtgtacaaagcagacttggaatggctccgaggcatcggctggatgcccgaaggctctgttgagatgaatagagttaaggtcgcgcaggatctcgtgaacgaacgtttgtatagaacgagacctgaagccttgagcttcacatcaatcgtggacacgcctgaggttgtgctggctaaggccaactccttgcagatctccgagaagctttaccaggaggcgtggaataaggacaaaagtaacataacaataccatccgacacaccagaaatgcttcaagcccatattaacgcactccagataagtaacaagctataccaaaaagactggaatgatacaaagcagaaaggctacgatattagagctgatgcaatcgagatcaagcatgcaaaggcgtcaagagagatcgcttcggagtacaaatacaaggaggggtacagaaaacaactaggccatcatatgggctttcggactctccaggatgatcccaagagcgtgtgggcaattcacgctgctaaaatccagtcggacagagagtacaaaaaagcatatgaaaaaagtaagggaatccataatacgccactcgacatgatgtccatcgtccaggccaagaagtgtcaggttctggtttcggatatcgactataggaattacctgcaccagtggacatgcttaccagatcaaaatgacgttattcaggcaaaaaaagcatatgatttgcagtccgataacctgtacaagtcggacctggagtggctcaaaggaataggttggctcccagaaggcagtgtggaggtgatgcgcgtgaagaacgcccaaaatctacttaatgagaggctctaccgaattaagccagaagccttgaagttcacctcaatcgtagataccccggaagtaatccaggccaaaatcaatgctgtgcagatctctgagccactatacagaaacgcgtgggaaaaggaaaaggctaacgtgaatgtcccagcggatacacctctcatgctacagagtaagattaacgccctccagatttctaacaagcgataccagcaggcctgggaggatgtcaaaatgaccgggtacgacctgagagccgatgcgattggaatacagcatgcaaaggcatccagagacatcgcctctgattatctctacaaaacagcctacgaaaagcagaaggggcactatattgggtgccggtccgcaaaggaagacccaaaactggtctgggcagccaacgtcttgaaaatgcagaatgatagattgtataagaaggcctacaatgatcacaaggccaagatctcaatccccgtggacatggtctccatttcagcagcaaaggaagggcaggcgctcgccagcgacgtcgactatcgccattacctgcaccactggagctgttttccagaccagaacgacgttatccaggccaggaaagcttatgatctgcagagcgatagtgtgtataaggctgatctggaatggttgagagggatcggatggatgccagagggcagcgttgagatgaatcgggtcaaggtggcccaggatctcgtgaatgagcgtctgtaccggacacgccctgaggccctctcctttacatcgatcgtggataccccggaggttgtgctggcaaaagctaattccctgcaaatctctgagaagttgtaccaggaagcttggaataaggacaagtcgaacatcacgatcccttccgatactcctgaaatgctgcaagcccatattaatgcccttcagatctccaataagctttaccagaaggattggaacgatactaagcagaaaggatatgacatccgcgcagacgccatcgaaattaaacacgccaaggcctctagagaaattgcctcagaatataagtataaggagggctataggaaacagttgggacatcacatggggttcaggactttacaagacgacccgaaaagcgtttgggctatccacgccgcaaagatccagtctgatagggaatataaaaaggcgtatgagaaaagtaagggtatccacaacactcctctggacatgatgtctatcgttcaggcgaagaaatgtcaggtgctggttagcgatatcgactacaggaactatctgcaccagtggacttgcctgcccgaccaaaatgatgtgatccaggccaaaaaggcttacgacctacagtcagataatctatataagagcgatctggagtggttgaagggcatagggtggttgccggagggtagcgtggaagtcatgagggttaagaatgcacagaatctgctgaatgagagactgtatcgtattaaacccgaggcccttaagttcacatcaatagtggatactcccgaggtgatacaggccaagattaacgcagttcagattagtgagccactttaccgcgacgcatgggagaaggagaaggcgaacgtaaatgtgcccgcagatacccccctgatgttacagtcaaagatcaacgctcttcagatttccaacaagagatatcagcaggcatgggaagacgtcaaaatgacaggctacgatttgagagcagacgcaatcggtatccagcatgccaaagctagccgtgatatcgcatcagactatctctataagaccgcgtacgaaaagcaaaaaggacattatattggttgcagatccgcaaaggaggacccaaagctcgtgtgggcagcaaatgtactgaaaatgcagaatgataggctgtataagaaagcatacaacgatcacaaggctaagatcagcatccctgtggacatggtctctatctctgccgcaaaggagggccaagcacttgcttcggacgtagactaccgtcactacttacaccggtggtcgtgtttcccagatcaaaatgacgtgatccaagctcgcaaagcatatgaccttcaatcggatgcattatataaagccgatcttgagtggctcagggggatcggatggatgcctcagggctcgcctgaagtgctccgagtcaagaacgcacaaaacatattctgtgactctgtgtacaggaccccagtagtaaacctcaagtacactagcatagtggacactcccgaggtagttctagccaaaagtaacgccgagaatattagcatcccaaagtatcgcgaagtttgggataaagataaaacctcaattcacatcatgccggacactccagaaatcaacttggcacgggcaaatgcattgaatgtctctaacaagctttacagggagggatgggacgaaatgaaggccggttgcgatgtgcggttagacgccatccctatacaggctgccaaggccagtagagagatcgcctcggactataaatacaaactggatcatgagaaacagaaggggcactacgtcggcacactcaccgcgcgtgacgataataagattcggtgggcattgatagccgacaagctgcagaatgagagggaataccgtctggattgggctaaatggaaggctaaaattcagtctcccgttgacatgctgagcatcttacacagtaagaatagccaagcattggtgtcagacatggactaccgcaactatctgcatcagtggacctgtatgcccgaccagaacgacgtgatccaggctaaaaaagcctacgagttacagtccgacaacgtttataaagctgatttagagtggttacgagggatcggctggatgcctaacgattctgtttccgtaaatcacgccaagcacgcagccgacatttttagcgaaaaaaaataccgaacaaaaatcgaaactctcaactttacccccgtagacgacagagtcgactatgtgactgccaagcagtccggtgaaatactcgacgatataaaatatcggaaggattggaacgcaacaaagtctaaatacacacttactgagacacccctgctgcacacagcacaggaggcagccagaatactggatcagtatctgtacaaggagggatgggagcggcagaaagccaccgggtacatcctgccaccagatgcagttccctttgttcacgctcaccactgcaacgatgtccagtctgagcttaagtacaaagccgaacacgttaagcagaagggacactacgtaggagtccctacgatgcgcgatgatccaaaactcgtgtggttcgaacacgcaggccagattcagaatgagagactctacaaggaggactatcacaagactaaggccaaaataaacatccctgcagatatggtcagcgttctcgccgcaaaacagggccagacattagtctcggacattgattacaggaactatttgcaccagtggatgtgccatcccgatcagaacgacgtaattcaggcacggaaggcttatgatctgcagtctgacaacgtgtaccgcgctgatttagagtggctgagaggaatcgggtggattcccctagattctgttgatcacgtgagagtcaccaaaaatcaagagatgatgtcccagattaaatacaaaaagaatgcccttgagaattatccaaatttcaggagcgtcgtcgatcctcccgagattgtgctggctaaaataaactccgtaaatcagtcagacgtgaagtataaggagaccttcaacaaagcaaaaggcaaatataccttcagccctgacactccccatatttcccacagcaaagatatgggaaagctttacagtacgatcctgtacaaaggggcatgggagggcactaaggcctacggttacacactggacgaaaggtacatccctatcgtaggcgctaaacatgcagatctggtcaactccgagcttaagtacaaagagacatatgagaagcaaaaagggcactatctggcagggaaggtgatcggcgagttcccaggggttgtgcattgccttgacttccaaaagatgcggagtgccctgaactatagaaagcactatgaggacaccaaggctaatgtacatatcccaaacgacatgatgaatcacgtactggctaaacgttgtcagtatatcctcagtgatttggagtaccgtcactacttccaccagtggactagcctgctggaagagcctaacgtaatccgcgttcgaaacgcgcaggagattttaagcgacaacgtctacaaggatgacctgaactggttgaaagggattggatgctacgtctgggatacgcctcagatactgcacgctaaaaagagctatgatctgcagagccagttacagtatacagccgcagggaaagaaaatcttcaaaactataatttggtcacagataccccattatatgtgacagctgttcagtctgggatcaatgcctccgaggttaagtataaggagaactatcaccagataaaagacaagtatacaactgtgctggagacagtggattatgaccgcacaaggaatttgaaaaacctatattcctcaaatctctataaggaggcctgggatagggtcaaagccacgtcatacattctgccttcttccactcttagcctcactcatgcaaagaaccagaagcacctggcgtcccacattaagtatcgcgaggagtatgagaagtttaaggcactgtataccctgcccaggagcgtggacgatgatcctaatactgcacgctgcctgcgagtcgggaagctgaatattgaccggctgtaccgctctgtgtatgagaagaacaagatgaagatacacatcgtgccggacatggtggagatggtcacggccaaggattctcaaaagaaggtcagtgaaattgactacaggctgagactgcatgaatggatctgccaccctgatttgcaggtgaacgatcacgtgagaaaggtgaccgatcagatctcggacatcgtatacaaagacgacctgaattggctcaagggcataggatgttacgtttgggacacacctgagattctgcatgcgaagcatgcttatgacctgcgagatgatatcaagtataaggcccatatgctgaaaacccggaatgattataagctggttacagacacgcccgtttatgtccaggctgtaaagtcgggtaagcagctgagcgacgccgtataccactacgattacgtccactctgtgcgcggaaaagtcgcaccgacaacaaaaaccgtggacttggatcgggctttgcatgcttataaactacagagtagtaacctttataaaacctcactgcggacactccctactggatatagactgcccggtgatacacctcactttaagcatattaaagacacacgctatatgtcatcttacttcaagtataaagaggcttatgagcatactaaagcttacggctataccctagggcctaaagacgtaccctttgtgcacgtgagacgagttaacaacgtgacaagcgagaggttgtacagggagttataccacaagctgaaggataagatccacacaacccccgatactcccgagataagacaggtaaagaaaacacaggaagccgtcagcgaactgatttataaatccgactttttcaagatgcagggccacatgatcagcctgccatacacccctcaagtgattcactgccgatacgtgggcgacatcactagcgacatcaaatacaaggaggacttgcaggtgctgaaaggtttcggttgtttcttgtacgacaccccagacatggtgcggtcccgacatttgaggaaattatggagcaactatctgtacaccgataaagcaagaaaaatgcgcgacaagtataaagtagtcctagacacacccgagtaccgaaaagtgcaggaattgaagactcatctcagcgagctggtgtacagggccgcaggcaaaaagcaaaagagtatttttacttcagtcccagataccccagacttgctcagggccaaacgcggacagaaactccagtctcaatacctgtatgtggaactagctactaaggagaggcctcaccatcacgcgggaaatcagactacggctttaaagcacgcaaaagacgttaaggatatggtctcagaaaagaagtataagatccagtacgaaaagatgaaagacaaatacacccccgtaccagacacacctatcctgattcgagccaaacgcgcttactggaatgcaagcgacctgcggtacaaggagacattccagaagaccaagggtaagtaccacacggtaaaggatgctctggacattgtctatcacaggaaagtcaccgatgatatctccaaaattaaatataaagaaaattatatgagccaactgggcatatggcgaagtatccctgaccgaccagagcacttccatcacagggccgtgaccgataccgtgagcgacgtcaagtacaaggaggacctgacttggcttaagggcattggttgctatgcttacgataccccagatttcacactggccgagaaaaataagactctttattcgaaatacaagtataaagaggtatttgagagaacgaagtccgatttcaagtatgttgctgacagtccaattaacaggcattttaagtacgcaactcagctgatgaacgaaaagaagtatagagccgactacgaacagcggaaggacaagtatcacctggtggtagacgagcctaggcatctgctggccaagacagcaggcgatcaaatttcacagattaagtataggaagaactacgagaagtcgaaagacaagtttacaagcatcgttgacacgccggagcacctccgaacaactaaagtaaataaacaaatcagtgatattctctacaaactggaatataacaaggcgaaacctcgcggatacaccactatccatgatactccgatgctgctacacgtcagaaaggttaaggacgaggtgtcggaccttaagtacaaagaggtttatcagcggaacaaaagtaactgtaccatcgagcctgatgctgttcatattaaggctgccaaagacgcctacaaggtaaacactaatctggattacaagaagcagtacgaggcaaacaaagcacactggaaatggaccccagacagacctgactttttgcaggcagctaagagcagtctccaacagtccgacttcgaatacaagctggatcgggagtttttgaaaggctgtaagttaagcgttactgacgacaaaaatacagttctcgcactgagaaacacgctgattgagtccgacctgaaatataaagagaaacatgtgaaagagagggggacctgtcacgccgtcccagacacaccacagattctgctggccaagaccgtgtcaaatctggttagcgagaacaagtacaaggatcatgtgaagaagcatttagcacaagggagctacactacattgccagagactagggacacagtgcacgtcaaggaagtgactaagcatgtttctgatactaactacaagaagaaatttgtgaaagagaaggggaaatccaattattctatcatgctcgaaccacccgaagtgaagcatgccatggaggtggcaaagaagcaaagcgacgtggcctatcgcaaggatgcgaaagaaaatcttcactacactactgtcgctgaccgcccagacatcaagaaggctacccaggccgctaaacaggcgagcgaggtcgagtaccgggctaagcatcggaaggaggggagtcacgggttaagcatgctaggcaggcccgacatcgaaatggcaaaaaaagccgctaaactgtccagtcaggtcaaatacagggaaaattttgataaggaaaagggtaaaacgccaaaatataatcctaaggacagccagctatacaaagttatgaaagacgcgaacaatctcgcgtcggaagtaaagtataaagccgacctgaaaaaactgcacaagcccgttaccgatatgaaggaatccttgatcatgaatcacgtcttaaatacctctcagctggcaagttcctaccagtataaaaaaaaatatgagaaatccaaggggcactaccatactatacctgacaatctggaacagctccacctaaaagaggccaccgaactgcagtctattgtaaagtacaaggagaagtacgagaaagagcggggtaagccaatgcttgatttcgaaacccccacgtacatcacagcaaaggagagtcagcagatgcagagtgggaaggagtacagaaaagattatgaagaatcaataaaaggacgaaatctgacgggactggaggtcacccctgccctgttacacgttaagtatgccaccaagatcgccagtgaaaaagagtatcgcaaggatctggaggaaagtatcagaggaaagggtctaaccgaaatggaggatacacccgatatgttacgggctaaaaatgccacacagatcttgaatgagaaggaatataaaagagatctggagcttgaggtgaaaggcaggggactcaacgcaatggctaacgaaaccccagacttcatgagagccagaaatgccacagatattgcatcgcaaatcaagtataagcagtctgcagagatggagaaagctaatttcacaagcgtggtggatacacctgaaatcattcatgctcaacaggtcaagaacctgtccagccagaagaaatacaaggaggatgcagaaaaatccatgtcgtactatgagacggtcttagacacgccggaaatccaaagggtgcgagaaaatcagaaaaacttctcactgctccaataccaatgtgaccttaaaaacagcaagggaaagattacggtggtccaggatacacctgaaatactgcgagtaaaggaaaatcaaaaaaatttcagtagtgtgttgtacaaggaggatgtctcaccgggaactgctattggcaagacgcctgagatgatgagagttaagcagacgcaggaccacatcagttctgtgaaatataaagaggccatcggacaggggacgccaattcctgacctcccagaggtcaaaagggtaaaggagacccagaagcatattagctccgtcatgtataaagagaacctggggaccgggattcccacaactgtgacccctgagattgagcgagtgaagcgcaatcaggaaaatttctcatcggtcctttataaggagaacctggggaaaggcattccaacacctatcactcccgagatggagagagtcaaacggaaccaggagaacttctcgagtatcctttacaaggaaaatctctcaaaaggaactcccttaccagtgacacccgaaatggaaagggtcaaactgaatcaagagaacttctccagtgtgctttacaaggagaatgtaggtaagggcatcccaatcccaattacacctgaaatggagcgagtaaagcataatcaggaaaatttttcatcagtgctgtacaaggagaatctggggaccggaatacccattccaatcacaccagaaatgcagcgtgttaaacacaatcaggaaaatctctcttcagtcctgtataaagaaaatatgggtaagggcacaccgcttccagtgacgcctgagatggaacgagttaagcacaaccaggagaacatctcgagcgtcctatataaggaaaacatggggaagggcacaccactgcccgtgaccccagaaatggagcgggtcaaacataatcaagagaatatctcctcggtactctacaaagaaaacatggggaaggggacgccacttgccgttaccccagagatggagagagtgaagcacaatcaggagaatatcagctccgttctttataaggaaaatgtgggaaaagcgactgccactcctgtcacacccgaaatgcagcgggtgaaacggaaccaggagaatatttcatcagtgctgtataaagagaatctaggtaaggcaacgcccactccctttactcctgaaatggagagggtaaagcgcaaccaggaaaacttcagctctgtgctgtataaagagaacatgagaaaggccacacccaccccagtgacccctgagatggagcgcgcaaagcgaaaccaggaaaatatatctagtgtactctacagcgattctttccgaaaacagattcaggggaaggctgcatacgtactggacacccctgagatgcgccgagtcagagagacccagaggcacatctccacggttaaataccacgaggactttgagaaacacaagggttgttttaccccggtcgtgacagaccccataactgaacgtgtcaagaaaaacatgcaggatttcagcgacattaattaccgcggtatacagcgcaaagttgtggaaatggagcaaaagcggaacgatcaagatcaggaaacaatcacgggcctcagggtctggagaactaatccgggttccgtgtttgactatgatccagccgaggataacatccagtcgcggtccctgcatatgatcaacgtacaagcccaaagacgtagccgagaacagtcccggtcagctagtgcccttagtatctctggtggggaggagaagtctgagcattcagaagcgcctgatcatcatctcagtacttattccgacgggggtgttttcgctgtatctaccgcatacaagcacgccaagaccactgagctgccccagcagagatcaagctctgttgctacacagcaaaccacagtgtcttctataccatcccacccttctacagctggcaagatcttccgagccatgtatgactatatggcagccgacgcagacgaggtctcatttaaagatggcgacgctattattaacgtccaggcaatcgacgagggctggatgtatggaaccgtccagagaacagggagaaccggaatgctgcctgccaattacgttgaggcaattta

SEQ ID NO: 62988 - DNA, 25578 bp, Artificial Sequence
  derived and/or modified sequence
atggccgacgacgaggactacgaggaggtggtggagtactacaccgaggaggtggtgtacgaggaggtgcccggcgagaccatcaccaagatctacgagaccaccaccaccagaaccagcgactacgagcagagcgagaccagcaagcccgccctggcccagcccgccctggcccagcccgccagcgccaagcccgtggagagaagaaaggtgatcagaaagaaggtggaccccagcaagttcatgaccccctacatcgcccacagccagaagatgcaggacctgttcagccccaacaagtacaaggagaagttcgagaagaccaagggccagccctacgccagcaccaccgacacccccgagctgagaagaatcaagaaggtgcaggaccagctgagcgaggtgaagtacagaatggacggcgacgtggccaagaccatctgccacgtggacgagaaggccaaggacatcgagcacgccaagaaggtgagccagcaggtgagcaaggtgctgtacaagcagaactgggaggacaccaaggacaagtacctgctgccccccgacgcccccgagctggtgcaggccgtgaagaacaccgccatgttcagcaagaagctgtacaccgaggactgggaggccgacaagagcctgttctacccctacaacgacagccccgagctgagaagagtggcccaggcccagaaggccctgagcgacgtggcctacaagaagggcctggccgagcagcaggcccagttcacccccctggccgacccccccgacatcgagttcgccaagaaggtgaccaaccaggtgagcaagcagaagtacaaggaggactacgagaacaagatcaagggcaagtggagcgagaccccctgcttcgaggtggccaacgccagaatgaacgccgacaacatcagcaccagaaagtaccaggaggacttcgagaacatgaaggaccagatctacttcatgcagaccgagacccccgagtacaagatgaacaagaaggccggcgtggccgccagcaaggtgaagtacaaggaggactacgagaagaacaagggcaaggccgactacaacgtgctgcccgccagcgagaacccccagctgagacagctgaaggccgccggcgacgccctgagcgacaagctgtacaaggagaactacgagaagaccaaggccaagagcatcaactactgcgagacccccaagttcaagctggacaccgtgctgcagaacttcagcagcgacaagaagtacaaggacagctacctgaaggacatcctgggccactacgtgggcagcttcgaggacccctaccacagccactgcatgaaggtgaccgcccagaacagcgacaagaactacaaggccgagtacgaggaggacagaggcaagggcttcttcccccagaccatcacccaggagtacgaggccatcaagaagctggaccagtgcaaggaccacacctacaaggtgcaccccgacaagaccaagttcacccaggtgaccgacagccccgtgctgctgcaggcccaggtgaacagcaagcagctgagcgacctgaactacaaggccaagcacgagagcgagaagttcaagtgccacatcccccccgacacccccgccttcatccagcacaaggtgaacgcctacaacctgagcgacaacctgtacaagcaggactgggagaagagcaaggccaagaagttcgacatcaaggtggacgccatccccctgctggccgccaaggccaacaccaagaacaccagcgacgtgatgtacaagaaggactacgagaagaacaagggcaagatgatcggcgtgctgagcatcaacgacgaccccaagatgctgcacagcctgaaggtggccaagaaccagagcgacagactgtacaaggagaactacgagaagaccaaggccaagagcatgaactactgcgagacccccaagtaccagctggacacccagctgaagaacttcagcgaggccagatacaaggacctgtacgtgaaggacgtgctgggccactacgtgggcagcatggaggacccctaccacacccactgcatgaaggtggccgcccagaacagcgacaagagctacaaggccgagtacgaggaggacaagggcaagtgctacttcccccagaccatcacccaggagtacgaggccatcaagaagctggaccagtgcaaggaccacacctacaaggtgcaccccgacaagaccaagttcaccgccgtgaccgacagccccgtgctgctgcaggcccagctgaacaccaagcagctgagcgacctgaactacaaggccaagcacgagggcgagaagttcaagtgccacatccccgccgacgccccccagttcatccagcacagagtgaacgcctacaacctgagcgacaacgtgtacaagcaggactgggagaagagcaaggccaagaagttcgacatcaaggtggacgccatccccctgctggccgccaaggccaacaccaagaacaccagcgacgtgatgtacaagaaggactacgagaagagcaagggcaagatgatcggcgccctgagcatcaacgacgaccccaagatgctgcacagcctgaagaccgccaagaaccagagcgacagagagtacagaaaggactacgagaagagcaagaccatctacaccgcccccctggacatgctgcaggtgacccaggccaagaagagccaggccatcgccagcgacgtggactacaagcacatcctgcacagctacagctacccccccgacagcatcaacgtggacctggccaagaaggcctacgccctgcagagcgacgtggagtacaaggccgactacaacagctggatgaagggctgcggctgggtgcccttcggcagcctggagatggagaaggccaagagagccagcgacatcctgaacgagaagaagtacagacagcaccccgacaccctgaagttcaccagcatcgaggacgcccccatcaccgtgcagagcaagatcaaccaggcccagagaagcgacatcgcctacaaggccaagggcgaggagatcatccacaagtacaacctgccccccgacctgccccagttcatccaggccaaggtgaacgcctacaacatcagcgagaacatgtacaaggccgacctgaaggacctgagcaagaagggctacgacctgagaaccgacgccatccccatcagagccgccaaggccgccagacaggccgccagcgacgtgcagtacaagaaggactacgagaaggccaagggcaagatggtgggcttccagagcctgcaggacgaccccaagctggtgcactacatgaacgtggccaagatccagagcgacagagagtacaagaaggactacgagaagaccaagagcaagtacaacaccccccacgacatgttcaacgtggtggccgccaagaaggcccaggacgtggtgagcaacgtgaactacaagcacagcctgcaccactacacctacctgcccgacgccatggacctggagctgagcaagaacatgatgcagatccagagcgacaacgtgtacaaggaggactacaacaactggatgaagggcatcggctggatccccatcggcagcctggacgtggagaaggtgaagaaggccggcgacgccctgaacgagaagaagtacagacagcaccccgacaccctgaagttcaccagcatcgtggacagccccgtgatggtgcaggccaagcagaacaccaagcaggtgagcgacatcctgtacaaggccaagggcgaggacgtgaagcacaagtacaccatgagccccgacctgccccagttcctgcaggccaagtgcaacgcctacaacatcagcgacgtgtgctacaagagagactggtacgacctgatcgccaagggcaacaacgtgctgggcgacgccatccccatcaccgccgccaaggccagcagaaacatcgccagcgactacaagtacaaggaggcctacgagaagagcaagggcaagcacgtgggcttcagaagcctgcaggacgaccccaagctggtgcactacatgaacgtggccaagctgcagagcgacagagagtacaagaagaactacgagaacaccaagaccagctaccacacccccggcgacatggtgagcatcaccgccgccaagatggcccaggacgtggccaccaacgtgaactacaagcagcccctgcaccactacacctacctgcccgacgccatgagcctggagcacaccagaaacgtgaaccagatccagagcgacaacgtgtacaaggacgagtacaacagcttcctgaagggcatcggctggatccccatcggcagcctggaggtggagaaggtgaagaaggccggcgacgccctgaacgagagaaagtacagacagcaccccgacaccgtgaagttcaccagcgtgcccgacagcatgggcatggtgctggcccagcacaacaccaagcagctgagcgacctgaactacaaggtggagggcgagaagctgaagcacaagtacaccatcgaccccgagctgccccagttcatccaggccaaggtgaacgccctgaacatgagcgacgcccactacaaggccgactggaagaagaccatcgccaagggctacgacctgagacccgacgccatccccatcgtggccgccaagagcagcagaaacatcgccagcgactgcaagtacaaggaggcctacgagaaggccaagggcaagcaggtgggcttcctgagcctgcaggacgaccccaagctggtgcactacatgaacgtggccaagatccagagcgacagagagtacaagaagggctacgaggccagcaagaccaagtaccacacccccctggacatggtgagcgtgaccgccgccaagaagagccaggaggtggccaccaacgccaactacagacagagctaccaccactacaccctgctgcccgacgccctgaacgtggagcacagcagaaacgccatgcagatccagagcgacaacctgtacaagagcgacttcaccaactggatgaagggcatcggctgggtgcccatcgagagcctggaggtggagaaggccaagaaggccggcgagatcctgagcgagaagaagtacagacagcaccccgagaagctgaagttcacctacgccatggacaccatggagcaggccctgaacaagagcaacaagctgaacatggacaagagactgtacaccgagaagtggaacaaggacaagaccaccatccacgtgatgcccgacacccccgacatcctgctgagcagagtgaaccagatcaccatgagcgacaagctgtacaaggccggctgggaggaggagaagaagaagggctacgacctgagacccgacgccatcgccatcaaggccgccagagccagcagagacatcgccagcgactacaagtacaagaaggcctacgagcaggccaagggcaagcacatcggcttcagaagcctggaggacgaccccaagctggtgcacttcatgcaggtggccaagatgcagagcgacagagagtacaagaagggctacgagaagagcaagaccagcttccacacccccgtggacatgctgagcgtggtggccgccaagaagagccaggaggtggccaccaacgccaactacagaaacgtgatccacacctacaacatgctgcccgacgccatgagcttcgagctggccaagaacatgatgcagatccagagcgacaaccagtacaaggccgactacgccgacttcatgaagggcatcggctggctgcccctgggcagcctggaggccgagaagaacaagaaggccatggagatcatcagcgagaagaagtacagacagcaccccgacaccctgaagtacagcaccctgatggacagcatgaacatggtgctggcccagaacaacgccaagatcatgaacgagcacctgtacaagcaggcctgggaggccgacaagaccaaggtgcacatcatgcccgacatcccccagatcatcctggccaaggccaacgccatcaacatgagcgacaagctgtacaagctgagcctggaggagagcaagaagaagggctacgacctgagacccgacgccatccccatcaaggccgccaaggccagcagagacatcgccagcgactacaagtacaagtacaactacgagaagggcaagggcaagatggtgggcttcagaagcctggaggacgaccccaagctggtgcacagcatgcaggtggccaagatgcagagcgacagagagtacaagaagaactacgagaacaccaagaccagctaccacacccccgccgacatgctgagcgtgaccgccgccaaggacgcccaggccaacatcaccaacaccaactacaagcacctgatccacaagtacatcctgctgcccgacgccatgaacatcgagctgaccagaaacatgaacagaatccagagcgacaacgagtacaagcaggactacaacgagtggtacaagggcctgggctggagccccgccggcagcctggaggtggagaaggccaagaaggccaccgagtacgccagcgaccagaagtacagacagcaccccagcaacttccagttcaagaagctgaccgacagcatggacatggtgctggccaagcagaacgcccacaccatgaacaagcacctgtacaccatcgactggaacaaggacaagaccaagatccacgtgatgcccgacacccccgacatcctgcaggccaagcagaaccagaccctgtacagccagaagctgtacaagctgggctgggaggaggccctgaagaagggctacgacctgcccgtggacgccatcagcgtgcagctggccaaggccagcagagacatcgccagcgactacaagtacaagcagggctacagaaagcagctgggccaccacgtgggcttcagaagcctgcaggacgaccccaagctggtgctgagcatgaacgtggccaagatgcagagcgagagagagtacaagaaggacttcgagaagtggaagaccaagttcagcagccccgtggacatgctgggcgtggtgctggccaagaagtgccaggagctggtgagcgacgtggactacaagaactacctgcaccagtggacctgcctgcccgaccagaacgacgtggtgcaggccaagaaggtgtacgagctgcagagcgagaacctgtacaagagcgacctggagtggctgagaggcatcggctggagccccctgggcagcctggaggccgagaagaacaagagagccagcgagatcatcagcgagaagaagtacagacagccccccgacagaaacaagttcaccagcatccccgacgccatggacatcgtgctggccaagaccaacgccaagaacagaagcgacagactgtacagagaggcctgggacaaggacaagacccagatccacatcatgcccgacacccccgacatcgtgctggccaaggccaacctgatcaacaccagcgacaagctgtacagaatgggctacgaggagctgaagagaaagggctacgacctgcccgtggacgccatccccatcaaggccgccaaggccagcagagagatcgccagcgagtacaagtacaaggagggcttcagaaagcagctgggccaccacatcggcgccagaaacatcgaggacgaccccaagatgatgtggagcatgcacgtggccaagatccagagcgacagagagtacaagaaggacttcgagaagtggaagaccaagttcagcagccccgtggacatgctgggcgtggtgctggccaagaagtgccagaccctggtgagcgacgtggactacaagaactacctgcaccagtggacctgcctgcccgaccagagcgacgtgatccacgccagacaggcctacgacctgcagagcgacaacctgtacaagagcgacctgcagtggctgaagggcatcggctggatgaccagcggcagcctggaggacgagaagaacaagagagccacccagatcctgagcgaccacgtgtacagacagcaccccgaccagttcaagttcagcagcctgatggacagcatccccatggtgctggccaagaacaacgccatcaccatgaaccacagactgtacaccgaggcctgggacaaggacaagaccaccgtgcacatcatgcccgacacccccgaggtgctgctggccaagcagaacaaggtgaactacagcgagaagctgtacaagctgggcctggaggaggccaagagaaagggctacgacatgagagtggacgccatccccatcaaggccgccaaggccagcagagacatcgccagcgagttcaagtacaaggagggctacagaaagcagctgggccaccacatcggcgccagagccatcagagacgaccccaagatgatgtggagcatgcacgtggccaagatccagagcgacagagagtacaagaaggacttcgagaagtggaagaccaagttcagcagccccgtggacatgctgggcgtggtgctggccaagaagtgccagaccctggtgagcgacgtggactacaagaactacctgcaccagtggacctgcctgcccgaccagagcgacgtgatccacgccagacaggcctacgacctgcagagcgacaacatgtacaagagcgacctgcagtggatgagaggcatcggctgggtgagcatcggcagcctggacgtggagaagtgcaagagagccaccgagatcctgagcgacaagatctacagacagccccccgacagattcaagttcaccagcgtgaccgacagcctggagcaggtgctggccaagaacaacgccatcaccatgaacaagagactgtacaccgaggcctgggacaaggacaagacccagatccacatcatgcccgacacccccgagatcatgctggccagaatgaacaagatcaactacagcgagagcctgtacaagctggccaacgaggaggccaagaagaagggctacgacctgagaagcgacgccatccccatcgtggccgccaaggccagcagagacatcatcagcgactacaagtacaaggacggctactgcaagcagctgggccaccacatcggcgccagaaacatcgaggacgaccccaagatgatgtggagcatgcacgtggccaagatccagagcgacagagagtacaagaaggacttcgagaagtggaagaccaagttcagcagccccgtggacatgctgggcgtggtgctggccaagaagtgccagaccctggtgagcgacgtggactacaagaactacctgcacgagtggacctgcctgcccgaccagagcgacgtgatccacgccagacaggcctacgacctgcagagcgacaacatctacaagagcgacctgcagtggctgagaggcatcggctgggtgcccatcggcagcatggacgtggtgaagtgcaagagagccaccgagatcctgagcgacaacatctacagacagccccccgacaagctgaagttcaccagcgtgaccgacagcctggagcaggtgctggccaagaacaacgccctgaacatgaacaagagactgtacaccgaggcctgggacaaggacaagacccagatccacatcatgcccgacacccccgagatcatgctggccagacagaacaagatcaactacagcgagaccctgtacaagctggccaacgaggaggccaagaagaagggctacgacctgagaagcgacgccatccccatcgtggccgccaaggccagcagagacgtgatcagcgactacaagtacaaggacggctacagaaagcagctgggccaccacatcggcgccagaaacatcgaggacgaccccaagatgatgtggagcatgcacgtggccaagatccagagcgacagagagtacaagaaggacttcgagaagtggaagaccaagttcagcagccccgtggacatgctgggcgtggtgctggccaagaagtgccagaccctggtgagcgacgtggactacaagaactacctgcacgagtggacctgcctgcccgaccagaacgacgtgatccacgccagacaggcctacgacctgcagagcgacaacatctacaagagcgacctgcagtggctgagaggcatcggctgggtgcccatcggcagcatggacgtggtgaagtgcaagagagccgccgagatcctgagcgacaacatctacagacagccccccgacaagctgaagttcaccagcgtgaccgacagcctggagcaggtgctggccaagaacaacgccctgaacatgaacaagagactgtacaccgaggcctgggacaaggacaagacccaggtgcacatcatgcccgacacccccgagatcatgctggccagacagaacaagatcaactacagcgagagcctgtacagacaggccatggaggaggccaagaaggagggctacgacctgagaagcgacgccatccccatcgtggccgccaaggccagcagagacatcgccagcgactacaagtacaaggaggcctacagaaagcagctgggccaccacatcggcgccagagccgtgcacgacgaccccaagatcatgtggagcctgcacatcgccaaggtgcagagcgacagagagtacaagaaggacttcgagaagtacaagaccagatacagcagccccgtggacatgctgggcatcgtgctggccaagaagtgccagaccctggtgagcgacgtggactacaagcaccccctgcacgagtggatctgcctgcccgaccagaacgacatcatccacgccagaaaggcctacgacctgcagagcgacaacctgtacaagagcgacctggagtggatgaagggcatcggctgggtgcccatcgacagcctggaggtggtgagagccaagagagccggcgagctgctgagcgacaccatctacagacagagacccgagaccctgaagttcaccagcatcaccgacacccccgagcaggtgctggccaagaacaacgccctgaacatgaacaagagactgtacaccgaggcctgggacaacgacaagaagaccatccacgtgatgcccgacacccccgagatcatgctggccaagctgaacagaatcaactacagcgacaagctgtacaagctggccctggaggagagcaagaaggagggctacgacctgagactggacgccatccccatccaggccgccaaggccagcagagacatcgccagcgactacaagtacaaggagggctacagaaagcagctgggccaccacatcggcgccagaaacatcaaggacgaccccaagatgatgtggagcatccacgtggccaagatccagagcgacagagagtacaagaaggagttcgagaagtggaagaccaagttcagcagccccgtggacatgctgggcgtggtgctggccaagaagtgccagatcctggtgagcgacatcgactacaagcaccccctgcacgagtggacctgcctgcccgaccagaacgacgtgatccaggccagaaaggcctacgacctgcagagcgacgccatctacaagagcgacctggagtggctgagaggcatcggctgggtgcccatcggcagcgtggaggtggagaaggtgaagagagccggcgagatcctgagcgacagaaagtacagacagcccgccgaccagctgaagttcacctgcatcaccgacacccccgagatcgtgctggccaagaacaacgccctgaccatgagcaagcacctgtacaccgaggcctgggacgccgacaagaccagcatccacgtgatgcccgacacccccgacatcctgctggccaagagcaacagcgccaacatcagccagaagctgtacaccaagggctgggacgagagcaagatgaaggactacgacctgagagccgacgccatcagcatcaagagcgccaaggccagcagagacatcgccagcgactacaagtacaaggaggcctacgagaagcagaagggccaccacatcggcgcccagagcatcgaggacgaccccaagatcatgtgcgccatccacgccggcaagatccagagcgagagagagtacaagaaggagttccagaagtggaagaccaagttcagcagccccgtggacatgctgagcatcctgctggccaagaagtgccagaccctggtgaccgacatcgactacagaaactacctgcacgagtggacctgcatgcccgaccagaacgacatcatccaggccaagaaggcctacgacctgcagagcgacagcgtgtacaaggccgacctggagtggctgagaggcatcggctggatgcccgagggcagcgtggagatgaacagagtgaaggtggcccaggacctggtgaacgagagactgtacagaaccagacccgaggccctgagcttcaccagcatcgtggacacccccgaggtggtgctggccaaggccaacagcctgcagatcagcgagaagctgtaccaggaggcctggaacaaggacaagagcaacatcaccatccccagcgacacccccgagatgctgcaggcccacatcaacgccctgcagatcagcaacaagctgtaccagaaggactggaacgacgccaagcagaagggctacgacatcagagccgacgccatcgagatcaagcacgccaaggccagcagagagatcgccagcgagtacaagtacaaggagggctacagaaagcagctgggccaccacatgggcttcagaaccctgcaggacgaccccaagagcgtgtgggccatccacgccgccaagatccagagcgacagagagtacaagaaggcctacgagaagagcaagggcatccacaacacccccctggacatgatgagcatcgtgcaggccaagaagtgccaggtgctggtgagcgacatcgactacagaaactacctgcaccagtggacctgcctgcccgaccagaacgacgtgatccaggccaagaaggcctacgacctgcagagcgacaacctgtacaagagcgacctggagtggctgaagggcatcggctggctgcccgagggcagcgtggaggtgatgagagtgaagaacgcccagaacctgctgaacgagagactgtacagaatcaagcccgaggccctgaagttcaccagcatcgtggacacccccgaggtgatccaggccaagatcaacgccgtgcagatcagcgagcccctgtacagagacgcctgggagaaggagaaggccaacgtgaacgtgcccgccgacacccccctgatgctgcagagcaagatcaacgccctgcagatcagcaacaagagataccagcaggcctgggaggacgtgaagatgaccggctacgacctgagagccgacgccatcggcatccagcacgccaaggccagcagagacatcgccagcgactacctgtacaagaccgcctacgagaagcagaagggccactacatcggctgcagaagcgccaaggaggaccccaagctggtgtgggccgccaacgtgctgaagatgcagaacgacagactgtacaagaaggcctacaacgaccacaaggccaagatcagcatccccgtggacatggtgagcatcagcgccgccaaggagggccaggccctggccagcgacgtggactacagacactacctgcaccactggagctgcttccccgaccagaacgacgtgatccaggccagaaaggcctacgacctgcagagcgacagcgtgtacaaggccgacctggagtggctgagaggcatcggctggatgcccgagggcagcgtggagatgaacagagtgaaggtggcccaggacctggtgaacgagagactgtacagaaccagacccgaggccctgagcttcaccagcatcgtggacacccccgaggtggtgctggccaaggccaacagcctgcagatcagcgagaagctgtaccaggaggcctggaacaaggacaagagcaacatcaccatccccagcgacacccccgagatgctgcaggcccacatcaacgccctgcagatcagcaacaagctgtaccagaaggactggaacgacaccaagcagaagggctacgacatcagagccgacgccatcgagatcaagcacgccaaggccagcagagagatcgccagcgagtacaagtacaaggagggctacagaaagcagctgggccaccacatgggcttcagaaccctgcaggacgaccccaagagcgtgtgggccatccacgccgccaagatccagagcgacagagagtacaagaaggcctacgagaagagcaagggcatccacaacacccccctggacatgatgagcatcgtgcaggccaagaagtgccaggtgctggtgagcgacatcgactacagaaactacctgcaccagtggacctgcctgcccgaccagaacgacgtgatccaggccaagaaggcctacgacctgcagagcgacaacctgtacaagagcgacctggagtggctgaagggcatcggctggctgcccgagggcagcgtggaggtgatgagagtgaagaacgcccagaacctgctgaacgagagactgtacagaatcaagcccgaggccctgaagttcaccagcatcgtggacacccccgaggtgatccaggccaagatcaacgccgtgcagatcagcgagcccctgtacagaaacgcctgggagaaggagaaggccaacgtgaacgtgcccgccgacacccccctgatgctgcagagcaagatcaacgccctgcagatcagcaacaagagataccagcaggcctgggaggacgtgaagatgaccggctacgacctgagagccgacgccatcggcatccagcacgccaaggccagcagagacatcgccagcgactacctgtacaagaccgcctacgagaagcagaagggccactacatcggctgcagaagcgccaaggaggaccccaagctggtgtgggccgccaacgtgctgaagatgcagaacgacagactgtacaagaaggcctacaacgaccacaaggccaagatcagcatccccgtggacatggtgagcatcagcgccgccaaggagggccaggccctggccagcgacgtggactacagacactacctgcaccactggagctgcttccccgaccagaacgacgtgatccaggccagaaaggcctacgacctgcagagcgacagcgtgtacaaggccgacctggagtggctgagaggcatcggctggatgcccgagggcagcgtggagatgaacagagtgaaggtggcccaggacctggtgaacgagagactgtacagaaccagacccgaggccctgagcttcaccagcatcgtggacacccccgaggtggtgctggccaaggccaacagcctgcagatcagcgagaagctgtaccaggaggcctggaacaaggacaagagcaacatcaccatccccagcgacacccccgagatgctgcaggcccacatcaacgccctgcagatcagcaacaagctgtaccagaaggactggaacgacaccaagcagaagggctacgacatcagagccgacgccatcgagatcaagcacgccaaggccagcagagagatcgccagcgagtacaagtacaaggagggctacagaaagcagctgggccaccacatgggcttcagaaccctgcaggacgaccccaagagcgtgtgggccatccacgccgccaagatccagagcgacagagagtacaagaaggcctacgagaagagcaagggcatccacaacacccccctggacatgatgagcatcgtgcaggccaagaagtgccaggtgctggtgagcgacatcgactacagaaactacctgcaccagtggacctgcctgcccgaccagaacgacgtgatccaggccaagaaggcctacgacctgcagagcgacaacctgtacaagagcgacctggagtggctgaagggcatcggctggctgcccgagggcagcgtggaggtgatgagagtgaagaacgcccagaacctgctgaacgagagactgtacagaatcaagcccgaggccctgaagttcaccagcatcgtggacacccccgaggtgatccaggccaagatcaacgccgtgcagatcagcgagcccctgtacagagacgcctgggagaaggagaaggccaacgtgaacgtgcccgccgacacccccctgatgctgcagagcaagatcaacgccctgcagatcagcaacaagagataccagcaggcctgggaggacgtgaagatgaccggctacgacctgagagccgacgccatcggcatccagcacgccaaggccagcagagacatcgccagcgactacctgtacaagaccgcctacgagaagcagaagggccactacatcggctgcagaagcgccaaggaggaccccaagctggtgtgggccgccaacgtgctgaagatgcagaacgacagactgtacaagaaggcctacaacgaccacaaggccaagatcagcatccccgtggacatggtgagcatcagcgccgccaaggagggccaggccctggccagcgacgtggactacagacactacctgcacagatggagctgcttccccgaccagaacgacgtgatccaggccagaaaggcctacgacctgcagagcgacgccctgtacaaggccgacctggagtggctgagaggcatcggctggatgccccagggcagccccgaggtgctgagagtgaagaacgcccagaacatcttctgcgacagcgtgtacagaacccccgtggtgaacctgaagtacaccagcatcgtggacacccccgaggtggtgctggccaagagcaacgccgagaacatcagcatccccaagtacagagaggtgtgggacaaggacaagaccagcatccacatcatgcccgacacccccgagatcaacctggccagagccaacgccctgaacgtgagcaacaagctgtacagagagggctgggacgagatgaaggccggctgcgacgtgagactggacgccatccccatccaggccgccaaggccagcagagagatcgccagcgactacaagtacaagctggaccacgagaagcagaagggccactacgtgggcaccctgaccgccagagacgacaacaagatcagatgggccctgatcgccgacaagctgcagaacgagagagagtacagactggactgggccaagtggaaggccaagatccagagccccgtggacatgctgagcatcctgcacagcaagaacagccaggccctggtgagcgacatggactacagaaactacctgcaccagtggacctgcatgcccgaccagaacgacgtgatccaggccaagaaggcctacgagctgcagagcgacaacgtgtacaaggccgacctggagtggctgagaggcatcggctggatgcccaacgacagcgtgagcgtgaaccacgccaagcacgccgccgacatcttcagcgagaagaagtacagaaccaagatcgagaccctgaacttcacccccgtggacgacagagtggactacgtgaccgccaagcagagcggcgagatcctggacgacatcaagtacagaaaggactggaacgccaccaagagcaagtacaccctgaccgagacccccctgctgcacaccgcccaggaggccgccagaatcctggaccagtacctgtacaaggagggctgggagagacagaaggccaccggctacatcctgccccccgacgccgtgcccttcgtgcacgcccaccactgcaacgacgtgcagagcgagctgaagtacaaggccgagcacgtgaagcagaagggccactacgtgggcgtgcccaccatgagagacgaccccaagctggtgtggttcgagcacgccggccagatccagaacgagagactgtacaaggaggactaccacaagaccaaggccaagatcaacatccccgccgacatggtgagcgtgctggccgccaagcagggccagaccctggtgagcgacatcgactacagaaactacctgcaccagtggatgtgccaccccgaccagaacgacgtgatccaggccagaaaggcctacgacctgcagagcgacaacgtgtacagagccgacctggagtggctgagaggcatcggctggatccccctggacagcgtggaccacgtgagagtgaccaagaaccaggagatgatgagccagatcaagtacaagaagaacgccctggagaactaccccaacttcagaagcgtggtggacccccccgagatcgtgctggccaagatcaacagcgtgaaccagagcgacgtgaagtacaaggagaccttcaacaaggccaagggcaagtacaccttcagccccgacaccccccacatcagccacagcaaggacatgggcaagctgtacagcaccatcctgtacaagggcgcctgggagggcaccaaggcctacggctacaccctggacgagagatacatccccatcgtgggcgccaagcacgccgacctggtgaacagcgagctgaagtacaaggagacctacgagaagcagaagggccactacctggccggcaaggtgatcggcgagttccccggcgtggtgcactgcctggacttccagaagatgagaagcgccctgaactacagaaagcactacgaggacaccaaggccaacgtgcacatccccaacgacatgatgaaccacgtgctggccaagagatgccagtacatcctgagcgacctggagtacagacactacttccaccagtggaccagcctgctggaggagcccaacgtgatcagagtgagaaacgcccaggagatcctgagcgacaacgtgtacaaggacgacctgaactggctgaagggcatcggctgctacgtgtgggacaccccccagatcctgcacgccaagaagagctacgacctgcagagccagctgcagtacaccgccgccggcaaggagaacctgcagaactacaacctggtgaccgacacccccctgtacgtgaccgccgtgcagagcggcatcaacgccagcgaggtgaagtacaaggagaactaccaccagatcaaggacaagtacaccaccgtgctggagaccgtggactacgacagaaccagaaacctgaagaacctgtacagcagcaacctgtacaaggaggcctgggacagagtgaaggccaccagctacatcctgcccagcagcaccctgagcctgacccacgccaagaaccagaagcacctggccagccacatcaagtacagagaggagtacgagaagttcaaggccctgtacaccctgcccagaagcgtggacgacgaccccaacaccgccagatgcctgagagtgggcaagctgaacatcgacagactgtacagaagcgtgtacgagaagaacaagatgaagatccacatcgtgcccgacatggtggagatggtgaccgccaaggacagccagaagaaggtgagcgagatcgactacagactgagactgcacgagtggatctgccaccccgacctgcaggtgaacgaccacgtgagaaaggtgaccgaccagatcagcgacatcgtgtacaaggacgacctgaactggctgaagggcatcggctgctacgtgtgggacacccccgagatcctgcacgccaagcacgcctacgacctgagagacgacatcaagtacaaggcccacatgctgaagaccagaaacgactacaagctggtgaccgacacccccgtgtacgtgcaggccgtgaagagcggcaagcagctgagcgacgccgtgtaccactacgactacgtgcacagcgtgagaggcaaggtggcccccaccaccaagaccgtggacctggacagagccctgcacgcctacaagctgcagagcagcaacctgtacaagaccagcctgagaaccctgcccaccggctacagactgcccggcgacaccccccacttcaagcacatcaaggacaccagatacatgagcagctacttcaagtacaaggaggcctacgagcacaccaaggcctacggctacaccctgggccccaaggacgtgcccttcgtgcacgtgagaagagtgaacaacgtgaccagcgagagactgtacagagagctgtaccacaagctgaaggacaagatccacaccacccccgacacccccgagatcagacaggtgaagaagacccaggaggccgtgagcgagctgatctacaagagcgacttcttcaagatgcagggccacatgatcagcctgccctacaccccccaggtgatccactgcagatacgtgggcgacatcaccagcgacatcaagtacaaggaggacctgcaggtgctgaagggcttcggctgcttcctgtacgacacccccgacatggtgagaagcagacacctgagaaagctgtggagcaactacctgtacaccgacaaggccagaaagatgagagacaagtacaaggtggtgctggacacccccgagtacagaaaggtgcaggagctgaagacccacctgagcgagctggtgtacagagccgccggcaagaagcagaagagcatcttcaccagcgtgcccgacacccccgacctgctgagagccaagagaggccagaagctgcagagccagtacctgtacgtggagctggccaccaaggagagaccccaccaccacgccggcaaccagaccaccgccctgaagcacgccaaggacgtgaaggacatggtgagcgagaagaagtacaagatccagtacgagaagatgaaggacaagtacacccccgtgcccgacacccccatcctgatcagagccaagagagcctactggaacgccagcgacctgagatacaaggagaccttccagaagaccaagggcaagtaccacaccgtgaaggacgccctggacatcgtgtaccacagaaaggtgaccgacgacatcagcaagatcaagtacaaggagaactacatgagccagctgggcatctggagaagcatccccgacagacccgagcacttccaccacagagccgtgaccgacaccgtgagcgacgtgaagtacaaggaggacctgacctggctgaagggcatcggctgctacgcctacgacacccccgacttcaccctggccgagaagaacaagaccctgtacagcaagtacaagtacaaggaggtgttcgagagaaccaagagcgacttcaagtacgtggccgacagccccatcaacagacacttcaagtacgccacccagctgatgaacgagaagaagtacagagccgactacgagcagagaaaggacaagtaccacctggtggtggacgagcccagacacctgctggccaagaccgccggcgaccagatcagccagatcaagtacagaaagaactacgagaagagcaaggacaagttcaccagcatcgtggacacccccgagcacctgagaaccaccaaggtgaacaagcagatcagcgacatcctgtacaagctggagtacaacaaggccaagcccagaggctacaccaccatccacgacacccccatgctgctgcacgtgagaaaggtgaaggacgaggtgagcgacctgaagtacaaggaggtgtaccagagaaacaagagcaactgcaccatcgagcccgacgccgtgcacatcaaggccgccaaggacgcctacaaggtgaacaccaacctggactacaagaagcagtacgaggccaacaaggcccactggaagtggacccccgacagacccgacttcctgcaggccgccaagagcagcctgcagcagagcgacttcgagtacaagctggacagagagttcctgaagggctgcaagctgagcgtgaccgacgacaagaacaccgtgctggccctgagaaacaccctgatcgagagcgacctgaagtacaaggagaagcacgtgaaggagagaggcacctgccacgccgtgcccgacaccccccagatcctgctggccaagaccgtgagcaacctggtgagcgagaacaagtacaaggaccacgtgaagaagcacctggcccagggcagctacaccaccctgcccgagaccagagacaccgtgcacgtgaaggaggtgaccaagcacgtgagcgacaccaactacaagaagaagttcgtgaaggagaagggcaagagcaactacagcatcatgctggagccccccgaggtgaagcacgccatggaggtggccaagaagcagagcgacgtggcctacagaaaggacgccaaggagaacctgcactacaccaccgtggccgacagacccgacatcaagaaggccacccaggccgccaagcaggccagcgaggtggagtacagagccaagcacagaaaggagggcagccacggcctgagcatgctgggcagacccgacatcgagatggccaagaaggccgccaagctgagcagccaggtgaagtacagagagaacttcgacaaggagaagggcaagacccccaagtacaaccccaaggacagccagctgtacaaggtgatgaaggacgccaacaacctggccagcgaggtgaagtacaaggccgacctgaagaagctgcacaagcccgtgaccgacatgaaggagagcctgatcatgaaccacgtgctgaacaccagccagctggccagcagctaccagtacaagaagaagtacgagaagagcaagggccactaccacaccatccccgacaacctggagcagctgcacctgaaggaggccaccgagctgcagagcatcgtgaagtacaaggagaagtacgagaaggagagaggcaagcccatgctggacttcgagacccccacctacatcaccgccaaggagagccagcagatgcagagcggcaaggagtacagaaaggactacgaggagagcatcaagggcagaaacctgaccggcctggaggtgacccccgccctgctgcacgtgaagtacgccaccaagatcgccagcgagaaggagtacagaaaggacctggaggagagcatcagaggcaagggcctgaccgagatggaggacacccccgacatgctgagagccaagaacgccacccagatcctgaacgagaaggagtacaagagagacctggagctggaggtgaagggcagaggcctgaacgccatggccaacgagacccccgacttcatgagagccagaaacgccaccgacatcgccagccagatcaagtacaagcagagcgccgagatggagaaggccaacttcaccagcgtggtggacacccccgagatcatccacgcccagcaggtgaagaacctgagcagccagaagaagtacaaggaggacgccgagaagagcatgagctactacgagaccgtgctggacacccccgagatccagagagtgagagagaaccagaagaacttcagcctgctgcagtaccagtgcgacctgaagaacagcaagggcaagatcaccgtggtgcaggacacccccgagatcctgagagtgaaggagaaccagaagaacttcagcagcgtgctgtacaaggaggacgtgagccccggcaccgccatcggcaagacccccgagatgatgagagtgaagcagacccaggaccacatcagcagcgtgaagtacaaggaggccatcggccagggcacccccatccccgacctgcccgaggtgaagagagtgaaggagacccagaagcacatcagcagcgtgatgtacaaggagaacctgggcaccggcatccccaccaccgtgacccccgagatcgagagagtgaagagaaaccaggagaacttcagcagcgtgctgtacaaggagaacctgggcaagggcatccccacccccatcacccccgagatggagagagtgaagagaaaccaggagaacttcagcagcatcctgtacaaggagaacctgagcaagggcacccccctgcccgtgacccccgagatggagagagtgaagctgaaccaggagaacttcagcagcgtgctgtacaaggagaacgtgggcaagggcatccccatccccatcacccccgagatggagagagtgaagcacaaccaggagaacttcagcagcgtgctgtacaaggagaacctgggcaccggcatccccatccccatcacccccgagatgcagagagtgaagcacaaccaggagaacctgagcagcgtgctgtacaaggagaacatgggcaagggcacccccctgcccgtgacccccgagatggagagagtgaagcacaaccaggagaacatcagcagcgtgctgtacaaggagaacatgggcaagggcacccccctgcccgtgacccccgagatggagagagtgaagcacaaccaggagaacatcagcagcgtgctgtacaaggagaacatgggcaagggcacccccctggccgtgacccccgagatggagagagtgaagcacaaccaggagaacatcagcagcgtgctgtacaaggagaacgtgggcaaggccaccgccacccccgtgacccccgagatgcagagagtgaagagaaaccaggagaacatcagcagcgtgctgtacaaggagaacctgggcaaggccacccccacccccttcacccccgagatggagagagtgaagagaaaccaggagaacttcagcagcgtgctgtacaaggagaacatgagaaaggccacccccacccccgtgacccccgagatggagagagccaagagaaaccaggagaacatcagcagcgtgctgtacagcgacagcttcagaaagcagatccagggcaaggccgcctacgtgctggacacccccgagatgagaagagtgagagagacccagagacacatcagcaccgtgaagtaccacgaggacttcgagaagcacaagggctgcttcacccccgtggtgaccgaccccatcaccgagagagtgaagaagaacatgcaggacttcagcgacatcaactacagaggcatccagagaaaggtggtggagatggagcagaagagaaacgaccaggaccaggagaccatcaccggcctgagagtgtggagaaccaaccccggcagcgtgttcgactacgaccccgccgaggacaacatccagagcagaagcctgcacatgatcaacgtgcaggcccagagaagaagcagagagcagagcagaagcgccagcgccctgagcatcagcggcggcgaggagaagagcgagcacagcgaggcccccgaccaccacctgagcacctacagcgacggcggcgtgttcgccgtgagcaccgcctacaagcacgccaagaccaccgagctgccccagcagagaagcagcagcgtggccacccagcagaccaccgtgagcagcatccccagccaccccagcaccgccggcaagatcttcagagccatgtacgactacatggccgccgacgccgacgaggtgagcttcaaggacggcgacgccatcatcaacgtgcaggccatcgacgagggctggatgtacggcaccgtgcagagaaccggcagaaccggcatgctgcccgccaactacgtggaggccatctag

SEQ ID NO: 62989 - protein, 8525 aa, Artificial Sequence
  derived and/or modified sequence
MADDEDYEEVVEYYTEEVVYEEVPGETITKIYETTTTRTSDYEQSETSKPALAQPALAQPASAKPVERRKVIRKKVDPSKFMTPYIAHSQKMQDLFSPNKYKEKFEKTKGQPYASTTDTPELRRIKKVQDQLSEVKYRMDGDVAKTICHVDEKAKDIEHAKKVSQQVSKVLYKQNWEDTKDKYLLPPDAPELVQAVKNTAMFSKKLYTEDWEADKSLFYPYNDSPELRRVAQAQKALSDVAYKKGLAEQQAQFTPLADPPDIEFAKKVTNQVSKQKYKEDYENKIKGKWSETPCFEVANARMNADNISTRKYQEDFENMKDQIYFMQTETPEYKMNKKAGVAASKVKYKEDYEKNKGKADYNVLPASENPQLRQLKAAGDALSDKLYKENYEKTKAKSINYCETPKFKLDTVLQNFSSDKKYKDSYLKDILGHYVGSFEDPYHSHCMKVTAQNSDKNYKAEYEEDRGKGFFPQTITQEYEAIKKLDQCKDHTYKVHPDKTKFTQVTDSPVLLQAQVNSKQLSDLNYKAKHESEKFKCHIPPDTPAFIQHKVNAYNLSDNLYKQDWEKSKAKKFDIKVDAIPLLAAKANTKNTSDVMYKKDYEKNKGKMIGVLSINDDPKMLHSLKVAKNQSDRLYKENYEKTKAKSMNYCETPKYQLDTQLKNFSEARYKDLYVKDVLGHYVGSMEDPYHTHCMKVAAQNSDKSYKAEYEEDKGKCYFPQTITQEYEAIKKLDQCKDHTYKVHPDKTKFTAVTDSPVLLQAQLNTKQLSDLNYKAKHEGEKFKCHIPADAPQFIQHRVNAYNLSDNVYKQDWEKSKAKKFDIKVDAIPLLAAKANTKNTSDVMYKKDYEKSKGKMIGALSINDDPKMLHSLKTAKNQSDREYRKDYEKSKTIYTAPLDMLQVTQAKKSQAIASDVDYKHILHSYSYPPDSINVDLAKKAYALQSDVEYKADYNSWMKGCGWVPFGSLEMEKAKRASDILNEKKYRQHPDTLKFTSIEDAPITVQSKINQAQRSDIAYKAKGEEIIHKYNLPPDLPQFIQAKVNAYNISENMYKADLKDLSKKGYDLRTDAIPIRAAKAARQAASDVQYKKDYEKAKGKMVGFQSLQDDPKLVHYMNVAKIQSDREYKKDYEKTKSKYNTPHDMFNVVAAKKAQDVVSNVNYKHSLHHYTYLPDAMDLELSKNMMQIQSDNVYKEDYNNWMKGIGWIPIGSLDVEKVKKAGDALNEKKYRQHPDTLKFTSIVDSPVMVQAKQNTKQVSDILYKAKGEDVKHKYTMSPDLPQFLQAKCNAYNISDVCYKRDWYDLIAKGNNVLGDAIPITAAKASRNIASDYKYKEAYEKSKGKHVGFRSLQDDPKLVHYMNVAKLQSDREYKKNYENTKTSYHTPGDMVSITAAKMAQDVATNVNYKQPLHHYTYLPDAMSLEHTRNVNQIQSDNVYKDEYNSFLKGIGWIPIGSLEVEKVKKAGDALNERKYRQHPDTVKFTSVPDSMGMVLAQHNTKQLSDLNYKVEGEKLKHKYTIDPELPQFIQAKVNALNMSDAHYKADWKKTIAKGYDLRPDAIPIVAAKSSRNIASDCKYKEAYEKAKGKQVGFLSLQDDPKLVHYMNVAKIQSDREYKKGYEASKTKYHTPLDMVSVTAAKKSQEVATNANYRQSYHHYTLLPDALNVEHSRNAMQIQSDNLYKSDFTNWMKGIGWVPIESLEVEKAKKAGEILSEKKYRQHPEKLKFTYAMDTMEQALNKSNKLNMDKRLYTEKWNKDKTTIHVMPDTPDILLSRVNQITMSDKLYKAGWEEEKKKGYDLRPDAIAIKAARASRDIASDYKYKKAYEQAKGKHIGFRSLEDDPKLVHFMQVAKMQSDREYKKGYEKSKTSFHTPVDMLSVVAAKKSQEVATNANYRNVIHTYNMLPDAMSFELAKNMMQIQSDNQYKADYADFMKGIGWLPLGSLEAEKNKKAMEIISEKKYRQHPDTLKYSTLMDSMNMVLAQNNAKIMNEHLYKQAWEADKTKVHIMPDIPQIILAKANAINMSDKLYKLSLEESKKKGYDLRPDAIPIKAAKASRDIASDYKYKYNYEKGKGKMVGFRSLEDDPKLVHSMQVAKMQSDREYKKNYENTKTSYHTPADMLSVTAAKDAQANITNTNYKHLIHKYILLPDAMNIELTRNMNRIQSDNEYKQDYNEWYKGLGWSPAGSLEVEKAKKATEYASDQKYRQHPSNFQFKKLTDSMDMVLAKQNAHTMNKHLYTIDWNKDKTKIHVMPDTPDILQAKQNQTLYSQKLYKLGWEEALKKGYDLPVDAISVQLAKASRDIASDYKYKQGYRKQLGHHVGFRSLQDDPKLVLSMNVAKMQSEREYKKDFEKWKTKFSSPVDMLGVVLAKKCQELVSDVDYKNYLHQWTCLPDQNDVVQAKKVYELQSENLYKSDLEWLRGIGWSPLGSLEAEKNKRASEIISEKKYRQPPDRNKFTSIPDAMDIVLAKTNAKNRSDRLYREAWDKDKTQIHIMPDTPDIVLAKANLINTSDKLYRMGYEELKRKGYDLPVDAIPIKAAKASREIASEYKYKEGFRKQLGHHIGARNIEDDPKMMWSMHVAKIQSDREYKKDFEKWKTKFSSPVDMLGVVLAKKCQTLVSDVDYKNYLHQWTCLPDQSDVIHARQAYDLQSDNLYKSDLQWLKGIGWMTSGSLEDEKNKRATQILSDHVYRQHPDQFKFSSLMDSIPMVLAKNNAITMNHRLYTEAWDKDKTTVHIMPDTPEVLLAKQNKVNYSEKLYKLGLEEAKRKGYDMRVDAIPIKAAKASRDIASEFKYKEGYRKQLGHHIGARAIRDDPKMMWSMHVAKIQSDREYKKDFEKWKTKFSSPVDMLGVVLAKKCQTLVSDVDYKNYLHQWTCLPDQSDVIHARQAYDLQSDNMYKSDLQWMRGIGWVSIGSLDVEKCKRATEILSDKIYRQPPDRFKFTSVTDSLEQVLAKNNAITMNKRLYTEAWDKDKTQIHIMPDTPEIMLARMNKINYSESLYKLANEEAKKKGYDLRSDAIPIVAAKASRDIISDYKYKDGYCKQLGHHIGARNIEDDPKMMWSMHVAKIQSDREYKKDFEKWKTKFSSPVDMLGVVLAKKCQTLVSDVDYKNYLHEWTCLPDQSDVIHARQAYDLQSDNIYKSDLQWLRGIGWVPIGSMDVVKCKRATEILSDNIYRQPPDKLKFTSVTDSLEQVLAKNNALNMNKRLYTEAWDKDKTQIHIMPDTPEIMLARQNKINYSETLYKLANEEAKKKGYDLRSDAIPIVAAKASRDVISDYKYKDGYRKQLGHHIGARNIEDDPKMMWSMHVAKIQSDREYKKDFEKWKTKFSSPVDMLGVVLAKKCQTLVSDVDYKNYLHEWTCLPDQNDVIHARQAYDLQSDNIYKSDLQWLRGIGWVPIGSMDVVKCKRAAEILSDNIYRQPPDKLKFTSVTDSLEQVLAKNNALNMNKRLYTEAWDKDKTQVHIMPDTPEIMLARQNKINYSESLYRQAMEEAKKEGYDLRSDAIPIVAAKASRDIASDYKYKEAYRKQLGHHIGARAVHDDPKIMWSLHIAKVQSDREYKKDFEKYKTRYSSPVDMLGIVLAKKCQTLVSDVDYKHPLHEWICLPDQNDIIHARKAYDLQSDNLYKSDLEWMKGIGWVPIDSLEVVRAKRAGELLSDTIYRQRPETLKFTSITDTPEQVLAKNNALNMNKRLYTEAWDNDKKTIHVMPDTPEIMLAKLNRINYSDKLYKLALEESKKEGYDLRLDAIPIQAAKASRDIASDYKYKEGYRKQLGHHIGARNIKDDPKMMWSIHVAKIQSDREYKKEFEKWKTKFSSPVDMLGVVLAKKCQILVSDIDYKHPLHEWTCLPDQNDVIQARKAYDLQSDAIYKSDLEWLRGIGWVPIGSVEVEKVKRAGEILSDRKYRQPADQLKFTCITDTPEIVLAKNNALTMSKHLYTEAWDADKTSIHVMPDTPDILLAKSNSANISQKLYTKGWDESKMKDYDLRADAISIKSAKASRDIASDYKYKEAYEKQKGHHIGAQSIEDDPKIMCAIHAGKIQSEREYKKEFQKWKTKFSSPVDMLSILLAKKCQTLVTDIDYRNYLHEWTCMPDQNDIIQAKKAYDLQSDSVYKADLEWLRGIGWMPEGSVEMNRVKVAQDLVNERLYRTRPEALSFTSIVDTPEVVLAKANSLQISEKLYQEAWNKDKSNITIPSDTPEMLQAHINALQISNKLYQKDWNDAKQKGYDIRADAIEIKHAKASREIASEYKYKEGYRKQLGHHMGFRTLQDDPKSVWAIHAAKIQSDREYKKAYEKSKGIHNTPLDMMSIVQAKKCQVLVSDIDYRNYLHQWTCLPDQNDVIQAKKAYDLQSDNLYKSDLEWLKGIGWLPEGSVEVMRVKNAQNLLNERLYRIKPEALKFTSIVDTPEVIQAKINAVQISEPLYRDAWEKEKANVNVPADTPLMLQSKINALQISNKRYQQAWEDVKMTGYDLRADAIGIQHAKASRDIASDYLYKTAYEKQKGHYIGCRSAKEDPKLVWAANVLKMQNDRLYKKAYNDHKAKISIPVDMVSISAAKEGQALASDVDYRHYLHHWSCFPDQNDVIQARKAYDLQSDSVYKADLEWLRGIGWMPEGSVEMNRVKVAQDLVNERLYRTRPEALSFTSIVDTPEVVLAKANSLQISEKLYQEAWNKDKSNITIPSDTPEMLQAHINALQISNKLYQKDWNDTKQKGYDIRADAIEIKHAKASREIASEYKYKEGYRKQLGHHMGFRTLQDDPKSVWAIHAAKIQSDREYKKAYEKSKGIHNTPLDMMSIVQAKKCQVLVSDIDYRNYLHQWTCLPDQNDVIQAKKAYDLQSDNLYKSDLEWLKGIGWLPEGSVEVMRVKNAQNLLNERLYRIKPEALKFTSIVDTPEVIQAKINAVQISEPLYRNAWEKEKANVNVPADTPLMLQSKINALQISNKRYQQAWEDVKMTGYDLRADAIGIQHAKASRDIASDYLYKTAYEKQKGHYIGCRSAKEDPKLVWAANVLKMQNDRLYKKAYNDHKAKISIPVDMVSISAAKEGQALASDVDYRHYLHHWSCFPDQNDVIQARKAYDLQSDSVYKADLEWLRGIGWMPEGSVEMNRVKVAQDLVNERLYRTRPEALSFTSIVDTPEVVLAKANSLQISEKLYQEAWNKDKSNITIPSDTPEMLQAHINALQISNKLYQKDWNDTKQKGYDIRADAIEIKHAKASREIASEYKYKEGYRKQLGHHMGFRTLQDDPKSVWAIHAAKIQSDREYKKAYEKSKGIHNTPLDMMSIVQAKKCQVLVSDIDYRNYLHQWTCLPDQNDVIQAKKAYDLQSDNLYKSDLEWLKGIGWLPEGSVEVMRVKNAQNLLNERLYRIKPEALKFTSIVDTPEVIQAKINAVQISEPLYRDAWEKEKANVNVPADTPLMLQSKINALQISNKRYQQAWEDVKMTGYDLRADAIGIQHAKASRDIASDYLYKTAYEKQKGHYIGCRSAKEDPKLVWAANVLKMQNDRLYKKAYNDHKAKISIPVDMVSISAAKEGQALASDVDYRHYLHRWSCFPDQNDVIQARKAYDLQSDALYKADLEWLRGIGWMPQGSPEVLRVKNAQNIFCDSVYRTPVVNLKYTSIVDTPEVVLAKSNAENISIPKYREVWDKDKTSIHIMPDTPEINLARANALNVSNKLYREGWDEMKAGCDVRLDAIPIQAAKASREIASDYKYKLDHEKQKGHYVGTLTARDDNKIRWALIADKLQNEREYRLDWAKWKAKIQSPVDMLSILHSKNSQALVSDMDYRNYLHQWTCMPDQNDVIQAKKAYELQSDNVYKADLEWLRGIGWMPNDSVSVNHAKHAADIFSEKKYRTKIETLNFTPVDDRVDYVTAKQSGEILDDIKYRKDWNATKSKYTLTETPLLHTAQEAARILDQYLYKEGWERQKATGYILPPDAVPFVHAHHCNDVQSELKYKAEHVKQKGHYVGVPTMRDDPKLVWFEHAGQIQNERLYKEDYHKTKAKINIPADMVSVLAAKQGQTLVSDIDYRNYLHQWMCHPDQNDVIQARKAYDLQSDNVYRADLEWLRGIGWIPLDSVDHVRVTKNQEMMSQIKYKKNALENYPNFRSVVDPPEIVLAKINSVNQSDVKYKETFNKAKGKYTFSPDTPHISHSKDMGKLYSTILYKGAWEGTKAYGYTLDERYIPIVGAKHADLVNSELKYKETYEKQKGHYLAGKVIGEFPGVVHCLDFQKMRSALNYRKHYEDTKANVHIPNDMMNHVLAKRCQYILSDLEYRHYFHQWTSLLEEPNVIRVRNAQEILSDNVYKDDLNWLKGIGCYVWDTPQILHAKKSYDLQSQLQYTAAGKENLQNYNLVTDTPLYVTAVQSGINASEVKYKENYHQIKDKYTTVLETVDYDRTRNLKNLYSSNLYKEAWDRVKATSYILPSSTLSLTHAKNQKHLASHIKYREEYEKFKALYTLPRSVDDDPNTARCLRVGKLNIDRLYRSVYEKNKMKIHIVPDMVEMVTAKDSQKKVSEIDYRLRLHEWICHPDLQVNDHVRKVTDQISDIVYKDDLNWLKGIGCYVWDTPEILHAKHAYDLRDDIKYKAHMLKTRNDYKLVTDTPVYVQAVKSGKQLSDAVYHYDYVHSVRGKVAPTTKTVDLDRALHAYKLQSSNLYKTSLRTLPTGYRLPGDTPHFKHIKDTRYMSSYFKYKEAYEHTKAYGYTLGPKDVPFVHVRRVNNVTSERLYRELYHKLKDKIHTTPDTPEIRQVKKTQEAVSELIYKSDFFKMQGHMISLPYTPQVIHCRYVGDITSDIKYKEDLQVLKGFGCFLYDTPDMVRSRHLRKLWSNYLYTDKARKMRDKYKVVLDTPEYRKVQELKTHLSELVYRAAGKKQKSIFTSVPDTPDLLRAKRGQKLQSQYLYVELATKERPHHHAGNQTTALKHAKDVKDMVSEKKYKIQYEKMKDKYTPVPDTPILIRAKRAYWNASDLRYKETFQKTKGKYHTVKDALDIVYHRKVTDDISKIKYKENYMSQLGIWRSIPDRPEHFHHRAVTDTVSDVKYKEDLTWLKGIGCYAYDTPDFTLAEKNKTLYSKYKYKEVFERTKSDFKYVADSPINRHFKYATQLMNERKYKSSAKMFLQHGCNEILRPDMLTALYNSHMWSQIKYRKNYEKSKDKFTSIVDTPEHLRTTKVNKQISDILYKLEYNKAKPRGYTTIHDTPMLLHVRKVKDEVSDLKYKEVYQRNKSNCTIEPDAVHIKAAKDAYKVNTNLDYKKQYEANKAHWKWTPDRPDFLQAAKSSLQQSDFEYKLDREFLKGCKLSVTDDKNTVLALRNTLIESDLKYKEKHVKERGTCHAVPDTPQILLAKTVSNLVSENKYKDHVKKHLAQGSYTTLPETRDTVHVKEVTKHVSDTNYKKKFVKEKGKSNYSIMLEPPEVKHAMEVAKKQSDVAYRKDAKENLHYTTVADRPDIKKATQAAKQASEVEYRAKHRKEGSHGLSMLGRPDIEMAKKAAKLSSQVKYRENFDKEKGKTPKYNPKDSQLYKVMKDANNLASEVKYKADLKKLHKPVTDMKESLIMNHVLNTSQLASSYQYKKKYEKSKGHYHTIPDNLEQLHLKEATELQSIVKYKEKYEKERGKPMLDFETPTYITAKESQQMQSGKEYRKDYEESIKGRNLTGLEVTPALLHVKYATKIASEKEYRKDLEESIRGKGLTEMEDTPDMLRAKNATQILNEKEYKRDLELEVKGRGLNAMANETPDFMRARNATDIASQIKYKQSAEMEKANFTSVVDTPEIIHAQQVKNLSSQKKYKEDAEKSMSYYETVLDTPEIQRVRENQKNFSLLQYQCDLKNSKGKITVVQDTPEILRVKENQKNFSSVLYKEDVSPGTAIGKTPEMMRVKQTQDHISSVKYKEAIGQGTPIPDLPEVKRVKETQKHISSVMYKENLGTGIPTTVTPEIERVKRNQENFSSVLYKENLGKGIPTPITPEMERVKRNQENFSSILYKENLSKGTPLPVTPEMERVKLNQENFSSVLYKENVGKGIPIPITPEMERVKHNQENFSSVLYKENLGTGIPIPITPEMQRVKHNQENLSSVLYKENMGKGTPLPVTPEMERVKHNQENISSVLYKENMGKGTPLPVTPEMERVKHNQENISSVLYKENMGKGTPLAVTPEMERVKHNQENISSVLYKENVGKATATPVTPEMQRVKRNQENISSVLYKENLGKATPTPFTPEMERVKRNQENFSSVLYKENMRKATPTPVTPEMERAKRNQENISSVLYSDSFRKQIQGKAAYVLDTPEMRRVRETQRHISTVKYHEDFEKHKGCFTPVVTDPITERVKKNMQDFSDINYRGIQRKVVEMEQKRNDQDQETITGLRVWRTNPGSVFDYDPAEDNIQSRSLHMINVQAQRRSREQSRSASALSISGGEEKSEHSEAPDHHLSTYSDGGVFAVSTAYKHAKTTELPQQRSSSVATQQTTVSSIPSHPSTAGKIFRAMYDYMAADADEVSFKDGDAIINVQAIDEGWMYGTVQRTGRTGMLPANYVEAI

SEQ ID NO: 62990 - DNA, 26202 bp, Artificial Sequence
  derived and/or modified sequence
aggcatcacgctggcttttgcctggggttctcaggaggggagagttgggagaggctttgctgctgaggaaatttatttggtagattgaaggtttgaacgagagctacagaaacgaaagaaaaagtctgtataagccaatggtgttcgggaagaaaataaccccattgccttgagtttgtaggtgccactactactctggaaaaatggcagatgacgaagactatgaggaggtggtggagtactacacagaagaagtggtttacgaagaggtgccgggagagacaataacaaaaatttatgagactacgacaacaaggacatctgactatgagcaatcagaaacttccaaaccagctctggcacagccagcactggcacagccagcatcagcaaagccggtggagaggaggaaggtcatccggaagaaagtggatccttcaaagttcatgaccccctacattgcacacagtcagaaaatgcaggatctttttagcccaaataaatacaaggagaagtttgagaaaacaaaaggacagccatacgccagcacaacagatactccagaacttcgcagaatcaaaaaagtacaagatcaactcagtgaggttaagtatcgaatggatggtgatgttgctaagactatatgtcacgtagatgaaaaagcaaaggatattgaacatgcaaagaaagtgtcgcagcaagtcagtaaggttttatacaagcagaactgggaagacaccaaggataagtacctgcttcctcctgatgcccctgaacttgtccaggccgttaagaacaccgccatgttcagcaagaaactgtacactgaagactgggaagcagacaaaagtttgttttacccctataatgatagcccggaactgaggagagttgcccaggcccagaaagctctcagtgatgttgcctacaaaaaaggtctcgctgaacagcaagctcaattcacgcctctggctgatcctccagatatagaatttgccaagaaagtaaccaatcaagtgagcaagcaaaaatacaaagaagactatgaaaataaaatcaaaggcaaatggagtgagacaccttgctttgaagttgcaaatgccagaatgaatgctgataacattagcacaaggaaataccaggaagattttgaaaacatgaaagaccagatctacttcatgcagaccgaaacaccagagtataaaatgaataaaaaagctggtgtggcagctagcaaggtaaaatacaaagaagactatgaaaagaataaaggaaaagcagattataatgtgcttcctgcttcagagaacccacagcttaggcagctgaaggcagcaggagatgccctaagtgacaaactatacaaggaaaactatgaaaagacaaaagcaaagagcataaattactgcgagacccccaaattcaagctcgatactgttctgcagaacttcagtagtgataaaaaatataaagattcctacttaaaagatattttgggacattatgtaggcagcttcgaggatccataccattcacactgcatgaaagtcacagctcaaaacagtgataaaaactacaaagcagaatacgaagaagacagaggcaaaggcttcttccctcagaccataactcaagaatatgaagcaattaagaaactagatcagtgtaaagaccacacctacaaagtccatccagataagacaaaattcacccaagttacagactctcctgttctgctacaagcccaagtcaattccaaacaactgagtgacttaaattacaaagcaaaacatgaaagtgaaaagttcaagtgccatatcccccctgatactcctgcttttatccagcacaaagtcaatgcctataacttgagtgataatctttataagcaagactgggagaagagcaaagccaaaaagtttgacattaaagtggatgccattcccctgctggcagccaaagccaacaccaagaacaccagcgatgtgatgtacaagaaagactatgaaaaaaacaaagggaaaatgattggagtcctcagcattaatgacgatcccaagatgctgcactccttgaaggtggccaaaaaccagagtgatagattatacaaggaaaactatgagaagacaaaggcaaagagtatgaattactgtgagaccccaaaatatcaacttgatactcagctgaagaacttcagtgaggctagatataaagacttatatgtaaaggatgttttgggacattatgtaggcagcatggaggacccatatcacacacactgcatgaaagttgcagctcaaaacagtgataaaagttacaaagcagaatatgaagaagataaaggaaaatgctatttccctcagacaataacacaagaatatgaagcaatcaagaagctggaccagtgtaaagatcatacctacaaagttcatccagataagaccaaattcacggcagtcactgattctcctgtactgttgcaagcccagctcaacacgaaacagcttagtgatctgaattacaaagcaaaacatgaaggtgagaagttcaagtgccatataccagcagatgctccacagtttatccaacacagagtcaatgcctataatctgagtgataatgtttataagcaagactgggagaagagcaaagccaagaagtttgacattaaagtggacgccattcccctgttggcagccaaagccaacaccaagaacaccagcgatgtgatgtacaagaaagactatgaaaagagcaaagggaaaatgattggagccctcagcattaatgacgatccaaagatgctgcactccttgaagacagccaaaaaccagagtgatcgcgaatatcgaaaagattatgaaaagtcaaaaactatctacacggcacctcttgatatgctccaagtcactcaagctaagaaatctcaggcaattgccagcgacgttgattataagcacatcttacacagttacagctacccccctgatagcatcaatgtggaccttgccaagaaggcatatgcgctgcagagcgatgttgaatacaaagctgactacaatagctggatgaaaggttgtggctgggtgccttttgggtccttagaaatggaaaaggcaaagcgagcttcagacatcctcaatgagaaaaaatatcgccaacatccagacaccctcaagtttacctcgattgaagatgctccaattacagtacagtctaaaattaaccaggcccagaggagtgatatcgcttacaaagccaaaggagaggaaattattcacaaatacaacctgccaccagacctgccccagttcatccaggctaaagttaatgcctacaatatcagtgagaatatgtacaaagcagacttgaaagacttgagcaagaagggatatgacctgagaactgatgcgattcccatcagagctgccaaagctgccaggcaggcggcgagtgacgttcagtacaaaaaagactatgaaaaggctaaagggaaaatggttggcttccaaagtcttcaagatgaccctaaactggttcattatatgaacgtggccaagatacaatcagatcgggagtataaaaaagactatgagaagacaaagtccaaatacaacacgccccatgatatgttcaatgtcgtggcggctaagaaagcccaggatgtggtcagcaatgtcaactataagcattctctccatcattacacctacttgcctgacgccatggacctggagctgtctaagaacatgatgcagatacagagtgataacgtctacaaggaagactacaacaactggatgaaaggcattggctggattcctattggcagtctcgacgtcgaaaaagttaaaaaggccggtgatgctctgaatgaaaagaagtacaggcaacatccagacaccctcaaatttaccagcattgtggactccccagttatggtccaggcaaaacagaacacgaagcaagtcagtgatatcttatacaaggctaaaggagaagatgtgaaacataaatacaccatgagtcctgatcttcctcagtttctccaggccaagtgcaatgcttacaatataagtgacgtctgttataaacgggattggcatgacttaatagccaagggcaacaatgtgctgggcgatgctattcccatcactgcagccaaggcatcgagaaacattgccagtgattataaatacaaggaagcttatgagaagtcaaagggaaagcatgtgggtttcagaagcctccaggatgatcccaagctggtccactatatgaatgtggcaaagctgcagtctgatcgtgaatacaagaagaactatgagaacaccaaaaccagctaccatacccctggggacatggttagcatcacagctgcaaagatggcccaggatgtcgctaccaatgtcaactacaaacagccattgcatcattacacatacctacctgacgccatgagtcttgagcatacgaggaatgtcaatcaaattcagagtgataatgtgtataaagacgagtataacagcttcttgaagggcatcggatggatccctattggttccctggaggtggagaaggtcaagaaagcaggcgatgcattaaatgagaggaagtatcgacagcacccagataccgtcaagttcacaagtgtgcctgattccatgggcatggtgttggctcagcataacacaaagcagctaagtgatttgaactacaaggtagagggagagaaactgaagcacaagtatactattgaccctgaattgcctcagtttattcaagccaaagtcaacgccctcaacatgagtgatgctcattataaagcagattggaagaaaaccattgccaagggctatgatttgagaccagatgccatcccaattgttgctgcaaaaagttcaaggaatattgctagtgattgcaaatataaggaggcctacgagaaagccaaaggcaagcaagttggatttctcagtcttcaggatgatcctaaactggttcactacatgaatgtggccaaaatccagtctgatcgtgagtacaaaaagggctatgaagccagcaagaccaagtaccacacacctctggatatggtcagtgtgacagctgcaaagaaatctcaggaggttgccaccaacgccaactacagacagtcataccaccactacactctcctgcccgatgccttgaatgtggagcactccaggaatgccatgcagattcagagtgataatctgtacaaatctgacttcaccaattggatgaaagggatcggctgggtgcccatagagtccctggaggtggagaaggcaaagaaagcaggagagattcttagtgagaagaagtatcgccagcaccccgagaagctgaagttcacttacgccatggacacaatggaacaggcacttaacaagagtaacaaactgaacatggacaagaggctctacactgaaaaatggaacaaggacaagaccaccattcatgtcatgcctgacacaccggatattttactctccagagtaaaccaaatcaccatgagtgataaactgtacaaagctggctgggaagaggaaaagaagaaaggatatgacctgaggcctgatgccattgcaataaaggctgcaagagcctctagagacattgccagtgattacaaatacaagaaagcctatgaacaagccaaagggaaacacattggcttccggagcctggaagatgaccccaagctggtgcacttcatgcaagtggccaagatgcagtcagaccgggaatacaagaagggatatgagaaatccaagacctccttccacaccccggtggacatgctcagtgtggtggcagccaagaagtctcaggaagtggccaccaatgccaactacaggaacgtgatccatacctacaacatgcttcctgatgccatgagctttgaattggccaaaaatatgatgcagattcaaagtgataatcagtacaaggctgactatgctgacttcatgaagggcattggatggctccctctgggctccctggaagcagagaaaaacaagaaagccatggagattattagtgaaaagaagtaccgccagcacccagacactttgaagtattccacactcatggactcgatgaacatggttttggcccagaataatgcaaaaattatgaacgaacatctctacaaacaagcatgggaggctgacaaaaccaaagtccacatcatgcctgatatcccccagattattttggcaaaggcaaatgcaattaatatgagtgataaactctacaaactttccttggaagagtctaaaaagaaaggctatgatctcagacctgatgcaattcctatcaaagctgccaaggcttccagagatattgcaagtgattataaatacaagtacaattatgaaaaagggaaggggaaaatggttggtttccgcagtctcgaggatgatcccaaattagtccattccatgcaagtggctaagatgcaatctgatcgggagtacaagaaaaactatgagaacacaaagaccagctaccacacccctgccgacatgctcagtgtcacggctgcaaaggatgcccaagccaacatcaccaacactaactacaagcacctgattcacaagtacatcctccttccagatgcaatgaacattgagctgaccaggaatatgaatcgcatacagagtgataatgaatataagcaagattacaatgaatggtacaaagggcttggctggagtccagcaggttctctggaagtggagaaggccaagaaagcaactgaatatgccagtgatcagaaataccgccagcacccgagcaacttccagtttaagaagctgactgattccatggacatggtgcttgccaagcagaatgcacataccatgaacaagcatttatacaccattgattggaataaagataagaccaagattcatgtgatgcctgatacaccagatattttacaagccaagcagaatcaaacactgtatagtcagaaactctataaacttggatgggaagaagctttgaagaaaggctatgatctcccagttgatgcaatttctgtacagctagctaaagcttcaagagacattgctagtgattataaatacaaacaaggctaccgaaagcaacttggccaccatgttggattccggagtctgcaagatgacccaaaacttgtgttgtccatgaatgtagccaaaatgcagagtgaaagagaatacaagaaggactttgagaagtggaaaactaagttctccagcccagtggacatgttgggagtggtactggccaagaagtgtcaggagttggttagtgacgtggactacaagaactacctgcatcagtggacatgtctgcctgatcagaacgatgttgtgcaagctaagaaagtttatgaactgcaaagtgagaatctatataaatctgaccttgagtggctgagaggcataggatggagtcccttgggttctttagaggcagaaaagaacaagcgggcttcggaaatcatcagtgagaagaaatatcgtcagcctccagacagaaacaagttcaccagcattcctgatgccatggatatagttctggcaaagacaaatgccaaaaataggagtgatagactttatagagaagcttgggacaaagacaagactcagatccacatcatgcctgatacacctgacattgttctggctaaagcaaacttaatcaacacaagtgataaactctaccgaatgggttatgaggagctgaagagaaaaggttacgatcttcctgttgatgccataccaatcaaagcagcaaaagcctcccgggaaattgccagtgaatacaagtacaaggaaggctttcgcaagcagctcggccaccacattggtgcccggaacattgaagatgaccccaagatgatgtggtccatgcatgtggccaagatccagagtgacagggagtacaagaaggactttgagaagtggaagaccaagttcagcagcccagtggacatgctgggggtggtgttggccaagaagtgccagaccttagtcagcgacgtggactacaagaactacctgcaccagtggacatgcctgcccgaccagagcgatgtcatccatgctcggcaggcctatgacctccagagcgataatttgtacaagtcagaccttcagtggctaaaaggcattggctggatgactagtggttctctcgaggatgagaaaaataaacgagccacccagattttgagtgaccatgtttaccgtcagcacccagatcaatttaagttttccagccttatggattccataccaatggttttggcaaaaaacaatgctattaccatgaatcatcgcctctatacagaagcttgggataaagataaaaccactgtccacattatgccagatacccctgaagttttattagctaaacaaaacaaagtaaattacagtgagaaattgtataagcttggcctagaagaagccaagaggaaaggttatgacatgcgggtagatgccattcctatcaaggcagccaaggcctccagagatattgcaagtgaattcaagtacaaagaaggctatcgtaagcagctcggccaccacattggtgcccgagctatacgtgatgaccccaagatgatgtggtccatgcacgtggccaagatccagagtgacagggagtacaagaaggactttgagaagtggaagaccaagttcagcagcccagtggacatgctgggggtggtgctggccaagaagtgccagaccttagtcagcgatgtggactacaagaactacctgcaccagtggacatgcctgcccgaccagagcgacgtcatccatgctcggcaggcctatgacctccagagcgataatatgtacaagtctgatctccagtggatgagaggcattggctgggtgtccattggctctttggatgtggaaaaatgcaaaagggcaactgaaattttgagtgataaaatctatcgccagcctccagacagattcaaatttaccagtgtgactgactctctggaacaagtgttggccaaaaataatgccatcactatgaacaagcgtttatacacagaagcctgggacaaagacaagactcagatccacataatgccagacacaccagaaattatgttggcaagaatgaacaaaatcaactacagtgagagtctgtacaaacttgctaatgaagaagcaaagaagaaaggctatgacttgcgaagcgacgccatccccatcgtggcggccaaggcctccagggacatcatcagtgactacaaatataaagatggttactgcaagcaacttggccaccatattggagcccggaacattgaagatgaccccaagatgatgtggtccatgcacgtagccaagatccagagtgacagggagtacaaaaaggactttgagaagtggaagaccaagttcagcagcccagtggacatgctgggggtggtgctggccaagaagtgccagaccttagtcagtgacgtggactataagaactacctgcacgagtggacatgcctgcctgaccagagcgatgtcatccatgctcggcaggcctatgacctccagagtgacaatatttacaagtcagatctccagtggctgagaggcattggctgggtccccattgggtctatggatgtggtcaagtgcaagagagctaccgaaatactgagtgataacatctaccgccagcctccggacaagctgaaatttaccagtgtgactgattctctagagcaggtgctggccaagaacaatgctctcaacatgaataagcgtttatacacagaggcctgggacaaagacaagactcaaattcacataatgcctgatacaccagagattatgttggcaaggcagaacaaaatcaactacagtgagactctatacaaacttgccaatgaagaagcaaaaaagaaaggctacgacttgcgaagtgacgccatccccatcgtggctgccaaggcctccagggacgttatcagtgattacaaatacaaagatggttaccgcaagcagctcggccaccacattggagcccggaacattgaagatgaccccaagatgatgtggtccatgcatgtggccaagatccagagtgacagggagtataagaaggactttgagaagtggaagaccaagttcagcagcccagtggacatgctgggagtggtgttagccaagaagtgccagaccttagtcagcgatgtggactacaagaactacctgcacgagtggacgtgcctgcccgaccagaatgatgtcatccatgctcggcaggcctatgacctccagagcgataacatttacaaatctgatctccagtggctgagaggcattggctgggtccccattgggtctatggatgtggtcaagtgcaagagagctgctgaaatactgagtgataacatctaccgccagcctccggacaagctgaaatttaccagtgtgactgactctctagagcaggtgctggccaagaacaatgctctcaatatgaacaagcgcttatacacagaagcctgggacaaagacaagacccaagtccatattatgcctgatacacctgaaatcatgttggcaagacaaaataaaataaattatagtgagagcctctatcgtcaggccatggaagaagccaagaaagaaggctatgacttgagaagtgatgccattcccattgtggctgccaaggcctctcgggatattgccagtgattacaaatacaaagaagcatatcgtaaacagttgggtcaccacattggcgcccgagcagtacacgatgaccccaagataatgtggtccctccacattgccaaagtgcagagtgaccgtgagtacaagaaagattttgagaaatacaagacaaggtacagcagcccagtggacatgcttggtatcgttttggccaagaagtgtcagaccttggtcagcgatgtggactataaacatcctctgcatgaatggatctgcctgcccgaccagaatgacatcattcatgcacggaaagcctatgacctccagagtgacaatttgtataagtcagaccttgaatggatgaaaggcattggctgggttccgattgattccttggaagttgttagggccaagagagctggagaattacttagtgatactatctaccgtcagcgtccagaaacgctgaaatttaccagtataacggacactccggagcaggtgctggcaaaaaacaatgctttaaacatgaataagcgcttatatactgaagcctgggacaatgacaagaaaactattcatgtcatgcctgatacaccagaaatcatgttagccaaactcaaccgaataaactacagtgataaactctataaacttgctttggaagagtccaagaaggaaggctatgacttgcgtctggatgccattccaatccaagcagccaaggcttcaagagatattgctagtgattacaagtacaaggaaggctaccgcaaacagcttggccaccatattggggcccggaacattaaggatgacccgaagatgatgtggtccatccatgtggccaagatccagagtgacagggagtacaagaaggagtttgagaagtggaagaccaagttcagcagcccagtggacatgctgggggtggtgctggccaagaagtgtcagatccttgtaagcgacatagactacaagcatcccctgcatgaatggacctgcctgcctgatcagaatgacgtcattcaggctcggaaggcctatgacctgcagagtgatgctatttacaaatctgatcttgagtggctgagaggcataggatgggttcccattggctctgtagaggtcgagaaagtgaagagagctggagaaatcctgagtgacaggaagtatcgccagcctgcagaccagctcaaattcacatgcattaccgacactccggaaattgtcctagcaaagaataatgccctgacaatgagcaagcatttatacacagaagcttgggatgctgacaaaacctccatccacgtgatgccagacaccccagatatcctgctggccaagagtaattctgccaatatcagccaaaaactttacaccaagggatgggatgaatcaaagatgaaggactatgatctgagagcagatgctatttccatcaaaagtgccaaggcctccagggacatcgccagtgactacaaatacaaggaagcctatgagaaacagaaaggccaccacattggagcccagagcattgaagatgatcccaagattatgtgtgccatacatgcaggaaaaattcaaagtgaaagggagtacaagaaggaattccaaaagtggaaaaccaagttctctagcccagtggacatgttaagcatcttgctggccaagaaatgtcagactttggtcactgacattgattatcgcaattacctgcatgaatggacatgcatgccggatcaaaacgacattatccaagcaaaaaaggcctatgacctgcagagtgatagtgtgtataaggcagacctggagtggctgcgtggcatcggctggatgccagaaggctcagtggaaatgaacagagtgaaggttgctcaagacctcgtgaatgaaagactctataggacacgtccagaagctttgtcattcaccagcattgtcgacactccagaagttgtcttggcaaaagccaattctctgcaaataagtgagaaactgtatcaggaagcctggaataaagataaaagcaacatcaccattccttctgatactccggagatgctgcaggcccacatcaatgccttgcaaatcagcaataaactctaccaaaaagactggaatgacgccaagcagaaaggctatgacataagggcagatgccattgaaatcaagcacgccaaggcctccagagaaattgccagtgagtacaaatacaaagaaggttaccgtaagcaactgggccaccacatgggtttccgcaccctacaagatgaccccaagtcagtatgggctatacatgctgccaagatccagagtgacagagaatataagaaagcttatgagaagtctaaaggaattcacaacacaccgttggacatgatgtcaattgttcaagccaagaaatgccaggtcctggttagcgacattgattatcgcaattatctgcaccagtggacgtgtctgccagatcagaacgatgtgatccaggccaagaaagcctacgacctgcagagcgataacttgtacaagtcagacctggaatggctgaagggtattggatggctgccagagggttctgtggaagtgatgagagtgaagaatgcccagaatctcttgaatgaaaggctgtatcgtataaagcctgaggccctcaaattcaccagcattgttgacaccccggaagtaatccaggcaaagatcaatgctgtacagatcagtgagccattgtatcgcgatgcctgggagaaagagaaggctaatgtgaacgtgccagctgacactcccctgatgctgcaatccaaaatcaatgccctgcagatcagcaataaacgctatcagcaagcttgggaagatgtcaagatgactggttatgacctgcgagcagatgccattgggatccagcatgccaaggcttccagggatattgccagtgactatctgtacaaaactgcttatgagaaacagaaaggccattacattggctgtcgcagcgccaaggaagaccctaaactggtttgggcagcaaatgtgttgaagatgcagaatgacaggctgtacaaaaaggcctacaacgaccacaaagccaagatctccatccctgtggacatggtgtccatcagcgctgccaaagaaggtcaggcactggcaagtgatgtggactatcgccattacctgcaccactggtcttgctttcccgaccagaatgatgtgatccaagccaggaaagcctacgacctacagagcgacagtgtgtataaggcagacctggagtggctgcgtggcatcggctggatgccagaaggctcagtggaaatgaacagagtgaaggttgctcaagacctcgtgaatgaaagactctataggacacgtccagaagctttgtcattcaccagcattgtcgacactccagaagttgtcttggcaaaagccaattctctgcaaataagtgagaaactgtatcaggaagcctggaataaagataaaagcaacatcaccattccttctgatactccggagatgctgcaggcccacatcaatgccttgcaaatcagcaataaactctaccaaaaagactggaatgacaccaagcagaaaggctatgacataagggcagatgccattgaaatcaagcacgccaaggcctccagagaaattgccagtgagtacaaatacaaagaaggttaccgtaagcaactgggccaccacatgggtttccgcaccctacaagatgaccccaagtcagtatgggctatacatgctgccaagatccagagtgacagagaatataagaaagcttatgagaagtctaaaggaattcacaacacaccgttggacatgatgtcaattgttcaagccaagaaatgccaggtcctggttagcgacattgattatcgcaattatctgcaccagtggacgtgtctgccagatcagaacgatgtgatccaggccaagaaagcctacgacctgcagagcgataacttgtacaagtcagacctggaatggctgaagggtattggatggttgccagagggttctgtggaagtgatgagagtgaagaatgcccagaatctcttgaatgaaaggctgtatcgtataaagcctgaggccctcaaattcaccagcattgttgacaccccggaagtaatccaggcaaagatcaatgctgtacagatcagtgagccattgtatcgcaatgcctgggagaaagagaaggctaatgtgaacgtgccagctgacactcccctgatgctgcaatccaaaatcaatgctctgcagatcagcaataaacgctatcagcaagcttgggaagatgtcaagatgactggttatgacctgcgagcagatgccattgggatccagcatgccaaggcttccagggatattgccagtgattatctgtacaaaactgcttatgagaaacagaaaggccattacattggctgtcgcagcgccaaggaagaccctaaactggtttgggcagcaaatgtgttgaagatgcagaatgacaggctgtacaaaaaggcctacaacgaccacaaagccaagatctccatccctgtggacatggtgtccatcagcgctgccaaagaaggtcaggcactggcaagtgatgtggactatcgccattacctgcaccactggtcttgctttcccgaccagaatgatgtgatccaagccaggaaagcctacgacctacagagcgacagtgtgtataaggcagacctggagtggctgcgtggcatcggctggatgccagaaggctcagtggaaatgaacagagtgaaggttgctcaagacctcgtgaatgaaagactctataggacacgtccagaagctttgtcattcaccagcattgtcgacactccagaagttgtcttggcaaaagccaattctctgcaaataagtgagaaactgtatcaggaagcctggaataaagataaaagcaacatcaccattccttctgatactccggagatgctgcaggcccacatcaatgccttgcaaatcagcaataaactctaccaaaaagactggaatgacaccaagcagaaaggctatgacataagggcagatgccattgaaatcaagcacgccaaggcctccagagaaattgccagtgagtacaaatacaaagaaggttaccgtaagcaactgggccaccacatgggtttccgcaccctacaagatgaccccaagtcagtatgggctatacatgctgccaagatccagagtgacagagaatataagaaagcttatgagaagtctaaaggaattcacaacacaccgttggacatgatgtcaattgttcaagccaagaaatgccaggtcctggttagcgacattgattatcgcaattatctgcaccagtggacgtgtctgccagatcagaacgatgtgatccaggccaagaaagcctacgacctgcagagcgataacttgtacaagtcagacctggaatggctgaagggtattggatggttgccagagggttctgtggaagtgatgagagtgaagaatgcccagaatctcttgaatgaaaggctgtatcgtataaagcctgaggccctcaaattcaccagcattgttgacaccccggaagtaatccaggcaaagatcaatgctgtacagatcagtgagccattgtatcgcgatgcctgggagaaagagaaggctaatgtgaacgtgccagctgacactcccctgatgctgcaatccaaaatcaatgccctgcagatcagcaataaacgctatcagcaagcttgggaagatgtcaagatgactggttatgacctgcgagcagatgccattgggatccagcatgccaaggcttccagggatattgccagtgactatctgtacaaaactgcttatgagaaacagaaaggccattacattggctgtcgcagcgccaaggaagaccctaaactggtttgggcagcaaatgtgttgaagatgcagaatgacaggctgtacaaaaaggcctacaacgaccacaaagccaagatctccatccctgtggacatggtgtccatcagcgctgccaaagaaggtcaggcactggcaagtgatgtggactatcgccattacctgcaccgctggtcttgctttcccgaccagaatgatgtgatccaagccaggaaagcctacgacctacagagcgacgccctctacaaggctgacttggagtggttgcgtggcattggctggatgccccaagggtctcctgaagtgttgagagtcaaaaacgcccagaatatcttttgtgacagtgtctatcggacgcctgtggtgaaccttaagtacacaagcattgttgacacacctgaagtggtccttgctaaatcaaatgctgaaaatattagtattccaaagtacagagaggtttgggacaaggataaaacttcaatacacataatgccagatactccagaaattaatctcgctagagcaaatgctcttaatgtgagcaataaactttaccgtgagggctgggatgaaatgaaggcgggctgtgatgtccggctggatgccatccccatccaggctgccaaggcctccagggagattgccagtgactataaatataagcttgaccatgagaagcagaagggacactacgtgggcaccctcacagccagggatgacaacaagatccgctgggccctcatagctgacaagctccagaatgaacgagagtaccggctggactgggccaaatggaaggccaagatccagagccctgtggacatgctttccatcctgcactctaaaaattcccaggctctggtcagtgacatggattaccgcaattacctgcaccagtggacctgcatgcccgaccagaacgatgtgattcaggccaagaaggcctacgaactgcagagcgataatgtttacaaggctgacttggaatggttgcgtggaattgggtggatgccaaatgactccgtgtccgtcaatcatgccaaacatgccgcggacatcttcagtgagaaaaaatatcgcacaaaaatagaaactctcaactttacgcctgtggatgacagagttgattatgtgacagcgaaacaaagtggcgagatcctcgatgatattaaataccggaaagactggaatgccaccaaatcaaagtacaccctcacagaaacccccctgctgcacactgcccaggaggctgctaggatactggaccagtatctctacaaggaaggctgggagagacaaaaagccacaggttacattttgcctccagatgctgtgccatttgttcatgcccatcactgcaatgacgttcagagtgagctgaaatacaaagctgaacatgtgaagcaaaaaggtcattatgttggtgtcccgacgatgagagatgatcctaagctggtttggtttgagcatgcaggccagattcagaatgagagactatacaaagaggactatcacaaaacaaaggccaaaatcaatatacctgctgatatggtgtcagtcttggccgccaagcaggggcagacccttgtcagtgatattgattatcgtaattacttgcaccaatggatgtgtcatcctgaccagaacgatgttattcaggcaagaaaggcctatgacctacagagtgataatgtctacagagctgacctggagtggctccgaggcattggctggatcccactggattctgtggaccatgtaagggttactaagaaccaggaaatgatgagtcagatcaaatataagaaaaatgcccttgaaaactatcctaactttagaagtgtggtggatcctccagagattgttttagccaagattaattctgtcaatcaaagtgatgtaaaatataaagaaacatttaataaagcaaagggcaaatatacgttttcaccagatacaccacatatctcccactccaaagacatgggaaaactctacagtactatactgtataaaggggcgtgggagggcaccaaggcctatggctacaccctggatgagcgctacattcccattgttggagccaagcatgctgatctggtgaacagtgagcttaaatacaaagagacatatgagaagcagaaaggtcactacctggctggaaaagtgatcggtgaattccctggtgtggttcactgtctggatttccaaaagatgaggagtgcgttgaactacagaaaacattatgaggataccaaagcaaatgttcatatccccaatgacatgatgaatcacgtgctggctaaaaggtgccagtacatcctcagtgacctggagtatcgacactatttccaccagtggacgtctcttctggaagaacccaatgttatacgcgtccgaaacgcccaggagatcttgagtgataatgtgtataaagatgacctgaattggttgaaaggcattggttgctacgtttgggatacaccccaaatcctccatgccaagaaatcatacgaccttcagagtcagctacaatatacagcagcaggtaaagaaaatctacaaaactataatctggtcacagacacgcccctctatgtgactgctgttcagagtggcattaatgccagtgaggtaaaatataaagaaaattatcatcagattaaggacaaatacacaacagttctagaaacagtggattatgacagaaccagaaacctgaagaatctttacagcagtaacctgtacaaggaggcctgggatagagtgaaagccaccagctacatcctgccttccagcaccttgtccctgacacacgccaagaaccagaagcatctggccagccatatcaaatatcgggaagaatatgaaaagttcaaagctctttatacgttaccaagaagtgttgacgatgatccgaacacagcacggtgcctccgagttggcaagcttaacatcgatcgcctgtacagatcagtttatgaaaagaacaagatgaaaatccacatcgtgcccgacatggtagagatggttactgccaaggattcccagaagaaagtcagtgagattgattaccgcctgcgcctccacgaatggatttgccaccccgacttgcaagtcaatgatcacgtcaggaaagtcacagatcagatcagcgatattgtatacaaggatgacctcaactggctgaaaggcattggttgctacgtctgggacactcctgaaatcctccatgccaagcatgcttatgatctacgtgatgatatcaagtataaagctcacatgttgaaaacaaggaatgactacaagcttgtcacagatacaccagtctacgtgcaggctgtcaaaagtgggaaacagctaagtgacgctgtctaccactatgactatgtgcacagtgtcagaggcaaagtggctccaactaccaaaaccgtggatctggaccgggcccttcatgcatacaagctccagagttcgaatctatacaaaaccagcctgcgcaccctgcccactggatatagacttccaggtgacactcctcacttcaaacacatcaaggacacccgttacatgagcagttatttcaagtacaaagaagcctatgaacacaccaaggcatatgggtatacacttggccccaaagatgttccatttgtccacgtccggagagtcaacaatgttaccagcgagagactgtatcgggaattgtaccacaaactgaaagacaagatccatacaactcccgatacccctgagatccgccaagtcaagaagacacaagaggctgtcagtgagttgatctacaaatcagacttcttcaagatgcagggccacatgatctctctgccatacacaccccaagtgatccattgccgctatgtgggagacatcaccagtgatattaaatacaaagaggacttgcaggtcctgaagggatttggctgcttcctgtatgacactcctgacatggtccgctcccggcacctgcggaagctctggtctaattacctatacactgataaggcaaggaagatgcgagacaaatacaaagtggtgcttgacactccagaatacagaaaagtgcaagaactgaagacacatctgagtgagctggtctacagagctgcaggcaagaagcagaagtcaatctttacttcagttcctgatactcctgatcttttaagagccaagcgagggcagaagcttcagagtcagtatctgtatgttgaacttgccaccaaagagagaccccatcatcacgctggaaaccagaccacagccttgaagcatgctaaagacgtgaaggacatggtcagtgagaaaaagtacaagattcaatatgaaaagatgaaagacaagtacactccggttccagatacgccaatcctcatcagagccaagagggcttactggaatgccagtgatctacgctacaaagaaacatttcaaaagaccaaagggaaataccacacggtgaaagatgccctagacattgtctatcatcgcaaagtcacagatgacatcagtaaaataaaatacaaggagaactacatgagccagttgggtatctggaggtccattcctgatcgtccagagcatttccaccaccgagcagtcactgacacagtcagtgatgtaaaatataaagaagacttgacttggcttaaaggcattggttgctatgcctatgatacccctgatttcactctggctgaaaagaacaagactctctacagcaagtataagtataaagaagtatttgaaaggacaaagtcagatttcaagtatgttgccgactctccgatcaataggcatttcaagtatgcaactcaattgatgaatgagagaaaatataaatctagtgccaagatgtttctgcaacatggatgtaatgaaattctgcgtccagatatgttgactgctctctacaattcgcatatgtggagccagatcaaatacaggaaaaactatgaaaaatcaaaggacaaatttacctcaattgtggatactccagaacacctgcgtactacaaaagtcaacaaacaaatcagcgatatcctttataaattggaatacaacaaggccaaacccagaggctacaccacaatccacgacacacccatgttgctgcatgtccgcaaggttaaagatgaagtcagtgatctgaaatacaaagaagtataccaaagaaataaatccaactgcaccattgagccagatgctgttcatatcaaagcagccaaggacgcctacaaagtcaacaccaatctggactataagaaacagtacgaagccaacaaagcccactggaagtggactcctgaccgaccggacttcctccaggctgccaagtcatccctgcagcaaagcgattttgaatataagctggaccgggagttcctcaagggttgcaagctttctgtcactgatgacaaaaacacggtgctcgccctcaggaatactttaatagaaagtgatctgaaatacaaagagaaacatgtcaaggaaagaggaacctgccatgccgtacctgacacgcctcagatcctgctggcgaagactgtcagcaacctggtgtctgagaacaagtacaaggaccatgtcaagaagcacttggcacagggctcatacacaacactaccagagacccgggacactgttcacgtcaaggaagtgaccaagcatgtcagtgatacaaattacaaaaagaagtttgtcaaggagaaaggaaaatccaactactccatcatgctggagccaccagaggtgaaacatgctatggaagtggccaagaagcaaagtgatgtcgcttacagaaaagatgccaaagagaacctgcattacaccacagtggctgatcgaccagacatcaagaaggccacacaggcagccaaacaggccagtgaggtggagtacagagccaagcaccgcaaggaaggcagccatggcttaagcatgctcggtcgcccagacatagaaatggccaagaaggcagccaagctgagcagccaggttaaataccgagaaaatttcgataaagaaaagggcaagacaccaaaatacaatccaaaagacagccagctctacaaagtcatgaaagatgctaataatcttgcaagtgaggttaaatacaaggctgacctgaagaaacttcacaaacccgtgactgacatgaaggagtctctgatcatgaatcatgtcctgaatacaagccaacttgccagttcttaccagtacaagaagaagtatgagaagagtaaaggccactaccacaccatacccgataatctggagcagcttcacctaaaagaggccacagaattacagagtatagtgaaatacaaagaaaagtatgaaaaggaacgaggaaaacccatgctggactttgaaacaccaacgtacatcactgccaaagagtctcagcagatgcagagtgggaaagaatataggaaagattatgaagagtccattaaaggcagaaacctgactggcctggaggtcacgccagctttgttacatgtcaaatatgcaactaaaatagcaagcgagaaagagtacaggaaagatctagaggaaagcatccgtgggaagggcctcactgaaatggaagatacacctgacatgctaagagcaaagaatgccactcaaatcctcaatgagaaagaatataagcgagacctggaactggaagtcaaaggaagaggcctgaatgccatggccaatgaaactccggattttatgagggccaggaatgctactgatattgccagtcagattaagtataagcaatcagcagaaatggagaaagccaatttcacttctgtggttgatactccagagatcattcatgcccaacaagtcaagaatctttcaagccagaaaaagtacaaggaagatgctgagaagtccatgtcgtattatgagactgttttggacaccccagagatacagagagtccgggagaaccaaaagaacttcagccttctccaataccagtgtgaccttaaaaacagtaaaggaaaaattacagttgttcaagacacgccagaaatactgcgtgtaaaagaaaatcagaagaatttcagctcggttttatataaagaggatgtctcaccaggaacggctatcggaaagacacctgagatgatgagagtgaaacaaacacaggaccacattagctcggtgaagtataaggaagcaataggacaaggaactccaatccctgacctgcctgaagtgaaacgtgtgaaggagacgcagaagcacattagctcggttatgtacaaagaaaacttgggaacaggcattccaaccactgtgactccagagattgagagagtcaaacgcaatcaagagaactttagctcggttttgtacaaagaaaatttggggaaaggaatcccaacacctatcactccagagatggagagagtcaaacgcaatcaagagaactttagctcgatattgtacaaagagaacttgagcaaggggactcccctacctgtcactcctgagatggagcgagtcaaactcaatcaagaaaactttagctcggtgttgtataaagaaaacgttggaaaagggattccaatccccatcactccagagatggagagagtcaaacacaatcaagaaaactttagttcggtgctatacaaagaaaacctggggacaggaattccaatccccatcactcctgagatgcagagagtcaaacacaatcaagaaaaccttagctcggtgttatacaaagaaaacatgggcaagggaacccctttacctgtcactcccgagatggaaagagtcaaacacaatcaagaaaatattagctcggtgttatacaaagaaaacatgggcaagggaacccctctacctgtcactcctgagatggagagagtcaaacacaatcaagaaaatattagctcggtgttatacaaagaaaacatgggcaagggaactcctttagctgtcactcccgagatggagcgagtcaaacacaatcaagaaaatattagctcggttttgtacaaagaaaatgtggggaaagccaccgcaacccctgtcactcctgagatgcagagagtcaaacgcaatcaagaaaacattagctcggtgttatacaaagagaacctggggaaagcaacccccacaccctttactcctgagatggaaagagtgaaacgcaatcaagaaaactttagctcggtattgtacaaagagaacatgagaaaagcaactccgacacctgttactccagagatggagagagctaagcgcaaccaagaaaacattagctcggttctttattctgatagtttccggaaacaaatacaaggcaaagctgcctatgtattggatacccccgagatgagacgggtgagggagacccaacggcacatctcaacggtgaaatatcatgaagactttgagaaacacaagggttgcttcacaccagtggtgacagatcctatcactgaacgagtaaagaagaacatgcaggacttcagtgacattaactaccgaggtattcagaggaaagtggtagaaatggaacaaaaacggaatgaccaagatcaggagactattacaggtttacgtgtctggcgtactaatcctggttcggtttttgactatgatccagcagaagacaacatccagtcccgaagcttacacatgattaatgtccaagctcagcgccggagccgggagcagtcacgatctgccagtgcactaagcatcagtgggggtgaggagaagtctgagcattcagaagcaccagaccaccacctttcgacttacagcgacgggggtgtctttgcagtctcaacagcttacaaacatgcaaaaaccacagagctcccacaacaacgatcatcttcagttgctacccaacagacaacggtatcttccatcccatctcatccatctactgctggaaaaatcttccgtgccatgtatgactatatggctgctgatgcagatgaggtgtccttcaaggatggagatgccatcataaatgttcaagcaattgatgaaggctggatgtatggcactgtgcagaggactggcaggaccggaatgctcccagccaactacgttgaagctatttaggcatttcaaagcatcacacttgtctgcaggacttacagatcctgcagtcaatgtttcggtttagactctccactgttacctaagttctcaagctgcctatggtttttctgtgtcaatgtgatttatggtagtaccatcctttctcctttgggttttaaaataagttgcagaacagacactttaaaagcttctgcaatattatttctgtgcctagagtctttctccattataaacatgttttaacattatttcttttctaaaacagggattttgaatatgccaaacacattaaaggaaaaatagcagagatgttcaccttttccttgctgattgctaatgcttattatttctaattcagttctgaagttataaacttataatcaatacaaaccagcaactaataaaacctctaattctgcaa

SEQ ID NO: 62991 - DNA, 25578 bp, Artificial Sequence
  derived and/or modified sequence
atggcggacgacgaggattacgaggaggttgtggagtactacaccgaggaggtggtgtacgaggaagtgcctggcgagacgataacaaagatttatgaaaccacaaccacacgcacctcagactatgaacagtcagagacatcaaaacctgcgttggcccagcccgctcttgctcagccagccagcgccaaaccggtggagagaagaaaagtgattcggaagaaagtggacccctctaaatttatgacaccctacatcgcgcattcacagaaaatgcaagatctgttctctccgaataaatacaaagaaaagtttgaaaagaccaaaggccaaccctacgcctctactacagatacccccgagctccgccgtattaagaaagtccaagaccagctgtctgaagtgaaatatagaatggacggcgacgtggccaaaactatttgtcacgtggacgagaaagcaaaagacatcgagcatgccaagaaagtttctcagcaggtatcaaaagtactgtataagcaaaactgggaggatacaaaagataagtaccttctgcctcctgacgcgcctgagctggttcaggctgtgaaaaatactgcaatgtttagcaagaaactgtacacagaagactgggaggctgacaagagcttgttttacccttataatgactcccccgagctaaggcgggtagcacaagcccaaaaggctctgtctgatgttgcctataagaagggcctggccgaacagcaggcacagttcaccccacttgcggacccccctgacatcgagttcgcaaaaaaagttacaaatcaagttagtaaacagaaatacaaagaggactatgagaacaaaattaagggcaagtggagcgagaccccctgcttcgaggtggccaacgctagaatgaacgctgataatatctccaccagaaagtaccaggaagattttgaaaatatgaaagatcagatatattttatgcagacggaaactcccgagtacaagatgaataagaaagctggcgtcgccgctagcaaagtgaaatataaggaggattacgagaagaacaagggcaaggctgactacaacgtcctgccagctagcgaaaacccacagctaaggcaactgaaagccgccggagatgcccttagcgataaattatacaaggagaactatgagaagacgaaggccaaatcaattaattactgcgagacacccaagttcaagctcgacactgtgctgcaaaacttttcgagtgacaagaaatataaagactcctatctgaaagatattctggggcactacgtggggtctttcgaggacccatatcattcacattgcatgaaagtgactgctcagaatagcgacaaaaattacaaagctgagtacgaggaggataggggtaaaggattcttccctcaaaccatcactcaggaatacgaggccattaagaagctcgatcagtgcaaggatcatacgtataaagtacaccccgacaagaccaaattcacacaggtgactgattcaccagtgctgctccaagcacaggtcaacagtaaacagctgtccgaccttaactacaaagctaagcatgaatctgagaagttcaagtgtcatatacctccagatacaccggcattcattcagcacaaagtaaacgcctataacttgagtgacaatctatataaacaggactgggaaaaatctaaggccaagaagtttgatattaaggtagatgcaatcccccttcttgctgccaaagccaatacaaaaaacacctccgacgtgatgtataaaaaagattatgagaaaaacaaggggaagatgatcggagtgctgagcatcaacgatgaccctaaaatgctccactctttgaaagtcgccaagaaccaatcggacaggctgtacaaggagaactacgagaaaacgaaagcaaagtctatgaattattgtgagacccccaaataccaactggatacacagctgaagaacttctccgaagctcgctacaaggatttgtacgtaaaagacgttctgggacactacgtcggcagtatggaggatccctatcacacacattgtatgaaggtcgcggctcagaacagtgacaagtcatacaaggcggaatacgaggaggataaaggcaagtgctacttccctcagactattacacaggaatatgaggccattaaaaagctcgaccagtgcaaggaccacacttacaaagttcacccagataaaaccaaatttaccgcagtgactgatagccccgtgctgcttcaggctcaattgaacacgaagcaactgagcgacctgaattataaagcaaaacatgagggtgagaagtttaagtgccacattcccgccgatgccccccagttcattcagcatagagtgaacgcttataatctctcagataatgtgtacaagcaggattgggagaaaagcaaagctaagaagttcgacatcaaagttgatgcaattccactcctggctgcaaaagccaacacaaaaaatacatccgacgtgatgtacaaaaaggattacgagaaatctaagggtaaaatgatcggcgccctctcaattaacgatgaccccaagatgttgcattctctgaaaactgccaagaaccagtcagacagagagtatcggaaagactacgagaagtcaaagaccatttataccgcccccctcgacatgctgcaggtcacacaggctaagaaatcccaggccatcgctagtgatgtggactataaacacattctccacagttactcttatccacccgactcaattaacgtcgatctggcaaaaaaggcctacgctttacaatccgacgtggagtataaggccgactacaactcgtggatgaaagggtgtggatgggtccccttcggttctctggagatggaaaaagcaaagagagcttccgatatcttgaatgagaaaaagtaccgtcagcatccagacaccctcaagttcacatctattgaagacgcccccatcacagtgcagagcaaaatcaaccaggcgcagagatccgacatcgcctataaggccaaaggggaggagatcatccacaaatataacctgccacctgacctgcctcaatttatccaggccaaggtcaatgcctataatatttccgaaaatatgtataaggccgatctcaaagatctctcaaagaaagggtacgacctcaggacggatgctatccccatccgagccgccaaggcagcgaggcaggcagcatctgatgtgcagtataaaaaggactatgagaaggctaagggaaaaatggtgggatttcagtcactgcaggacgatcccaagcttgttcattacatgaacgtggctaagatccagtctgaccgcgagtataagaaggattacgagaagacaaagagcaagtacaatacccctcacgacatgtttaatgtcgtggctgccaagaaggcccaggacgtggtctctaacgtaaattataagcactccctgcaccactacacatacctgccagatgctatggaccttgagctttcaaaaaatatgatgcagatacagtccgacaatgtgtacaaagaggactacaataattggatgaagggaattggatggatcccaattggatcgctggatgtcgagaaggtgaagaaagcgggcgatgctctcaacgaaaagaaatatcgacaacatcccgatacacttaagttcacatcaatcgtggacagccctgtaatggtgcaggctaaacagaacaccaaacaggtgagtgacattttatacaaggccaagggagaagacgtgaagcacaagtatactatgtcccctgacttgccgcaatttcttcaggcaaagtgtaacgcgtacaacatatctgatgtgtgctacaagagggattggtacgacctgattgccaaaggaaacaacgtcttgggagatgccataccaatcacagctgccaaagcctcaaggaatatagcatccgactacaaatacaaggaagcttatgaaaagagtaaaggaaagcacgtgggttttcgctcacttcaggatgaccccaagctggtacattatatgaacgtggccaaattgcagagtgaccgggagtataagaaaaactatgaaaacactaagacatcctaccatacacctggcgacatggtgagcattactgcagctaagatggcccaagatgtggcaactaatgtgaattacaagcagcctctccatcattatacctatcttccagatgcaatgagtttagaacatacccgcaatgttaatcagatccaaagtgacaacgtgtacaaggatgagtacaattccttcctgaagggaattggatggatcccgatcggcagcctggaagtggaaaaagttaagaaagcgggtgatgctctgaatgaacgtaagtaccggcagcatccagataccgtgaaattcacttccgtacctgacagcatgggcatggtcctcgcccagcataatactaagcagctcagcgatctgaattacaaagtggaaggggagaaactcaagcacaaatatacaattgaccccgaactgccccagttcattcaggccaaagtcaatgccctcaacatgtccgacgctcattacaaagcggattggaagaaaactatcgctaaggggtacgatctgaggcctgatgccatccctatagtggccgctaagtccagcaggaatattgcatctgattgtaagtacaaagaggcttacgagaaggctaaaggaaaacaagtaggatttctgtctctacaggacgacccaaaactggtccattacatgaacgttgcgaaaatccagagtgaccgggaatataaaaaggggtacgaggcttctaaaactaaatatcataccccacttgacatggtgagtgtaactgctgctaagaagagccaggaagttgcaacaaatgccaactatcgccagagctatcaccattacacactccttcccgacgccctgaatgttgagcattcaagaaacgccatgcaaattcaatctgacaatctttacaaatccgactttacgaattggatgaaaggaatcggctgggtgcccattgaaagcctggaggtcgagaaagccaaaaaggctggagaaattctgagcgagaagaagtaccgacagcaccctgagaaactgaagtttacatacgccatggataccatggagcaagctttaaacaaatcaaacaagctcaacatggataaacggctttacacggagaagtggaataaggataaaaccactattcatgtgatgcccgacaccccagacatcctgctgtccagggtcaaccagataactatgagtgacaagctttacaaagccggctgggaggaggagaagaagaaaggctacgatttaaggcctgacgccatcgcaataaaagcagcacgcgcctctagagacatcgcctccgactacaagtacaagaaagcctatgagcaggcaaaaggaaagcatatcggctttagatccttggaggacgatccaaaactggtgcacttcatgcaggttgcaaagatgcagtctgacagagaatacaaaaaaggatatgaaaagagcaagactagttttcacacgcccgtcgacatgctgtctgtggtagccgccaaaaagtcccaagaggtggcaacgaacgccaattaccgcaatgttattcatacgtacaatatgctccccgacgccatgagttttgaactcgccaaaaacatgatgcagattcagtcagataaccagtataaagcagactacgcggactttatgaaggggattggatggttaccactcggcagcctggaggcggaaaagaacaaaaaggcaatggagataatctccgagaagaagtatcggcagcaccccgatactctaaaatactcaaccttgatggactctatgaatatggtgctggctcagaacaacgccaaaatcatgaacgagcatctgtacaagcaggcctgggaagctgataaaaccaaagtacacattatgcctgacatccctcagatcatactggccaaagcaaatgccatcaacatgagcgataagctttacaaattatctctcgaagagagcaagaagaagggatatgacttacgccctgacgccatccctatcaaggctgcaaaggcaagcagggacatcgcatctgattacaagtataagtacaattatgaaaaggggaagggtaaaatggtggggtttaggagtctggaagacgatcccaaactggtgcatagcatgcaggtagctaagatgcagagtgaccgcgagtacaagaaaaattatgaaaacaccaagacaagctaccatacccctgccgatatgctcagtgtcaccgctgctaaggacgctcaggcgaatataaccaatacgaattataaacaccttatacacaaatatatcctcttgcctgatgccatgaatattgagctgaccagaaatatgaaccgcatccagtccgacaatgaatacaagcaggactataacgagtggtacaagggtcttggatggtcacctgcgggatccttggaggtggagaaggctaaaaaggccacggagtacgcgagcgatcagaagtacaggcaacacccctcaaatttccagttcaagaaattgacagactcaatggacatggtgctcgcgaagcaaaatgctcacaccatgaacaagcacctctacacgatcgattggaataaagacaaaaccaagatccacgtgatgcctgatacccccgatatcttacaggccaaacagaatcagaccctctatagtcagaaactgtataaactgggctgggaggaagcactcaaaaagggttatgacttacccgtagatgccatttccgtgcaattggccaaggcaagccgcgacatagccagcgactacaagtataaacagggctaccgaaagcagctcggacaccatgtaggttttcgctcactccaggatgatcctaaactcgttctcagcatgaacgttgcaaagatgcaatctgaacgggaatacaagaaggattttgagaaatggaagaccaaattctcaagcccggtcgatatgttgggggtggtcctggcaaagaaatgtcaggaactagtgagtgatgtagattataagaattacctgcatcagtggacgtgcctgcctgaccagaatgatgtggtccaggccaagaaggtgtacgagcttcaaagtgaaaacctgtacaagtccgacttggagtggttgcgaggcatcggttggagccctctgggatccttggaggctgagaaaaataagcgcgcatctgagatcatcagcgagaagaagtaccggcagccaccagacaggaacaaatttacaagtatcccagacgctatggacatagtgcttgccaagacaaacgctaagaataggtcagatcgcctctaccgtgaagcgtgggacaaggataaaacgcaaatccacattatgcccgatactcccgacattgtgcttgccaaggctaaccttatcaacacttctgacaagctctatcggatgggttacgaagagctgaagcggaaaggttatgatctgcctgtagatgcaatcccgattaaagctgcgaaggcgtcccgggagattgcttccgaatacaaatataaggagggtttcagaaaacagctcgggcatcatattggggcaaggaatatcgaggatgatcccaaaatgatgtggtcaatgcacgtcgctaagattcagagcgatagagaatataagaaagacttcgaaaaatggaagaccaagtttagttccccggttgacatgctgggagtggttctggcaaaaaaatgccagacccttgttagcgatgtggactataaaaactatttgcaccagtggacttgcctccccgaccagagtgatgttatccacgcaaggcaggcttacgacttgcagagcgataacctgtataaaagcgacttgcaatggttgaagggcatcggatggatgacctccggatcccttgaagatgaaaagaataagcgggcaacccagatcttgagtgatcatgtctatcgccagcaccctgatcaattcaaattcagttccctcatggacagtatccctatggtattggccaagaacaatgctatcactatgaatcacagattgtacaccgaagcctgggacaaggacaaaactaccgtccatatcatgcccgacacacctgaggtattgttggctaagcagaataaggtcaactattcggagaaattgtataagcttgggttggaagaggcgaagagaaaaggttacgacatgagagttgatgcaatcccgatcaaagccgcaaaagctagccgggacattgcttccgagtttaaatacaaagaaggctaccgaaaacagctcgggcatcacattggcgccagagccattcgggacgaccccaagatgatgtggagcatgcatgtagccaagatccagagtgatcgcgaatataagaaagattttgagaagtggaagacaaagttcagctctcctgttgatatgcttggagtcgtgctggccaagaaatgtcagacgctcgtgtcagacgtggattacaagaactacctgcaccagtggacctgtctgccagatcagtctgatgtcatccatgcgaggcaagcctacgatctgcagtcggacaacatgtacaagagcgacctgcagtggatgcgcgggattggttgggtaagcatcggatctctggacgtcgagaaatgtaagagagctacggagattctgtccgataagatttaccggcagcccccggacaggttcaagttcactagcgtgaccgacagcctggagcaggtgttagccaaaaataatgcaatcacaatgaataagcgactctacaccgaggcatgggacaaggacaaaactcagatccatatcatgcccgataccccagagatcatgctggctagaatgaataaaattaactactcagaatccttatataagctggcgaacgaggaagccaaaaaaaagggctatgaccttaggtcagacgcaattcccattgtcgcggcaaaggcaagccgagacatcataagcgactacaagtataaggatggctattgcaagcaattgggccaccacattggcgcccgtaacattgaggacgaccccaagatgatgtggtccatgcatgttgcaaagattcagagcgatagagagtataaaaaagatttcgagaagtggaagacaaaatttagttcacccgtggacatgttaggagtcgtattggcaaagaaatgtcagaccctggtctctgatgtcgattacaaaaattaccttcacgaatggacttgcctgcctgaccagtcagatgttattcacgcaagacaagcttacgatctgcagtcagacaacatctacaaatctgacctgcaatggctgaggggtataggatgggtgcctatcggtagcatggatgtcgtgaaatgtaaaagggccaccgaaatcctgagtgacaacatctatagacagcctccggataagctcaaattcaccagcgtgaccgacagcctggagcaggttctggctaagaacaatgcattgaatatgaacaaacgtctctatactgaggcatgggacaaagataaaacccaaatacacattatgcctgacacacctgagatcatgctcgcacggcagaacaaaatcaattactcagagacactgtataaactagcgaatgaggaggcaaagaagaagggctacgatctgaggtctgatgccattcccatagtcgccgcaaaggcctctcgcgacgtgatttccgattataagtacaaggacggatacaggaaacagttgggccaccatattggcgcccgcaatatcgaagacgatcctaagatgatgtggtctatgcatgtcgcaaagatacaaagcgatcgggagtataagaaggacttcgagaagtggaagactaagttcagttctcccgtggatatgttgggagtcgtcttggccaaaaaatgccaaacactcgtctcagatgtggactataagaactatctccacgagtggacctgcctgccagatcaaaacgacgtcatacacgcacggcaggcctacgatctacagtctgataacatttacaaatcggatttacagtggcttcggggcatcggctgggtgcccattggaagcatggatgtggtcaaatgcaaacgggccgcggagattttgagcgataacatttacaggcaaccacccgacaagctaaaattcaccagtgtcaccgattcacttgaacaggttcttgctaagaataacgccctcaacatgaataaacgcctgtatactgaggcctgggacaaagataaaacacaagtacacattatgccggatacacccgagattatgcttgcaaggcaaaacaagattaactacagtgagtctctctaccgccaggccatggaggaggctaagaaagagggatatgatctgagatctgatgccatcccaattgttgccgcaaaagctagccgcgacattgcatcggattataagtataaggaagcctaccgcaaacagctgggccaccacattggggccagagccgtgcacgatgatcctaagatcatgtggtccctgcatattgctaaagtgcagtcagacagagaatataagaaggacttcgaaaagtataagacccgttactcctctcctgtcgacatgctggggattgtgttggccaaaaagtgccagacactggttagtgatgtggattataaacaccctctgcacgaatggatttgcctgcccgaccaaaacgacattattcacgctcggaaggcctatgatctccaaagcgacaacctctacaagagtgatctggaatggatgaagggaatcggttgggtgccgattgattctcttgaagtagtaagggccaaaagagcaggtgaactgctgagcgatactatttatcgccagaggcctgagaccttaaagttcacttccatcaccgacaccccagaacaagtgctggccaaaaataacgctctgaacatgaacaaaagattgtacacggaggcctgggataacgacaagaaaaccatccacgtgatgccagatacacccgagattatgctggccaagttaaaccgaataaattactccgataaactgtataaactagctcttgaagaaagcaaaaaagaagggtatgatttacggcttgacgcaattcccattcaggctgcaaaggcctctcgggatattgccagcgactataagtacaaagaagggtacagaaagcaattgggacatcatatcggggcacgcaacattaaagatgatcctaagatgatgtggagtatccacgtagcaaagatacagagcgacagggagtataagaaggagtttgagaagtggaagacaaagttttctagtccagtggacatgctcggtgtcgtactggcaaagaaatgccagatcctcgtgtctgatatcgattacaagcatccgctccacgagtggacgtgcctgcccgatcagaatgatgtgattcaggccagaaaggcgtatgacttacaatctgacgcaatctacaagagcgatttagagtggctgcgagggattggatgggtccctatcggctctgtcgaggtcgagaaggtcaagcgggcaggagagattttatcggaccgcaagtacaggcagcctgcagaccaactcaaattcacttgcatcactgataccccagagattgtgctggctaaaaataatgcgctgaccatgtcaaagcatctatacaccgaagcatgggacgcagataaaacaagtatacatgtgatgcccgataccccggatatcctgttggccaaaagcaattcagccaacatttcccagaaattatacacaaaaggctgggacgaatcaaagatgaaggattatgacctgagggcagacgccatctccattaagagcgctaaagctagcagggacattgcctcagattataagtacaaagaggcctacgagaagcagaaaggccatcacatcggcgcccaatccattgaagatgatccaaagatcatgtgcgctatccacgccggcaagatacagtccgaaagagaatacaaaaaggagtttcagaagtggaagacaaagttttccagccccgtagatatgctgtcaatcctgctggccaaaaaatgtcagaccctggtcactgatattgactatcgcaactatctgcacgaatggacgtgcatgccagaccagaatgacatcatccaggctaagaaagcctacgatctccagtcagactctgtgtacaaggctgacctcgagtggcttcggggaataggctggatgcctgaagggtctgtggaaatgaatcgcgtcaaggtagctcaagacctggttaatgaacgcctgtacagaactcgccctgaggccctctcttttaccagcatcgtggatacgcccgaagtagtcctagccaaggccaattctctccagatcagtgaaaaactgtatcaggaagcgtggaacaaagataagagcaacatcacgatcccgagtgatacgccagaaatgctgcaggcccatatcaacgccctgcagatttcgaacaagttatatcagaaagactggaatgacgctaagcagaaagggtatgacatcagagccgatgccatcgagattaagcatgcgaaggcttcccgagagattgcctcggagtacaagtataaagagggctataggaagcaacttggtcaccacatgggatttagaactctccaggatgatccgaaaagtgtgtgggcaatccatgcagctaaaatacagagcgaccgagagtacaaaaaggcatatgagaaatcaaagggtattcataatacaccactggatatgatgtcaattgtgcaggcgaaaaaatgccaagtcctggttagcgacatcgactatcgcaattacttgcaccaatggacatgtctgccagaccaaaacgacgtgatccaggccaaaaaggcctatgatctccagtctgataatctgtacaagtccgacctggaatggctcaagggaataggatggttgcctgagggctccgtcgaggtgatgcgcgttaagaatgcccagaacctcctgaacgaaagactctaccgcatcaagccagaggcactgaaatttacatccattgtcgacactccagaagtgatccaagccaagatcaatgctgttcaaatctcagaaccactctatagggatgcttgggagaaggaaaaagctaatgtgaacgtacccgccgatacgccgctgatgctgcagagcaagatcaacgcccttcaaatttcaaataagcgatatcagcaagcctgggaggacgtaaagatgaccgggtacgatctgcgggccgacgctatcggcatccagcacgccaaagcatcaagagatatcgcctcagactacctatataagacagcctacgagaaacagaaaggtcattatatcggatgccgctccgcaaaggaagatcccaagctagtctgggcggccaacgtcctaaaaatgcagaacgatagactatacaaaaaggcctacaatgatcacaaggccaaaatttcaattccggtagatatggtgtcaataagtgcagctaaagaaggtcaggccctggccagcgacgtcgactacaggcattacttgcaccactggtcctgcttcccggatcagaacgatgtaatccaggcacgcaaggcctacgatctccagtctgatagcgtgtataaagccgatctggagtggctgagagggatcgggtggatgcctgaagggtctgtggaaatgaacagagtcaaagtcgcacaggatctggttaatgaacggctatatcggacacgacccgaggccctgagcttcacgagtatcgtggacacgcctgaagtcgtgctcgctaaggccaattccctgcagattagcgagaagctctatcaagaagcttggaataaggacaaaagcaatattacaatcccttcagacacaccagagatgctgcaagcccacatcaacgccctccagattagtaataagctctaccagaaggactggaacgataccaaacaaaagggatacgatataagggccgatgctatcgagataaagcacgctaaagctagccgggaaatcgcctcagagtacaagtacaaagaggggtaccggaagcagctcggacaccacatggggttcaggacactccaggacgacccaaagtccgtgtgggccatccacgcggccaagatccaatctgaccgggagtacaaaaaggcttacgagaagtctaagggaatccacaacacacctttggatatgatgagtatcgtacaggcgaagaaatgccaagtactagtctccgacatcgattatcgcaactacctgcaccagtggacctgcctgcccgatcagaatgacgtcattcaggctaagaaggcctacgacctgcagtctgataatctttacaaatccgacctagaatggttgaaaggcattggctggctgcctgagggatcagtggaggtcatgcgtgtcaagaacgcccagaatttgcttaacgagaggttgtatcgcatcaaaccggaggcattaaagtttacttccatcgtggatactccagaggtgattcaggctaagattaatgccgtgcagatcagtgaacctttgtatcggaatgcttgggaaaaggaaaaggcaaatgttaatgtgcctgctgacacaccactgatgctacagagcaaaattaatgccttgcagatcagtaataagaggtaccagcaggcttgggaggacgtgaagatgaccggatacgacctgcgtgcagacgcaattggcatccagcacgcaaaagccagtagagacatcgcaagtgactatttatataagacagcctacgaaaagcagaagggacattacatcgggtgccgcagcgcaaaggaagaccccaaattggtatgggccgccaatgtactgaagatgcagaatgatcggttatataagaaagcatataatgaccataaagcaaagattagcatacccgtcgatatggtgagcatctccgccgctaaggagggtcaggctttggcttctgacgtagattatcgccattacctacaccattggtcctgctttccagatcagaacgacgtgatccaggcccgaaaagcatatgatcttcagtcggattctgtatacaaagccgatttggagtggttgagaggcataggctggatgcccgagggctcggtggaaatgaatcgcgtaaaggtggcgcaagacttggtcaacgagcgcctgtacaggacacgcccggaagcactgtctttcacaagcattgtagacacacccgaggtggtgctggccaaagctaatagtttgcagatttctgagaagttgtaccaggaagcatggaacaaagacaagagcaatatcacaattccctccgatacgccagagatgctgcaggcacacatcaacgccctgcaaatctcgaataagctgtaccagaaagattggaacgacaccaaacagaaaggctacgacattagggcagacgctatcgaaattaaacacgcaaaggcctcacgggaaatcgctagcgagtataagtacaaagaagggtaccgcaaacagctgggccaccatatgggattccgcaccctgcaggatgatcccaagagcgtctgggcaatccatgctgctaaaattcagtccgatcgggagtataaaaaagcttacgaaaaatccaaaggcatacacaatactcccctcgacatgatgagcatcgtacaagccaagaagtgtcaagtgttagttagcgatatagattatcgcaactatctccaccagtggacctgcctgcccgatcagaacgacgtgatccaagccaaaaaagcctatgatttacaaagcgataacctatataagtccgatcttgaatggctgaagggcatcggctggctccctgagggcagcgtcgaggtgatgagggttaaaaacgctcaaaacctgctcaatgagcggctgtacaggattaagcctgaggctttaaaattcacttcaattgtggacacacctgaagtaatacaagctaagatcaacgccgtgcagatcagtgagccgctgtatcgcgatgcctgggaaaaggaaaaggccaacgtgaacgtccccgcagatacgcccctcatgctgcagagtaagattaatgcactgcagatctctaataagagataccagcaggcatgggaagatgtgaaaatgaccggatacgatctgcgggccgacgctattggcatccagcacgcaaaggcctctcgcgacatcgccagcgactacttatataagactgcctacgaaaaacagaaggggcattatatagggtgccgttcggctaaggaggatccgaagctcgtatgggccgcaaatgtgcttaagatgcagaacgatagactctataagaaggcctataacgatcacaaagccaaaatctctatccccgtggacatggtgtccatctccgctgctaaagagggacaggccctggcatctgacgtggattatagacactacctacataggtggagctgtttccctgaccagaacgatgtgatccaagcacggaaggcttacgacttacagtcagacgcactgtataaagccgatcttgagtggttgcgcggaatcggttggatgccgcagggctcccctgaggtccttcgagtgaagaacgcacagaacattttctgtgacagtgtataccgcactcccgtagtgaatctgaagtacaccagcatcgttgacacgccggaggtagtgctggctaaaagtaatgcagagaacatcagcatccctaagtaccgtgaggtatgggacaaggacaagacctcgattcatatcatgcccgatacgccggaaatcaacctcgctcgcgctaacgctctcaacgtcagcaataagctgtaccgggaagggtgggacgagatgaaagcaggatgtgatgtccgcttggatgccatacccatccaggcagctaaagcttcccgtgagatcgcctctgactacaaatataaattggatcacgagaagcagaagggccactacgtgggtaccctgacggccagggacgacaacaagatccgctgggcccttattgccgacaagcttcagaacgagcgtgagtaccggctcgattgggcaaaatggaaagcaaaaattcaaagccctgtcgacatgctgagcatcctgcactctaaaaatagtcaagcactggtcagcgatatggattatcggaattatctgcatcagtggacatgcatgcctgatcaaaatgacgtgatacaggccaagaaggcctacgaactgcaatccgataacgtctacaaggctgacctcgagtggctccgcggaatcgggtggatgcctaatgatagcgtgtccgtgaaccacgctaaacacgccgcagatattttcagtgaaaaaaagtataggacaaagattgagaccctaaactttacacccgtcgatgaccgggtagactacgtgactgccaagcagtccggagaaatcctggatgacataaaatatcggaaagactggaacgcaactaagtctaaatacactctgaccgagacccccctcctccacactgcccaggaggcggcccgaatcctggaccagtatctctataaggaaggctgggaaagacagaaagcgacggggtacatcctgccacctgacgctgtccctttcgtgcacgcccaccactgcaatgacgtccaatctgaattgaaatataaagccgagcacgtgaagcaaaagggccattacgtgggcgtccccacaatgcgggatgatccaaagctcgtatggttcgaacacgcaggccagatacagaatgaacgtctatataaggaagactaccacaagaccaaagcgaaaattaacattccggctgatatggtgtccgtgcttgccgctaaacaggggcaaactctggtttccgacattgattaccgaaactacttgcatcagtggatgtgccacccagatcaaaatgatgtgatccaggcgcggaaggcctatgatctgcagtctgataatgtgtacagagccgatctggagtggctgagggggatcggctggattcccctggattcagtagatcacgtgagagtgacaaaaaaccaagaaatgatgtcacagattaaatacaagaaaaacgctttggaaaattaccccaactttcgctcggtggtggacccgcctgagatagttctggctaagatcaattccgttaaccagagcgatgtcaagtataaggagacatttaacaaggctaagggaaaatataccttctctccagacacaccacacatttctcactcaaaggacatgggcaaactgtatagcactattttgtacaaaggagcctgggaaggcacgaaggcctatggatacaccctggatgaaaggtatatccctatcgtgggggccaaacacgcagatctcgtaaactctgaattaaagtataaagaaacctatgagaaacagaaggggcattacctcgcagggaaagtcatcggcgagtttccgggcgtggttcattgcctggacttccagaaaatgcgaagcgcattgaactaccgcaagcattatgaggacacaaaggctaacgttcatatccccaacgacatgatgaaccatgtcctagcaaaaagatgtcagtacattctaagcgatctggagtataggcactatttccatcagtggaccagcctcctggaagagccgaatgtgattcgagtccggaacgcgcaggaaattctctcagataatgtctataaggacgatctcaactggctaaagggtataggctgctatgtgtgggacaccccgcagatccttcacgctaagaaatcttacgatcttcagtctcagttgcagtacacagctgccggcaaagagaatctgcagaattataatctcgtgacagacactccgctttatgttaccgcagtgcaatccggcattaatgctagcgaggtcaagtacaaggaaaactatcaccagatcaaagataagtacactaccgtgctggaaaccgtcgactacgacaggactcgcaaccttaagaacttgtatagttcaaacctttataaggaggcatgggatcgagtgaaggctactagttatatacttccgtcaagcacgctcagcttaactcacgcaaagaatcagaagcatctggccagccatatcaagtaccgagaagaatatgagaagttcaaggccctgtacacgctacccagatcagtggatgacgatcccaacaccgctagatgtctcagggttgggaagctgaatattgatcggctatataggagcgtatacgaaaagaacaagatgaaaatccacatcgtccccgatatggtcgagatggttacggcaaaagacagccagaaaaaggtatcggagatagactacagactgcggctgcacgagtggatttgtcaccccgacttacaggtcaatgatcatgtgaggaaagtcaccgaccagattagcgatatcgtttataaggatgacttgaactggctcaaaggaatcggttgttatgtgtgggacacaccagagatccttcatgccaagcacgcatacgatctgcgtgacgatattaaatacaaggcacacatgctgaagactcgcaatgactacaaattggtgactgatactccagtctacgttcaggccgtgaagtccggaaaacagctctctgatgccgtgtatcactacgactacgtacactctgtgaggggcaaagtcgcccccaccactaagaccgtcgatctagacagggccctgcacgcgtacaagctgcaatctagcaacctatataaaaccagtctgcgcactcttcccacaggataccgcctccctggagacacgccacattttaaacatattaaggataccaggtatatgtccagttatttcaaatacaaggaggcttacgaacacacaaaggcctatgggtacaccctgggacccaaagacgtaccttttgtgcatgtacgccgtgtcaataatgtgacctccgaaagactgtatcgggagctgtatcacaaactgaaggacaagattcacacaaccccagatactcctgagatccggcaggttaaaaagactcaagaggctgtctccgaattgatttataaatctgattttttcaaaatgcagggccatatgatttctctgccctacacaccacaggtgatccactgtcgatatgtgggagacatcaccagtgatattaaatacaaagaggatttgcaggtcttgaaaggattcgggtgtttcctttacgatacccctgatatggtccgtagccggcacctgcggaaactatggagtaactacctctatacagataaggccagaaagatgcgcgataagtacaaggtggtcttagacacaccagaatacaggaaagtccaagagctgaagacgcatctgtctgagctggtttatcgagctgcgggcaagaagcagaagagcattttcactagcgtgccggataccccagatctgctgcgagcaaagcggggccaaaaactgcaatctcagtacctttacgtggaactcgccacaaaggaacgacctcaccaccatgccggtaaccaaaccactgcactgaagcatgcaaaagatgtgaaggatatggtaagcgagaagaaatacaaaatccaatacgagaaaatgaaagacaagtatacccctgtgccagacacacccattctaattcgcgctaaaagggcctattggaacgccagcgatttacgatataaggaaacatttcagaagaccaaaggcaaataccataccgtgaaggacgccctggatattgtgtaccaccggaaggtgaccgacgatattagcaagatcaaatacaaggagaattacatgagtcaactgggcatctggcgttcaattccagacagaccggaacacttccaccaccgggctgttaccgataccgttagcgatgtcaagtataaagaagatctgacctggctgaaagggatcggttgttacgcttatgacacacccgatttcacccttgctgaaaagaacaaaaccctatacagtaagtacaagtacaaggaggtttttgaacgaacaaaatccgattttaaatatgtagccgactctcccattaatcggcactttaagtatgccacacaactgatgaatgagagaaaatacaaaagctcagctaagatgttccttcagcacggttgtaatgaaattctgaggccagatatgctcaccgccttgtataatagccacatgtggagtcaaattaagtacaggaagaattacgagaaatcaaaagacaagtttactagtatagttgatacacctgagcacttacggactacgaaggtcaataagcagatcagcgacattctatataaactggaatacaataaggccaaacctcgcggctacaccaccatccacgatactcccatgttgctgcatgtgaggaaagtcaaggacgaggtgagcgatttgaaatacaaagaggtgtaccagagaaacaagagcaattgcaccatcgaaccagacgcagtgcacattaaggcagcaaaagacgcatacaaggtcaacactaacctggattataagaaacagtacgaagctaataaagcccactggaagtggactcctgaccgaccggatttccttcaggcggccaaaagttctctccaacagagcgacttcgagtacaaattggacagggaatttctcaaaggctgcaaactgtctgtgactgacgacaagaacactgttctggcactccggaatacactgatcgagtctgatttaaagtacaaagagaagcacgttaaggagagaggcacttgtcatgccgtccctgacactcctcagatccttttggccaaaaccgtttccaacttggtatctgagaataagtacaaggaccacgtcaaaaaacacctcgcccagggttcctacacaacattgcccgagacaagggacactgtccacgtcaaagaagtaacaaagcacgtctccgacactaactataaaaagaagttcgtaaaggaaaaggggaagtccaactattctataatgctagagcctcctgaagtgaagcacgctatggaagtggcaaagaaacagtctgatgtggcttaccgcaaagacgcaaaggagaaccttcattacacgacggtcgccgatcgcccagatattaagaaggccacacaggctgccaaacaggcctccgaggtcgagtacagggcaaagcatagaaaggagggctcccatggcctcagcatgctcggtcgacccgacatagaaatggctaagaaggcggcaaagctgtcgagtcaagtaaaatatcgcgaaaatttcgataaagaaaagggaaaaaccccaaagtataacccaaaagacagccagctctataaagttatgaaagacgctaataacttggcctccgaagtgaaatataaggctgacttaaaaaagctgcataagccagtgaccgacatgaaggagtcactcatcatgaatcacgttctgaacacaagccagttagccagttcatatcagtacaaaaagaaatacgagaaatctaaaggacattatcatactattcccgacaatctagagcagttgcatctgaaggaggcaaccgaactgcagtccattgtaaagtacaaagagaagtacgaaaaggagcgcgggaagcctatgctggactttgagacacccacatacattacggcgaaggagagccaacagatgcagtccggcaaggagtaccggaaggactacgaggagtccatcaaagggaggaaccttacgggcctggaagtaacacctgcactgctgcacgtgaaatatgctaccaaaatcgccagcgaaaaggagtaccgcaaagatttagaggagagtatcagaggtaaaggcttgacagaaatggaagacactccagacatgctgagagccaagaatgctacccagatcttgaacgaaaaggagtataaacgcgatctggagttggaagtaaagggaagggggctgaatgccatggccaatgaaaccccagactttatgagggcgagaaatgccactgatatcgcgagccagattaagtacaaacagtctgccgaaatggagaaagcaaactttacgtctgtggtagacacccccgagatcattcatgcccagcaagttaagaacctgtcttctcagaaaaagtacaaggaggatgctgagaagtctatgtcatactacgagacagtcctggataccccggaaatccagagagtgcgggaaaatcagaaaaacttttccttgttacaatatcagtgcgatttgaagaactccaaaggtaagattacagtcgtccaagacacgccggagatcctgcgggtaaaagagaatcagaaaaatttctcaagcgtgctgtacaaagaggatgtgagccctggaaccgcaatcgggaagactccagagatgatgcgggttaagcagacccaggatcatatttctagcgtgaagtacaaggaggcaatcggtcagggaactccaatccccgatttaccagaagtgaagagggtgaaggagacccagaaacatatcagctccgtgatgtataaggaaaatctgggtactgggatcccaacaacggtcactccagagatcgaacgggtgaaacggaatcaggaaaacttcagttcagtactctacaaagaaaatctagggaagggcataccaactcccatcactcccgagatggaaagggtaaaacggaaccaggagaatttctcaagtattttatacaaagaaaatctttcaaaaggaacaccactgccagtcactcccgagatggaacgcgtcaagctaaaccaggaaaacttctccagtgtgttgtacaaagaaaacgtggggaaaggaatccctatccccatcacaccagaaatggagcgggtgaaacacaatcaagaaaacttttcctcagttctgtataaggagaatctggggacggggataccaatcccgatcacacccgagatgcagcgggtcaaacacaatcaggagaacctatcttctgtgctctataaggagaatatgggaaagggaacccctctgccggtgacgccagagatggaacgcgttaaacacaatcaggaaaacatctcaagcgtgctttataaggagaatatgggaaaaggcacacccctgcccgtgacacccgagatggaacgcgtaaagcataatcaagagaatatctccagcgtgctgtacaaggagaatatgggcaaaggcaccccattagcagtgacacctgaaatggagcgcgtgaaacacaatcaggagaatatctcttctgtgctgtacaaagagaacgtgggaaaggccacagccacccccgtgacccctgagatgcagcgagttaagcgcaaccaggagaacattagttccgtcctgtataaggaaaacctagggaaagccactcccacaccgtttacaccggagatggagcgggtaaaacgtaatcaggagaacttcagttcagtcctgtataaagaaaacatgcgcaaagccacacctacaccggtgactcccgaaatggagcgcgctaagcgaaaccaggaaaacatctcgtccgttctctacagcgattctttcagaaagcagatacaaggtaaggctgcttatgttttggatacacctgagatgaggcgggtgcgggaaacccagcggcacatatcaaccgtgaagtaccacgaggatttcgagaagcataagggctgctttaccccagtcgtaactgatcctatcaccgagcgggtgaaaaagaacatgcaggacttcagcgatatcaattaccgcggcattcagcgaaaagtggtagagatggagcagaagcggaacgatcaggatcaggagaccattactgggctacgtgtgtggaggacgaatcctggctccgtcttcgactacgaccctgcggaggataatattcagtcacggagcctgcacatgattaacgtgcaggcccagcggcgaagtagagaacaaagcaggagcgcttccgctctgagcatcagtggaggggaggagaagagcgaacacagcgaggcacctgatcatcatctgagcacctactctgatggcggagtgtttgccgtgtccactgcgtacaaacacgcaaaaacaaccgagctgcctcagcaacgctccagctcagttgctacccagcagacaacggtatcatcaatacctagtcacccatctacagcaggaaagatttttagagctatgtacgactacatggcggccgacgctgacgaagtgtcctttaaagatggcgatgctatcatcaacgttcaggcgatcgacgagggttggatgtacgggaccgttcagcgaacaggaagaacagggatgctacctgccaattacgttgaagcgatctag

SEQ ID NO: 62992 - DNA, 25578 bp, Artificial Sequence
  derived and/or modified sequence
atggctgatgatgaagattatgaggaggtggtggagtactacacagaggaggtggtgtatgaggaggtgcctggagagaccatcaccaagatctatgagaccaccaccaccaggaccagtgactatgagcagagcgagaccagcaagccagccctggcccagcctgccctggcccagcctgccagcgccaagcctgtggagaggaggaaggtgatcaggaagaaggtggaccccagcaagttcatgaccccctacatcgcccacagccagaagatgcaggacctcttcagccccaacaagtacaaggagaagtttgagaagaccaagggccagccctatgccagcaccacagacaccccagagctgcggcgcatcaagaaggtgcaggaccagctgtctgaggtgaagtacaggatggatggagatgtggccaagaccatctgccacgtggatgagaaggccaaggacattgaacatgccaagaaggtgtcccagcaggtgtccaaggtgctgtacaagcagaactgggaggacaccaaggacaagtacctgctgcccccagatgcccctgagctggtgcaggccgtgaagaacacagccatgttcagcaagaagctgtacacagaggactgggaggccgacaagagcctcttctacccctacaatgacagccctgagctgcggcgggtggcccaggcccagaaggccctgagtgatgtggcctacaagaagggcctggccgagcagcaggcccagttcacccccctggccgaccccccagacatcgagtttgccaagaaggtgaccaaccaggtgtccaagcagaagtacaaggaggactatgagaacaagatcaagggcaagtggagcgagaccccctgctttgaggtggccaatgccaggatgaatgctgacaacatcagcaccaggaagtaccaggaggactttgagaacatgaaggaccagatctacttcatgcagacagagaccccagagtacaagatgaacaagaaggccggcgtggccgccagcaaggtgaagtacaaggaggactatgagaagaacaagggcaaggctgactacaacgtgctgcctgccagcgagaacccccagctgcggcagctgaaggctgctggagatgccctgagtgacaagctgtacaaggaaaattatgagaagaccaaggccaagagcatcaactactgtgagacccccaagttcaagctggacacagtgctgcagaacttcagcagtgacaagaagtacaaggacagctacctgaaggacatcctgggccactacgtgggcagctttgaggacccctaccacagccactgcatgaaggtgacagcccagaacagcgacaagaactacaaggccgagtatgaggaggaccggggcaagggcttcttcccccagaccatcacccaggagtatgaggccatcaagaagctggaccagtgcaaggaccacacctacaaggtgcacccagacaagaccaagttcacccaggtgacagacagccctgtgctgctgcaggcccaggtgaacagcaagcagctgagtgacctgaactacaaggccaagcatgagagcgagaagttcaagtgccacatccccccagacaccccagccttcatccagcacaaggtgaatgcctacaacctgagtgacaacctgtacaagcaggactgggagaagagcaaggccaagaagtttgacatcaaggtggatgccatccccctgctggccgccaaggccaacaccaagaacaccagtgatgtgatgtacaagaaggactatgagaagaacaagggcaagatgattggagtgctgagcatcaatgatgaccccaagatgctgcacagcctgaaggtggccaagaaccagagcgaccggctgtacaaggaaaattatgagaagaccaaggccaagtccatgaactactgtgagacccccaagtaccagctggacacccagctgaagaacttcagcgaggcccgctacaaggacctgtatgtgaaggatgtgctgggccactacgtgggctccatggaggacccctaccacacccactgcatgaaggtggccgcccagaacagcgacaagagctacaaggccgagtatgaagaagataaaggcaagtgctacttcccccagaccatcacccaggagtatgaggccatcaagaagctggaccagtgcaaggaccacacctacaaggtgcacccagacaagaccaagttcaccgctgtgacagacagccctgtgctgctgcaggcccagctgaacaccaagcagctgagtgacctgaactacaaggccaagcatgaaggagagaagttcaagtgccacatcccagcagatgccccccagttcatccagcaccgggtgaatgcctacaacctgagtgacaacgtgtacaagcaggactgggagaagagcaaggccaagaagtttgacatcaaggtggatgccatccccctgctggccgccaaggccaacaccaagaacaccagtgatgtgatgtacaagaaggactatgagaagagcaagggcaagatgattggagccctgagcatcaatgatgaccccaagatgctgcacagcctgaagacagccaagaaccagagcgaccgggagtacaggaaggactatgagaagagcaagaccatctacacagcccccctggacatgctgcaggtgacccaggccaagaagagccaggccatcgccagtgatgtggactacaagcacatcctgcacagctacagctaccccccagacagcatcaacgtggacctggccaagaaggcctatgccctgcagagtgatgtggagtacaaggctgactacaacagctggatgaagggctgcggctgggtgcccttcggcagcctggagatggagaaggccaagagggccagtgacatcctgaatgagaagaagtaccggcagcacccagacaccctgaagttcaccagcattgaagatgcccccatcaccgtgcagagcaagatcaaccaggcccagaggagtgacatcgcctacaaggccaagggggaggagatcatccacaagtacaacctgcccccagacctgccccagttcatccaggccaaggtgaatgcctacaacatcagcgagaacatgtacaaggctgacctgaaggacctgagcaagaagggctatgacctgaggacagatgccatccccatccgggccgccaaggccgcccggcaggccgccagtgatgtgcagtacaagaaggactatgagaaggccaagggcaagatggtgggcttccagagcctgcaggatgaccccaagctggtgcactacatgaatgtggccaagatccagagcgaccgggagtacaagaaggactatgagaagaccaagagcaagtacaacacccctcatgacatgtttaatgtggtggccgccaagaaggcccaggatgtggtgtccaatgtgaactacaagcacagcctgcaccactacacctacctgcctgatgccatggacctggagctgagcaagaacatgatgcagatccagagcgacaacgtgtacaaggaggactacaacaactggatgaagggcatcggctggatccccatcggcagcctggatgtggagaaggtgaagaaggctggagatgccctgaatgagaagaagtaccggcagcacccagacaccctgaagttcaccagcatcgtggacagccctgtgatggtgcaggccaagcagaacaccaagcaggtgtctgacatcctgtacaaggccaagggggaggatgtgaagcacaagtacaccatgagcccagacctgccccagttcctgcaggccaagtgcaatgcctacaacatcagtgatgtgtgctacaagagggactggtatgacctgattgccaagggcaacaacgtgctgggagatgccatccccatcacagctgccaaggccagcaggaacatcgccagtgactacaagtacaaggaggcctatgagaagagcaagggcaagcacgtgggcttccgcagcctgcaggatgaccccaagctggtgcactacatgaatgtggccaagctgcagagcgaccgggagtacaagaagaactatgagaacaccaagaccagctaccacacccctggggacatggtgtccatcacagctgccaagatggcccaggatgtggccaccaacgtgaactacaagcagcccctgcaccactacacctacctgcctgatgccatgagcctggagcacaccagaaatgtgaaccagatccagagcgacaacgtgtacaaggatgagtacaacagcttcctgaagggcatcggctggatccccatcggcagcctggaggtggagaaggtgaagaaggctggagatgccctgaatgaaaggaagtaccggcagcacccagacacagtgaagttcacctctgtgcctgacagcatgggcatggtgctggcccagcacaacaccaagcagctgagtgacctgaactacaaggtggagggggagaagctgaagcacaagtacaccatcgaccctgagctgccccagttcatccaggccaaggtgaatgccctgaacatgtctgatgcccactacaaggctgactggaagaagaccatcgccaagggctatgacctgcggccagatgccatccccatcgtggccgccaagagcagcaggaacatcgccagtgactgcaagtacaaggaggcctatgagaaggccaagggcaagcaggtgggcttcctgagcctgcaggatgaccccaagctggtgcactacatgaatgtggccaagatccagagcgaccgggagtacaagaagggctatgaggccagcaagaccaagtaccacacccccctggacatggtgtctgtgacagctgccaagaagagccaggaggtggccaccaatgccaactaccggcagagctaccaccactacaccctgctgcctgatgccctgaatgtggagcacagcagaaatgccatgcagatccagagcgacaacctgtacaagagtgacttcaccaactggatgaagggcatcggctgggtgcccatcgagagcctggaggtggagaaggccaagaaggccggggagatcctgtctgagaagaagtaccggcagcaccctgagaagctgaagttcacctacgccatggacaccatggagcaggccctgaacaagagcaacaagctgaacatggacaagaggctgtacacagagaagtggaacaaggacaagaccaccatccacgtgatgccagacaccccagacatcctgctgagccgggtgaaccagatcaccatgtctgacaagctgtacaaggccggctgggaggaggagaagaagaagggctatgacctgcggccagatgccatcgccatcaaggccgcccgggccagccgggacatcgccagtgactacaagtacaagaaggcctatgagcaggccaagggcaagcacatcggcttccgcagcctggaggatgaccccaagctggtgcacttcatgcaggtggccaagatgcagagcgaccgggagtacaagaagggctatgagaagagcaagaccagcttccacacccctgtggacatgctgtctgtggtggccgccaagaagagccaggaggtggccaccaatgccaactacagaaatgtcatccacacctacaacatgctgcctgatgccatgagctttgagctggccaagaacatgatgcagatccagagcgacaaccagtacaaggctgactatgctgacttcatgaagggcatcggctggctgcccctgggcagcctggaggccgagaagaacaagaaggccatggagatcatcagcgagaagaagtaccggcagcacccagacaccctgaagtacagcaccctgatggacagcatgaacatggtgctggcccagaacaatgccaagatcatgaatgagcacctgtacaagcaggcctgggaggccgacaagaccaaggtgcacatcatgccagacatcccccagatcatcctggccaaggccaatgccatcaacatgtctgacaagctgtacaagctgagcctggaggagagcaagaagaagggctatgacctgcggccagatgccatccccatcaaggccgccaaggccagccgggacatcgccagtgactacaagtacaagtacaactatgagaagggcaagggcaagatggtgggcttccgcagcctggaggatgaccccaagctggtgcacagcatgcaggtggccaagatgcagagcgaccgggagtacaagaagaactatgagaacaccaagaccagctaccacaccccagctgacatgctgtctgtgacagctgccaaggatgcccaggccaacatcaccaacaccaactacaagcacctgatccacaagtacatcctgctgcctgatgccatgaacatcgagctgaccaggaacatgaaccgcatccagagcgacaatgagtacaagcaggactacaatgagtggtacaagggcctgggctggagccctgctggcagcctggaggtggagaaggccaagaaggccacagaatatgccagtgaccagaagtaccggcagcaccccagcaacttccagttcaagaagctgacagacagcatggacatggtgctggccaagcagaatgcccacaccatgaacaagcacctgtacaccatcgactggaacaaggacaagaccaagatccacgtgatgccagacaccccagacatcctgcaggccaagcagaaccagaccctgtacagccagaagctgtacaagctgggctgggaggaggccctgaagaagggctatgacctgcctgtggatgccatctctgtgcagctggccaaggccagccgggacatcgccagtgactacaagtacaagcagggctacaggaagcagctgggccaccacgtgggcttccgcagcctgcaggatgaccccaagctggtgctgtccatgaatgtggccaagatgcagagcgagcgggagtacaagaaggactttgagaagtggaagaccaagttcagcagccctgtggacatgctgggcgtggtgctggccaagaagtgccaggagctggtgtctgatgtggactacaagaactacctgcaccagtggacctgcctgcctgaccagaatgatgtggtgcaggccaagaaggtgtatgagctgcagagtgaaaatctctacaagagtgacctggagtggctgcggggcatcggctggagccccctgggcagcctggaggccgagaagaacaagagggccagcgagatcatcagcgagaagaagtaccggcagcccccagacaggaacaagttcaccagcatcccagatgccatggacatcgtgctggccaagaccaatgccaagaacagaagtgaccggctgtaccgggaggcctgggacaaggacaagacccagatccacatcatgccagacaccccagacatcgtgctggccaaggccaacctgatcaacaccagtgacaagctgtacaggatgggctatgaggagctgaagaggaagggctatgacctgcctgtggatgccatccccatcaaggccgccaaggccagccgggagatcgccagcgagtacaagtacaaggagggcttcaggaagcagctgggccaccacatcggggccaggaacattgaagatgaccccaagatgatgtggagcatgcacgtggccaagatccagagcgaccgggagtacaagaaggactttgagaagtggaagaccaagttcagcagccctgtggacatgctgggcgtggtgctggccaagaagtgccagaccctggtgtctgatgtggactacaagaactacctgcaccagtggacctgcctgcctgaccagagtgatgtgatccacgcccggcaggcctatgacctgcagagcgacaacctgtacaagagtgacctgcagtggctgaagggcatcggctggatgaccagcggcagcctggaggatgagaagaacaagagggccacccagatcctgagtgaccacgtgtaccggcagcacccagaccagttcaagttcagcagcctgatggacagcatccccatggtgctggccaagaacaatgccatcaccatgaaccaccggctgtacacagaggcctgggacaaggacaagaccaccgtgcacatcatgccagacaccccagaggtgctgctggccaagcagaacaaggtgaactacagcgagaagctgtacaagctgggcctggaggaggccaagaggaagggctatgacatgagggtggatgccatccccatcaaggccgccaaggccagccgggacatcgccagcgagttcaagtacaaggagggctacaggaagcagctgggccaccacatcggggcccgggccatcagagatgaccccaagatgatgtggagcatgcacgtggccaagatccagagcgaccgggagtacaagaaggactttgagaagtggaagaccaagttcagcagccctgtggacatgctgggcgtggtgctggccaagaagtgccagaccctggtgtctgatgtggactacaagaactacctgcaccagtggacctgcctgcctgaccagagtgatgtgattcatgcccggcaggcctatgacctgcagagcgacaacatgtacaagagtgacctgcagtggatgaggggcatcggctgggtgtccatcggcagcctggatgtggagaagtgcaagagggccacagagatcctgagtgacaagatctaccggcagcccccagaccgcttcaagttcacctctgtgacagacagcctggagcaggtgctggccaagaacaatgccatcaccatgaacaagaggctgtacacagaggcctgggacaaggacaagacccagatccacatcatgccagacaccccagagatcatgctggccaggatgaacaagatcaactacagcgagagcctgtacaagctggccaatgaggaggccaagaagaagggctatgacctgcggagtgatgccatccccatcgtggccgccaaggccagccgggacatcatcagtgactacaagtacaaggatggctactgcaagcagctgggccaccacatcggggccaggaacattgaagatgaccccaagatgatgtggagcatgcacgtggccaagatccagagcgaccgggagtacaagaaggactttgagaagtggaagaccaagttcagcagccctgtggacatgctgggcgtggtgctggccaagaagtgccagaccctggtgtctgatgtggactacaagaactacctgcacgagtggacctgcctgcctgaccagagtgatgtgatccacgcccggcaggcctatgacctgcagagcgacaacatctacaagagtgacctgcagtggctgcggggcatcggctgggtgcccatcggctccatggatgtggtgaagtgcaagagggccacagagatcctgagtgacaacatctaccggcagcccccagacaagctgaagttcacctctgtgacagacagcctggagcaggtgctggccaagaacaatgccctgaacatgaacaagaggctgtacacagaggcctgggacaaggacaagacccagatccacatcatgccagacaccccagagatcatgctggcccggcagaacaagatcaactacagcgagaccctgtacaagctggccaatgaggaggccaagaagaagggctatgacctgcggagtgatgccatccccatcgtggccgccaaggccagcagagatgtgatcagtgactacaagtacaaggatggctacaggaagcagctgggccaccacatcggggccagaaatattgaagatgaccccaagatgatgtggagcatgcacgtggccaagatccagagcgaccgggagtacaagaaggactttgagaagtggaagaccaagttcagcagccctgtggacatgctgggcgtggtgctggccaagaagtgccagaccctggtgtctgatgtggactacaagaactacctgcacgagtggacctgcctgcctgaccagaatgatgtgattcatgcccggcaggcctatgacctgcagagcgacaacatctacaagagtgacctgcagtggctgcggggcatcggctgggtgcccatcggctccatggatgtggtgaagtgcaagagagctgctgagatcctgagtgacaacatctaccggcagcccccagacaagctgaagttcacctctgtgacagacagcctggagcaggtgctggccaagaacaatgccctgaacatgaacaagaggctgtacacagaggcctgggacaaggacaagacccaggtgcacatcatgccagacaccccagagatcatgctggcccggcagaacaagatcaactacagcgagagcctgtaccggcaggccatggaggaggccaagaaggagggctatgacctgcggagtgatgccatccccatcgtggccgccaaggccagccgggacatcgccagtgactacaagtacaaggaggcctacaggaagcagctgggccaccacatcggggcccgggctgtgcatgatgaccccaagatcatgtggagcctgcacatcgccaaggtgcagagcgaccgggagtacaagaaggactttgagaagtacaagacccgctacagcagccctgtggacatgctgggcatcgtgctggccaagaagtgccagaccctggtgtctgatgtggactacaagcaccccctgcacgagtggatctgcctgcctgaccagaatgacatcatccacgccaggaaggcctatgacctgcagagcgacaacctgtacaagagtgacctggagtggatgaagggcatcggctgggtgcccatcgacagcctggaggtggtgcgggccaagagagctggggagctgctgagtgacaccatctaccggcagaggcctgagaccctgaagttcaccagcatcacagacaccccagagcaggtgctggccaagaacaatgccctgaacatgaacaagaggctgtacacagaggcctgggacaatgacaagaagaccatccacgtgatgccagacaccccagagatcatgctggccaagctgaaccgcatcaactacagcgacaagctgtacaagctggccctggaggagagcaagaaggagggctatgacctgcggctggatgccatccccatccaggccgccaaggccagccgggacatcgccagtgactacaagtacaaggagggctacaggaagcagctgggccaccacatcggggccaggaacatcaaggatgaccccaagatgatgtggagcatccacgtggccaagatccagagcgaccgggagtacaagaaggagtttgagaagtggaagaccaagttcagcagccctgtggacatgctgggcgtggtgctggccaagaagtgccagatcctggtgtctgacatcgactacaagcaccccctgcacgagtggacctgcctgcctgaccagaatgatgtgatccaggccaggaaggcctatgacctgcagagtgatgccatctacaagagtgacctggagtggctgcggggcatcggctgggtgcccatcggctctgtggaggtggagaaggtgaagagagctggggagatcctgagtgacaggaagtaccggcagcctgctgaccagctgaagttcacctgcatcacagacaccccagaaattgtgctggccaagaacaatgccctgaccatgagcaagcacctgtacacagaggcctgggatgctgacaagaccagcatccacgtgatgccagacaccccagacatcctgctggccaagagcaacagcgccaacatcagccagaagctgtacaccaagggctgggatgagagcaagatgaaggactatgacctgcgggcagatgccatcagcatcaagagcgccaaggccagccgggacatcgccagtgactacaagtacaaggaggcctatgagaagcagaagggccaccacatcggggcccagagcattgaagatgaccccaagatcatgtgtgccatccacgccggcaagatccagagcgagcgggagtacaagaaggagttccagaagtggaagaccaagttcagcagccctgtggacatgctgagcatcctgctggccaagaagtgccagaccctggtgacagacatcgactacagaaactacctgcacgagtggacctgcatgccagaccagaatgacatcatccaggccaagaaggcctatgacctgcagagcgacagcgtgtacaaggctgacctggagtggctgcggggcatcggctggatgcctgagggctctgtggagatgaacagagtgaaggtggcccaggacctggtgaatgaaagactctaccgcaccaggcctgaggccctgtccttcaccagcatcgtggacaccccagaggtggtgctggccaaggccaacagcctgcagatcagcgagaagctgtaccaggaggcctggaacaaggacaagagcaacatcaccatccccagcgacaccccagagatgctgcaggcccacatcaatgccctgcagatcagcaacaagctgtaccagaaggactggaatgatgccaagcagaagggctatgacatccgggcagatgccatcgagatcaagcacgccaaggccagccgggagatcgccagcgagtacaagtacaaggagggctacaggaagcagctgggccaccacatgggcttccgcaccctgcaggatgaccccaagtctgtgtgggccatccatgctgccaagatccagagcgaccgggagtacaagaaggcctatgagaagagcaagggcatccacaacacccccctggacatgatgagcatcgtgcaggccaagaagtgccaggtgctggtgtctgacatcgactacagaaactacctgcaccagtggacctgcctgcctgaccagaatgatgtgatccaggccaagaaggcctatgacctgcagagcgacaacctgtacaagagtgacctggagtggctgaagggcatcggctggctgcctgagggctctgtggaggtgatgagggtgaagaatgcccagaacctgctgaatgaaaggctgtaccgcatcaagccagaggccctgaagttcaccagcatcgtggacaccccagaggtgatccaggccaagatcaatgctgtgcagatcagcgagcccctgtacagagatgcctgggagaaggagaaggccaacgtgaatgtgcctgctgacacccccctgatgctgcagagcaagatcaatgccctgcagatcagcaacaagcgctaccagcaggcctgggaggatgtgaagatgacaggctatgacctgcgggcagatgccatcggcatccagcacgccaaggccagccgggacatcgccagtgactacctgtacaagacagcctatgagaagcagaagggccactacatcggctgccgcagcgccaaggaggaccccaagctggtgtgggccgccaacgtgctgaagatgcagaatgaccggctgtacaagaaggcctacaatgaccacaaggccaagatcagcatccctgtggacatggtgtccatctctgctgccaaggagggccaggccctggccagtgatgtggactaccgccactacctgcaccactggagctgcttcccagaccagaatgatgtgatccaggccaggaaggcctatgacctgcagagcgacagcgtgtacaaggctgacctggagtggctgcggggcatcggctggatgcctgagggctctgtggagatgaacagagtgaaggtggcccaggacctggtgaatgaaagactctaccgcaccaggcctgaggccctgtccttcaccagcatcgtggacaccccagaggtggtgctggccaaggccaacagcctgcagatcagcgagaagctgtaccaggaggcctggaacaaggacaagagcaacatcaccatccccagcgacaccccagagatgctgcaggcccacatcaatgccctgcagatcagcaacaagctgtaccagaaggactggaatgacaccaagcagaagggctatgacatccgggcagatgccatcgagatcaagcacgccaaggccagccgggagatcgccagcgagtacaagtacaaggagggctacaggaagcagctgggccaccacatgggcttccgcaccctgcaggatgaccccaagtctgtgtgggccatccatgctgccaagatccagagcgaccgggagtacaagaaggcctatgagaagagcaagggcatccacaacacccccctggacatgatgagcatcgtgcaggccaagaagtgccaggtgctggtgtctgacatcgactacagaaactacctgcaccagtggacctgcctgcctgaccagaatgatgtgatccaggccaagaaggcctatgacctgcagagcgacaacctgtacaagagtgacctggagtggctgaagggcatcggctggctgcctgagggctctgtggaggtgatgagggtgaagaatgcccagaacctgctgaatgaaaggctgtaccgcatcaagccagaggccctgaagttcaccagcatcgtggacaccccagaggtgatccaggccaagatcaatgctgtgcagatcagcgagcccctgtacagaaatgcctgggagaaggagaaggccaacgtgaatgtgcctgctgacacccccctgatgctgcagagcaagatcaatgccctgcagatcagcaacaagcgctaccagcaggcctgggaggatgtgaagatgacaggctatgacctgcgggcagatgccatcggcatccagcacgccaaggccagccgggacatcgccagtgactacctgtacaagacagcctatgagaagcagaagggccactacatcggctgccgcagcgccaaggaggaccccaagctggtgtgggccgccaacgtgctgaagatgcagaatgaccggctgtacaagaaggcctacaatgaccacaaggccaagatcagcatccctgtggacatggtgtccatctctgctgccaaggagggccaggccctggccagtgatgtggactaccgccactacctgcaccactggagctgcttcccagaccagaatgatgtgatccaggccaggaaggcctatgacctgcagagcgacagcgtgtacaaggctgacctggagtggctgcggggcatcggctggatgcctgagggctctgtggagatgaacagagtgaaggtggcccaggacctggtgaatgaaagactctaccgcaccaggcctgaggccctgtccttcaccagcatcgtggacaccccagaggtggtgctggccaaggccaacagcctgcagatcagcgagaagctgtaccaggaggcctggaacaaggacaagagcaacatcaccatccccagcgacaccccagagatgctgcaggcccacatcaatgccctgcagatcagcaacaagctgtaccagaaggactggaatgacaccaagcagaagggctatgacatccgggcagatgccatcgagatcaagcacgccaaggccagccgggagatcgccagcgagtacaagtacaaggagggctacaggaagcagctgggccaccacatgggcttccgcaccctgcaggatgaccccaagtctgtgtgggccatccatgctgccaagatccagagcgaccgggagtacaagaaggcctatgagaagagcaagggcatccacaacacccccctggacatgatgagcatcgtgcaggccaagaagtgccaggtgctggtgtctgacatcgactacagaaactacctgcaccagtggacctgcctgcctgaccagaatgatgtgatccaggccaagaaggcctatgacctgcagagcgacaacctgtacaagagtgacctggagtggctgaagggcatcggctggctgcctgagggctctgtggaggtgatgagggtgaagaatgcccagaacctgctgaatgaaaggctgtaccgcatcaagccagaggccctgaagttcaccagcatcgtggacaccccagaggtgatccaggccaagatcaatgctgtgcagatcagcgagcccctgtacagagatgcctgggagaaggagaaggccaacgtgaatgtgcctgctgacacccccctgatgctgcagagcaagatcaatgccctgcagatcagcaacaagcgctaccagcaggcctgggaggatgtgaagatgacaggctatgacctgcgggcagatgccatcggcatccagcacgccaaggccagccgggacatcgccagtgactacctgtacaagacagcctatgagaagcagaagggccactacatcggctgccgcagcgccaaggaggaccccaagctggtgtgggccgccaacgtgctgaagatgcagaatgaccggctgtacaagaaggcctacaatgaccacaaggccaagatcagcatccctgtggacatggtgtccatctctgctgccaaggagggccaggccctggccagtgatgtggactaccgccactacctgcaccgctggagctgcttcccagaccagaatgatgtgatccaggccaggaaggcctatgacctgcagagtgatgccctgtacaaggctgacctggagtggctgcggggcatcggctggatgccccagggcagccctgaggtgctgcgggtgaagaatgcccagaacatcttctgtgacagcgtgtaccgcacccctgtggtgaacctgaagtacaccagcatcgtggacaccccagaggtggtgctggccaagagcaatgctgagaacatcagcatccccaagtaccgggaggtgtgggacaaggacaagaccagcatccacatcatgccagacaccccagagatcaacctggcccgggccaatgccctgaatgtgagcaacaagctgtaccgggagggctgggatgagatgaaggccggctgtgatgtgcggctggatgccatccccatccaggccgccaaggccagccgggagatcgccagtgactacaagtacaagctggaccacgagaagcagaagggccactacgtgggcaccctgacagccagagatgacaacaagatccgctgggccctgattgctgacaagctgcagaatgaaagagagtaccgcctggactgggccaagtggaaggccaagatccagagccctgtggacatgctgagcatcctgcacagcaagaacagccaggccctggtgtctgacatggactacagaaactacctgcaccagtggacctgcatgccagaccagaatgatgtgatccaggccaagaaggcctatgagctgcagagcgacaacgtgtacaaggctgacctggagtggctgcggggcatcggctggatgcccaatgacagcgtgtctgtgaaccacgccaagcatgctgctgacatcttcagcgagaagaagtaccgcaccaagattgagaccctgaacttcacccctgtggatgacagagtggactatgtgacagccaagcagagcggggagatcctggatgacatcaagtacaggaaggactggaatgccaccaagagcaagtacaccctgacagagacccccctgctgcacacagcccaggaggccgcccgcatcctggaccagtacctgtacaaggagggctgggagcggcagaaggccaccggctacatcctgcccccagatgctgtgccctttgtgcacgcccaccactgcaatgatgtgcagagcgagctgaagtacaaggccgagcacgtgaagcagaagggccactacgtgggcgtgcccaccatgagagatgaccccaagctggtgtggtttgaacatgctggccagatccagaatgaaaggctgtacaaggaggactaccacaagaccaaggccaagatcaacatcccagctgacatggtgtctgtgctggccgccaagcagggccagaccctggtgtctgacatcgactacagaaactacctgcaccagtggatgtgccacccagaccagaatgatgtgatccaggccaggaaggcctatgacctgcagagcgacaacgtgtacagagctgacctggagtggctgcggggcatcggctggatccccctggacagcgtggaccacgtgcgggtgaccaagaaccaggagatgatgagccagatcaagtacaagaagaatgccctggagaactaccccaacttccgctctgtggtggaccccccagagatcgtgctggccaagatcaacagcgtgaaccagagtgatgtgaagtacaaggagaccttcaacaaggccaagggcaagtacaccttctccccagacaccccccacatcagccacagcaaggacatgggcaagctgtacagcaccatcctgtacaagggggcctgggagggcaccaaggcctacggctacaccctggatgagcgctacatccccatcgtgggcgccaagcatgctgacctggtgaacagcgagctgaagtacaaggagacctatgagaagcagaagggccactacctggccggcaaggtgattggagagttccctggggtggtgcactgcctggacttccagaagatgaggtctgccctgaactacaggaagcactatgaggacaccaaggccaacgtgcacatccccaatgacatgatgaaccacgtgctggccaagcgctgccagtacatcctgagtgacctggagtaccgccactacttccaccagtggaccagcctgctggaggagcccaacgtcatccgggtgagaaatgcccaggagatcctgagtgacaacgtgtacaaggatgacctgaactggctgaagggcatcggctgctacgtgtgggacaccccccagatcctgcacgccaagaagagctatgacctgcagagccagctgcagtacacagctgctgggaaggagaacctgcagaactacaacctggtgacagacacccccctgtatgtgacagctgtgcagagcggcatcaatgccagcgaggtgaagtacaaggagaactaccaccagatcaaggacaagtacaccaccgtgctggagaccgtggactatgacaggaccaggaacctgaagaacctgtacagcagcaacctgtacaaggaggcctgggacagagtgaaggccaccagctacatcctgcccagcagcaccctgagcctgacccacgccaagaaccagaagcacctggccagccacatcaagtaccgggaggagtatgagaagttcaaggccctgtacaccctgcccaggtctgtggatgatgaccccaacacagcccgctgcctgcgggtgggcaagctgaacatcgaccggctgtacagatctgtgtatgagaagaacaagatgaagatccacatcgtgcctgacatggtggagatggtgacagccaaggacagccagaagaaggtgtctgaaattgactaccgcctgcggctgcacgagtggatctgccacccagacctgcaggtgaatgaccacgtgaggaaggtgacagaccagatcagtgacatcgtgtacaaggatgacctgaactggctgaagggcatcggctgctacgtgtgggacaccccagagatcctgcacgccaagcacgcctatgacctgagagatgacatcaagtacaaggcccacatgctgaagaccagaaatgactacaagctggtgacagacacccctgtgtatgtgcaggccgtgaagagcggcaagcagctgagtgatgctgtgtaccactatgactatgtgcacagcgtgcggggcaaggtggcccccaccaccaagacagtggacctggaccgggccctgcacgcctacaagctgcagagcagcaacctgtacaagaccagcctgcggaccctgcccaccggctaccgcctgcccggggacaccccccacttcaagcacatcaaggacacccgctacatgagcagctacttcaagtacaaggaggcctatgagcacaccaaggcctacggctacaccctgggccccaaggatgtgccctttgtgcacgtgagaagagtgaacaacgtgaccagcgagcggctgtaccgggagctgtaccacaagctgaaggacaagatccacaccaccccagacaccccagagatccggcaggtgaagaagacccaggaggccgtgtctgagctgatctacaagagtgacttcttcaagatgcagggccacatgatcagcctgccctacaccccccaggtgatccactgccgctacgtgggggacatcaccagtgacatcaagtacaaggaggacctgcaggtgctgaagggcttcggctgcttcctgtatgacaccccagacatggtgcgcagccgccacctgaggaagctgtggagcaactacctgtacacagacaaggccaggaagatgagggacaagtacaaggtggtgctggacaccccagagtacaggaaggtgcaggagctgaagacccacctgtctgagctggtgtacagagctgctgggaagaagcagaagagcatcttcacctctgtgcctgacaccccagacctgctgcgggccaagaggggccagaagctgcagagccagtacctgtatgtggagctggccaccaaggagcggccccaccaccacgccggcaaccagaccacagccctgaagcacgccaaggatgtgaaggacatggtgtctgagaagaagtacaagatccagtatgagaagatgaaggacaagtacacccctgtgcctgacacccccatcctgatccgggccaagagggcctactggaatgccagtgacctgcgctacaaggagaccttccagaagaccaagggcaagtaccacacagtgaaggatgccctggacatcgtgtaccacaggaaggtgacagatgacatcagcaagatcaagtacaaggagaactacatgagccagctgggcatctggaggagcatcccagacaggcctgagcacttccaccacagagctgtgacagacacagtgtctgatgtgaagtacaaggaggacctgacctggctgaagggcatcggctgctacgcctatgacaccccagacttcaccctggccgagaagaacaagaccctgtacagcaagtacaagtacaaggaggtgtttgagaggaccaagagtgacttcaagtatgtggccgacagccccatcaacagacacttcaagtatgccacccagctgatgaatgaaaggaagtacaagagcagcgccaagatgttcctgcagcacggctgcaatgagatcctgcggccagacatgctgacagccctgtacaacagccacatgtggagccagatcaagtacaggaagaactatgagaagagcaaggacaagttcaccagcatcgtggacaccccagagcacctgcggaccaccaaggtgaacaagcagatcagtgacatcctgtacaagctggagtacaacaaggccaagccccggggctacaccaccatccatgacacccccatgctgctgcacgtgaggaaggtgaaggatgaggtgtctgacctgaagtacaaggaggtgtaccagaggaacaagagcaactgcaccatcgagccagatgctgtgcacatcaaggccgccaaggatgcctacaaggtgaacaccaacctggactacaagaagcagtatgaggccaacaaggcccactggaagtggaccccagacagaccagacttcctgcaggccgccaagagcagcctgcagcagagcgactttgagtacaagctggaccgggagttcctgaagggctgcaagctgtctgtgacagatgacaagaacacagtgctggccctgaggaacaccctcatcgagagtgacctgaagtacaaggagaagcacgtgaaggagcggggcacctgccacgctgtgcctgacaccccccagatcctgctggccaagacagtgagcaacctggtgtctgagaacaagtacaaggaccacgtgaagaagcacctggcccagggcagctacaccaccctgcctgagacccgggacacagtgcacgtgaaggaggtgaccaagcacgtgtctgacaccaactacaagaagaagtttgtgaaggagaagggcaagagcaactacagcatcatgctggagcccccagaggtgaagcacgccatggaggtggccaagaagcagagtgatgtggcctacaggaaggatgccaaggagaacctgcactacaccaccgtggccgacagaccagacatcaagaaggccacccaggccgccaagcaggccagcgaggtggagtaccgggccaagcacaggaaggagggcagccacggcctgtccatgctgggccgcccagacatcgagatggccaagaaggccgccaagctgagcagccaggtgaagtaccgggagaactttgacaaggagaagggcaagacccccaagtacaaccccaaggacagccagctgtacaaggtgatgaaggatgccaacaacctggccagcgaggtgaagtacaaggctgacctgaagaagctgcacaagcctgtgacagacatgaaggagagcctcatcatgaaccacgtgctgaacaccagccagctggccagcagctaccagtacaagaagaagtatgagaagagcaagggccactaccacaccatcccagacaacctggagcagctgcacctgaaggaggccacagagctgcagagcatcgtgaagtacaaggagaagtatgagaaggagcggggcaagcccatgctggactttgagacccccacctacatcacagccaaggagagccagcagatgcagagcggcaaggagtacaggaaggactatgaggagagcatcaagggcaggaacctgaccggcctggaggtgaccccagccctgctgcacgtgaagtatgccaccaagatcgccagcgagaaggagtacaggaaggacctggaggagagcatccggggcaagggcctgacagagatggaggacaccccagacatgctgcgggccaagaatgccacccagatcctgaatgagaaggagtacaagagggacctggagctggaggtgaagggccggggcctgaatgccatggccaatgagaccccagacttcatgagggccagaaatgccacagacatcgccagccagatcaagtacaagcagagcgctgagatggagaaggccaacttcacctctgtggtggacaccccagagatcatccacgcccagcaggtgaagaacctgagcagccagaagaagtacaaggaggatgctgagaagtccatgagctactatgagaccgtgctggacaccccagagatccagagggtgcgggagaaccagaagaacttcagcctgctgcagtaccagtgtgacctgaagaacagcaagggcaagatcaccgtggtgcaggacaccccagagatcctgcgggtgaaggagaaccagaagaacttcagctctgtgctgtacaaggaggatgtgtccccaggcacagccatcggcaagaccccagagatgatgagggtgaagcagacccaggaccacatcagctctgtgaagtacaaggaggccatcggccagggcacccccatcccagacctgcctgaggtgaagagggtgaaggagacccagaagcacatcagctctgtgatgtacaaggagaacctgggcaccggcatccccaccaccgtgaccccagaaattgagcgggtgaagaggaaccaggagaacttcagctctgtgctgtacaaggagaacctgggcaagggcatccccacccccatcaccccagagatggagcgggtgaagaggaaccaggagaacttcagcagcatcctgtacaaggagaacctgagcaagggcacccccctgcctgtgaccccagagatggagcgggtgaagctgaaccaggagaacttcagctctgtgctgtacaaggaaaatgtgggcaagggcatccccatccccatcaccccagagatggagcgggtgaagcacaaccaggagaacttcagctctgtgctgtacaaggagaacctgggcaccggcatccccatccccatcaccccagagatgcagagggtgaagcacaaccaggagaacctgagctctgtgctgtacaaggagaacatgggcaagggcacccccctgcctgtgaccccagagatggagcgggtgaagcacaaccaggagaacatcagctctgtgctgtacaaggagaacatgggcaagggcacccccctgcctgtgaccccagagatggagcgggtgaagcacaaccaggagaacatcagctctgtgctgtacaaggagaacatgggcaagggcacccccctggccgtgaccccagagatggagcgggtgaagcacaaccaggagaacatcagctctgtgctgtacaaggaaaatgtgggcaaggccacagccacccctgtgaccccagagatgcagagggtgaagaggaaccaggagaacatcagctctgtgctgtacaaggagaacctgggcaaggccacccccacccccttcaccccagagatggagcgggtgaagaggaaccaggagaacttcagctctgtgctgtacaaggagaacatgaggaaggccacccccacccctgtgaccccagagatggagcgggccaagaggaaccaggagaacatcagctctgtgctgtacagcgacagcttcaggaagcagatccagggcaaggccgcctacgtgctggacaccccagagatgagaagagtgcgggagacccagaggcacatcagcacagtgaagtaccacgaggactttgagaagcacaagggctgcttcacccctgtggtgacagaccccatcacagagcgggtgaagaagaacatgcaggacttcagtgacatcaactaccggggcatccagaggaaggtggtggagatggagcagaagagaaatgaccaggaccaggagaccatcaccggcctgcgggtgtggaggaccaaccctggctctgtgtttgattatgaccctgctgaggacaacatccagagccgcagcctgcacatgatcaacgtgcaggcccagaggaggagccgggagcagagccgcagcgccagcgccctgagcatctctggaggagaggagaagtctgagcacagcgaggccccagaccaccacctgagcacctacagtgatggcggcgtgtttgctgtgtccacagcctacaagcacgccaagaccacagagctgccccagcagaggagcagctctgtggccacccagcagaccaccgtgagcagcatccccagccaccccagcacagctgggaagatcttccgggccatgtatgactacatggccgcagatgctgatgaggtgtccttcaaggatggagatgccatcatcaacgtgcaggccattgatgagggctggatgtatggaacagtgcagaggactggaagaacaggcatgctgcctgccaactacgtggaggccatctag

SEQ ID NO: 62993 - DNA, 25578 bp, Artificial Sequence
  derived and/or modified sequence
atggccgacgacgaggactacgaggaggtggtggagtactacaccgaagaggtggtttatgaagaagtgccaggagaaaccattacgaagatctacgaaaccactacaacacggacctctgactatgagcaatccgaaacctcaaagccagcactggctcagcctgcgttggctcagccagcaagcgccaaaccggtcgagagacggaaagtgatccgcaagaaggtggatccaagcaagttcatgactccctacattgcgcacagccagaagatgcaggatctcttcagccctaacaaatataaagaaaagttcgagaagactaagggccagccgtatgcgagcaccacagacaccccagaattgaggcgtataaagaaggttcaggaccagctgagcgaagtgaagtataggatggatggggatgtggccaagaccatttgtcacgtggacgaaaaggctaaagatatcgagcacgcgaaaaaggtgagtcagcaggtgtcaaaagttctttacaaacagaactgggaggacaccaaggacaaatatttactccccccagacgctccggagctggtgcaagcagttaagaacacagctatgttcagcaagaagctgtacactgaagactgggaagcggacaaatcactgttttatccatataatgacagtcccgagctgcgtagagtagcccaggcacaaaaagcactctccgatgtcgcctacaagaaggggttagccgagcagcaggcgcagttcacgcctctagcagacccacctgatatcgagttcgccaagaaggttaccaatcaagtctctaaacagaaatacaaggaagattatgaaaataagataaaggggaaatggtctgaaactccctgctttgaggtcgccaacgccagaatgaatgcagataatatttctacaagaaagtatcaggaggatttcgagaatatgaaggatcaaatatactttatgcagacagagactccggaatacaaaatgaacaaaaaggctggcgtcgccgcttcaaaagtcaaatacaaggaagactacgagaagaacaaaggaaaagctgattataatgtgctgcccgcctctgaaaatcctcagttacggcagctgaaggccgccggagacgctctttctgataaactctacaaagagaattacgagaagacaaaggctaagagtattaattactgtgaaacacctaagtttaagcttgataccgtgctccagaacttttcatcagataaaaagtataaagatagttacctcaaggatattttgggccattatgtggggtcctttgaagatccttatcacagccactgtatgaaggtcactgctcagaatagcgataagaactataaggccgagtatgaagaagaccgaggcaaagggttctttccccaaactatcacgcaagaatacgaggccataaagaaactggaccagtgtaaggatcatacctataaagtgcatcctgataaaactaaattcacccaggttaccgattcccccgttctactgcaggcccaagttaattcaaaacagctctctgatctaaactataaggccaaacatgagtccgagaagttcaagtgccatatcccaccagatacccctgccttcattcaacacaaggtcaatgcatataatctctctgataacctgtacaaacaggactgggaaaagagcaaggctaagaaattcgacataaaggttgatgccatcccactcctcgctgcaaaggcaaacactaagaatacaagcgacgtcatgtataaaaaggattatgagaagaataagggcaaaatgatcggcgtactctccatcaacgacgatccaaagatgctgcattccctcaaagtcgcgaaaaaccagtccgatcgtctgtacaaggaaaactatgaaaagacaaaggctaagagcatgaactactgcgagacaccgaaataccagttggacacacagctcaaaaacttttcagaagcccgttataaagacctgtacgtcaaggatgtgctcgggcactacgtaggctcaatggaagatccctatcacacgcactgtatgaaagtagctgcgcagaattcggataaatcttacaaggctgaatatgaagaggataaaggaaaatgttacttcccccaaactatcacccaagaatacgaggccatcaaaaagctggatcagtgcaaagatcacacctacaaagttcaccctgacaagacaaagtttactgcagtgaccgactcccccgtgttactccaagctcagttgaacacaaaacagctctccgaccttaactataaggccaagcacgaaggcgagaagtttaaatgtcatatacccgctgacgcaccccaatttattcagcatagagttaacgcttacaatctgtcggataatgtgtataagcaagactgggagaaaagtaaagccaagaagttcgatattaaagtggatgcgatcccgctattggccgccaaagcgaacactaaaaacactagcgacgttatgtataagaaggactacgaaaaatccaagggaaaaatgatcggcgccctcagcataaacgacgatcccaaaatgcttcattccttgaaaacggctaagaaccagtcagatcgcgagtatcgaaaagactacgagaagtcgaagacaatctacacagcccccctggacatgctgcaagtgacacaggcaaaaaaatcgcaggcgatagcaagtgatgtggactacaagcacatactacattcttacagttacccaccagattccatcaacgtggatttagcgaagaaagcctatgccctgcagagcgatgtggagtataaggctgactacaactcttggatgaaagggtgcgggtgggtcccgtttggcagcctggagatggagaaagccaagcgggcctccgacatcctaaacgaaaagaagtaccggcagcatccagatacgctgaagtttacctcaatagaagacgccccaatcacggtgcagagcaaaatcaaccaagctcagagaagtgacatcgcatataaggccaaaggagaagaaatcatccacaaatacaaccttccgccggacttgccacagtttatccaagcgaaggtaaacgcgtataatatttcggagaacatgtataaagccgatctcaaggacctaagcaagaagggctacgatttgcggactgacgctattcccatcagagcagcgaaggctgcgagacaggccgcctcagatgtccagtacaaaaaagactacgagaaggccaagggcaagatggtgggcttccaaagtttacaagacgatcctaagcttgtgcattatatgaacgtagcgaaaatacagagtgatagagagtataagaaggattatgagaaaacaaagtcaaagtataatactcctcacgatatgtttaatgtagtcgccgcaaagaaggcccaagacgtggtatctaatgtcaactacaaacacagtctgcaccactacacctaccttcctgacgccatggatctcgagctcagcaagaacatgatgcagatccaatccgacaatgtttataaggaggattacaataactggatgaaaggaatcggctggatccccatcggttcccttgacgtcgagaaggtcaaaaaggcgggagatgctttgaacgaaaagaaataccgtcagcatccagacactctgaagttcaccagtattgtcgacagtcccgttatggtgcaggcaaaacagaacacaaaacaggttagcgacattctctataaggccaaaggcgaagacgtgaaacacaagtatacaatgagcccagacttaccacagtttctccaggcaaagtgcaacgcttacaacatttcagacgtgtgttataagagggactggtacgaccttatcgctaaaggcaacaatgttcttggggacgccatccctatcaccgctgcaaaagccagccgcaatatcgcatccgattacaaatacaaggaggcttatgagaagagcaagggcaaacatgtgggattccggtcccttcaggatgaccctaagctggtccactacatgaacgtagccaagctccagtccgaccgggagtacaagaagaattacgagaatacgaaaaccagctatcacacacctggagatatggtctctatcaccgcagccaagatggcccaggacgtcgcaactaacgtgaattacaaacaaccgctgcatcattatacatacttgcctgacgccatgtcccttgaacatacccgaaacgtgaatcagattcagagtgataacgtctataaggatgagtataacagcttccttaagggcatcgggtggattcccatcggatctttagaggttgagaaggtgaagaaggctggggatgccttaaacgagcgcaagtaccggcagcaccctgatactgtcaaattcacttctgtgcccgacagcatgggtatggtcctggctcagcacaatacaaagcagctgagtgatctaaactacaaggttgagggggagaaactcaaacacaaatacacaatcgaccccgagctgccgcagtttattcaggccaaggtaaacgccttgaacatgagcgacgcacattacaaggccgattggaagaagaccatcgcaaagggctatgacctgcgcccagatgccatccccattgtggccgccaagagttcacgcaacattgcaagtgactgtaagtataaagaggcttacgagaaagccaaaggaaagcaagtgggtttcctctccttgcaggatgaccctaagctggtgcactatatgaatgtcgccaagatccaatccgatcgggagtacaagaaaggctatgaggctagtaaaactaagtaccatacgcccttagatatggttagcgtcacagccgctaagaagagccaggaagttgccaccaatgccaactaccggcagagttaccatcattacacgctactgcccgatgccttgaacgtcgaacactcccgcaatgcgatgcaaatccagtctgataatctgtataagtccgattttacgaattggatgaaggggatcgggtgggtgcctatcgaatctctcgaagtggagaaagccaagaaggctggagagatcctgagtgagaagaagtacagacagcaccccgagaagttgaagttcacatacgctatggataccatggagcaagcgctgaacaaatcaaataaattgaacatggataagcgactatacacagagaagtggaacaaggataagactactatacatgtaatgcccgacacccctgatattttactgtctagagttaaccagattaccatgagcgataagctttacaaagccggctgggaggaggaaaaaaagaagggctacgatttgcgcccagacgcgatcgccatcaaggctgcccgggcctcgagggatatcgccagtgattataaatacaaaaaggcatatgagcaagccaagggtaagcacataggattcaggagtctagaggatgaccctaaattggtccactttatgcaggttgctaaaatgcagtccgatcgggagtacaagaaaggctacgagaaaagcaagactagcttccatacccccgtcgacatgctgtcagtcgtggcagcgaaaaaaagccaggaggtggccaccaacgcaaactacaggaacgttattcacacgtataatatgttgccagatgcaatgtccttcgagctagccaaaaacatgatgcagatccagtcagacaatcaatacaaggctgactacgcagatttcatgaaaggaataggctggctaccccttggcagtctcgaggctgaaaagaacaagaaagccatggagattatctctgagaaaaagtaccgccagcatccggatacactcaagtacagcaccttaatggacagtatgaatatggtgctggctcagaataacgccaagatcatgaacgaacacctgtacaaacaggcctgggaggccgacaagactaaggttcatatcatgccagacatcccacagattattctggccaaagccaacgctatcaacatgtcagacaagttatataaactgtcgctggaggaaagtaagaagaaagggtatgatcttcgcccagacgcaatccctattaaggccgcaaaagcgtcacgcgatatcgcctccgactacaagtacaaatacaattacgaaaaggggaagggcaagatggtgggcttccgctcccttgaagatgatcctaagcttgtccattcaatgcaggtggccaagatgcagtcggacagagaatataagaagaactacgaaaatacgaagacctcctatcatacccccgccgacatgctcagtgttaccgctgccaaagacgcccaggcgaacataactaatacgaattacaagcatctcatccataagtacattttgttgcctgacgccatgaacatcgagctcactcgcaatatgaaccgtatccagagcgataacgagtataaacaagactataacgagtggtacaagggacttggctggtctcctgccggctccctggaggtggagaaagctaaaaaggctaccgaatatgcttctgaccagaagtaccggcagcatccatccaacttccagtttaaaaaactcaccgattcaatggatatggtgctggcaaagcagaacgcccatactatgaataaacatctgtacacaatcgattggaacaaagataaaaccaagatccatgtgatgccagatacaccggatatcctgcaggccaagcagaaccagactctgtattctcagaaactttacaaactcggatgggaggaggcactaaagaaagggtatgacctgcctgtggatgccatatccgtgcagctggccaaagcatccagggacatagcttcagattacaaatataagcaaggatatcgcaaacagctggggcatcacgttggcttcaggtctttgcaggatgatccaaagttggtactctccatgaatgtggctaaaatgcaatcagagcgagagtacaagaaagactttgaaaagtggaaaacaaaattctctagccctgttgacatgctcggcgtggtgctcgccaaaaagtgtcaagaactcgtgagtgacgtagactacaaaaactatcttcaccaatggacttgcctgcctgatcaaaacgacgttgtgcaggccaagaaagtgtatgaactacagagcgagaatttgtataagtccgatctcgaatggctgagagggatcggctggtcgccactaggaagcctggaggcagagaagaataagagagccagcgaaattatttctgaaaagaagtataggcagcctcccgaccggaacaagtttacgtcaattcctgacgctatggacatagttctggcaaagactaacgctaaaaaccggagcgacaggctttaccgggaagcttgggacaaagacaagacacagattcacatcatgccagataccccagatatagtgctggccaaggcaaatttgataaacacaagtgacaaactgtaccgcatgggatatgaagagcttaagcgcaagggatacgatttacctgtggacgcgatccccataaaagcagcaaaagccagcagagaaatcgcctcggaatacaagtataaagagggctttagaaagcagttgggccaccatatcggtgcaagaaatatcgaagacgatcctaagatgatgtggtcaatgcatgttgcaaagatccagtccgacagagagtataagaaggactttgagaagtggaagaccaagtttagctcacctgtggacatgctgggcgtcgttttagctaaaaagtgccagactctcgttagtgatgtggattacaagaactaccttcaccagtggacttgtctgcccgatcagagtgatgtgatacacgctagacaagcttacgatcttcaatcagataacctgtacaaatccgacttacagtggctcaaagggattggctggatgacatcagggagtctggaggacgagaaaaataagagagcaacgcagattctatctgatcacgtgtacaggcagcaccccgatcagtttaagttctcctcactaatggatagcatacccatggtattagccaagaataatgctatcacaatgaaccatagactgtacaccgaggcgtgggataaagacaagacgacagtccacataatgcccgataccccagaggtgttattggctaaacagaataaggtgaactattctgagaagctatataagctggggttagaggaggcaaaacgcaagggctatgacatgagagttgacgcaattcccatcaaagcagctaaggctagcagagatatcgctagcgagttcaagtataaggagggataccgtaagcagctaggacatcacattggagcacgcgctatacgagatgacccgaaaatgatgtggtccatgcatgttgccaagatacaatcagatagggagtataaaaaagatttcgagaagtggaagaccaagttctccagccctgttgacatgctgggagttgtccttgcaaaaaagtgtcagaccctggtgagtgacgtcgactataagaattacctgcaccaatggacgtgcctacccgatcaatccgacgtcatccacgctaggcaggcctatgacctgcagagtgataatatgtataagagcgacctgcaatggatgagagggatcggctgggtgagcattggctccctggatgttgagaagtgcaagcgtgccaccgagatcctgagtgataaaatttatagacagcctcccgaccggtttaagttcacatccgtgaccgactccctggaacaggtcctcgccaagaacaatgctattacgatgaataagagactctatacagaagcatgggacaaggataagacacagatccacatcatgccggacacccctgagatcatgcttgctcggatgaacaaaatcaattatagcgagagcctgtataagctggcaaacgaggaggctaagaagaagggatatgatctgcgatccgacgcaattcccatcgtggccgccaaagcgtcgcgagacatcattagcgactataaatataaggatggatactgtaaacagctagggcaccacatcggggccaggaatatagaagacgatcctaaaatgatgtggagcatgcatgttgccaagatccagagtgacagggaatataagaaggattttgagaaatggaaaaccaagttctcttccccagtggacatgctgggcgtcgtcctggctaaaaaatgccaaaccctagtctccgacgtggactacaagaattacctgcatgaatggacctgcttgccagatcagtcagacgttatacacgcccgtcaagcatatgacctgcagtcagataacatctataaaagtgatttgcagtggcttcgagggataggctgggtgcccatcgggagcatggatgtagtgaaatgtaagagagccaccgaaatcctctccgataacatttatagacaaccgccggataaactgaagtttactagcgtgactgattcattagagcaggtgctagctaaaaacaacgcactcaacatgaataaacgactctatacggaagcctgggacaaagataaaacccagattcacatcatgccagataccccagaaattatgcttgcacggcaaaataagattaattacagcgagactctgtataaactggcgaatgaagaggccaaaaaaaaaggctacgaccttaggagcgatgctattccaatcgtggcggctaaggctagccgtgacgtcatatccgattacaagtataaagacggttaccgcaagcagcttggacatcacattggggctaggaacattgaagatgatcctaaaatgatgtggagcatgcatgtagcgaagatccagagcgacagagagtacaaaaaagacttcgaaaaatggaagaccaaattttcttcccccgtcgatatgctgggggtggtgctcgctaaaaagtgccagacgctggtgtccgacgtggattacaaaaattatcttcacgagtggacgtgcttgcctgatcagaacgacgtgatacacgccaggcaggcctatgatctccaatcagataacatctataaatccgacctgcagtggctccgtggcatcggctgggtccccattgggtcaatggatgtggtgaagtgcaaacgtgctgccgaaatactgtcagataacatctatcgacagccacctgataagctaaaatttacctcagtgaccgactccctcgaacaggtactagccaaaaacaatgcccttaatatgaataaaagactgtataccgaggcctgggataaagacaaaacacaagttcacataatgcccgatacacctgagataatgctggcgcgccagaacaaaatcaattacagcgaatccttatatcgacaggctatggaggaagccaaaaaggaggggtacgatctgcgttccgacgctattcctatcgtggccgctaaggcttctcgcgatattgccagcgactataaatataaagaggcttatcgcaagcaactgggccaccatatcggcgcaagagcagtacacgatgatcccaaaatcatgtggagtttgcatattgccaaggttcagtccgaccgcgagtataaaaaggacttcgaaaaatacaagactaggtacagctcacccgtggacatgttgggaatcgttctagctaagaagtgccagaccttagtgtccgacgtggactacaagcatcccttacatgaatggatctgcctccccgaccaaaatgatataatacacgcgcgtaaggcctacgatctccaaagcgacaatctctacaagagcgacctcgagtggatgaaaggcatagggtgggttcctatagacagcctcgaggttgtgcgcgccaagcgggccggcgagctgctgagcgacacgatttacagacaacggcctgagacactcaaattcaccagtattactgatacacctgagcaggtgcttgctaaaaacaacgcgctgaatatgaacaagcggttatacacggaagcttgggataacgacaagaaaactattcatgtgatgcctgataccccggaaatcatgctagccaaacttaaccgaatcaactatagtgataagttgtacaagctcgccctcgaagaatctaagaaagaggggtacgacctacggcttgatgccattccaattcaggctgcgaaagcctccagggatatcgcaagcgactataagtataaggagggctacaggaaacagctgggccaccacataggtgcaagaaatatcaaagatgaccctaagatgatgtggagcatccacgtggcaaagatacagtccgaccgagaatataagaaagagttcgaaaagtggaaaactaaattttcctcaccagtggacatgctcggcgtggtcttggcaaagaagtgccagatcctcgtgagcgatattgattataagcatccattgcacgagtggacgtgcttacccgaccagaacgatgttatccaagcccgtaaagcttatgacctgcagtcagatgcaatatacaagtccgatcttgaatggcttaggggcattggatgggtgcctatagggtcagtcgaggtggagaaagtcaaacgggcgggggagatactatccgatcggaagtaccggcagccggctgatcagctcaaattcacctgcatcacagacacccctgaaatcgtcttggccaagaacaacgcactaacaatgtccaagcatctgtacaccgaagcatgggacgctgataagacttcaattcacgtgatgcccgatacacctgacattctgcttgccaagtcgaacagcgcaaatatctctcagaaactgtacacaaagggctgggatgagtccaagatgaaggactacgatctccgtgctgacgctatttccattaaaagtgcaaaggcttcccgcgacattgcttcggattataagtacaaggaggcgtatgaaaaacagaagggccaccacatcggcgcacaatccatcgaggacgaccccaagatcatgtgcgccattcacgcaggtaaaattcagagcgaacgagaatacaagaaggagtttcagaagtggaagaccaaattttcctctccagtcgatatgttgtctatcctcctcgccaagaaatgccagactctcgttacggacattgactatcgcaattacttgcacgagtggacatgtatgcctgatcagaatgatattatccaggcaaaaaaggcctacgatctacaatccgacagcgtgtataaggctgacctggagtggctacgcggcattggctggatgccggagggtagcgttgaaatgaacagagtgaaggtcgcacaggaccttgtgaacgagaggttatataggacaagacctgaagccctttcattcacatccattgtggacacccccgaggtggtcctcgccaaggctaactccctgcagattagcgagaaattgtaccaggaggcctggaataaggacaaatcaaatattactataccctcagacacaccagaaatgctccaggcccatattaatgccttgcagatctccaataaattgtatcaaaaagattggaacgacgccaagcagaaggggtatgacattagggccgatgcgatagagatcaaacatgccaaggcttcccgcgagatagctagtgagtacaagtacaaggaaggatatagaaagcaactaggccatcacatgggattccggacactgcaagatgatccgaaaagcgtctgggctattcatgccgcaaaaatccagagcgatcgagagtataaaaaggcttacgagaagtctaagggcattcacaacactccgcttgacatgatgtcgatcgtacaggcaaaaaagtgccaggtgctggtgtctgacattgactacaggaattacctccaccagtggacttgcctgcccgaccagaatgacgtgatccaagccaagaaagcatatgacctgcaaagcgataacctgtataaatccgacttagaatggttgaagggtattggctggctgcccgaaggaagcgttgaggtaatgcgcgtgaaaaacgcccagaatttactgaacgagcgcctgtacaggattaaacccgaggctcttaagttcacttccattgtcgatacaccagaagtgatccaggcaaagataaacgccgtgcagatctccgaacctttgtatcgtgatgcctgggagaaagagaaggcaaacgtgaacgtcccggccgacacccctttgatgttacagtccaaaatcaacgcactccagatctctaacaaaagatatcagcaggcttgggaagacgttaagatgactggttacgacctcagagcggacgcgatcggcatccagcacgcaaaagcctcacgcgacatagcttcggattacctctataaaaccgcttacgaaaaacagaagggtcactacattggctgccggtcggccaaagaggaccctaagctggtgtgggctgctaacgtcctgaaaatgcagaacgatcgattatacaagaaagcctataacgatcacaaggctaaaatctccattccagtagatatggttagcatcagtgcagctaaggagggacaggccttagcatcagacgtggattatcgacactacttgcaccactggtcatgcttccctgaccagaacgacgtgattcaggcacggaaggcgtacgacctgcagagtgactccgtctataaggctgaccttgagtggcttcgggggatcgggtggatgccggaaggatcagtggagatgaacagagtcaaagtggctcaggatttagtcaatgagcggctctatcggacacgtcctgaggctttatccttcaccagcatcgtcgatacccctgaggtcgtgttggccaaagccaactctctacaaatctcagagaaactgtatcaggaggcctggaataaagacaagagcaacatcaccatcccttcggacacacccgagatgctacaagctcatattaatgccctgcagatttccaacaagctataccagaaggactggaacgacactaaacagaagggctatgacattcgcgccgatgcaatcgagatcaaacatgctaaagcgagccgagagatagctagcgagtacaagtacaaggagggttacaggaagcagctgggtcaccatatggggtttcggacgcttcaggacgaccccaagtccgtgtgggcaatccacgctgcaaagatacagtcagacagggagtataaaaaagcctatgaaaaatctaaaggtatccataatacacctctggatatgatgtccatcgtgcaagcaaagaagtgccaagtgctcgtgtccgatatcgactaccgtaattacctgcatcaatggacatgcctgccagatcagaacgacgttatacaggcgaagaaagcttacgaccttcagtcggacaacctgtacaagagcgacctggaatggctaaaggggattgggtggctaccggaagggtccgtggaggtgatgagggtgaaaaacgcccagaatctgttgaacgagcggctgtaccgcatcaagcctgaggcactaaagtttacgagcatcgtagatactccagaggttatccaggccaagatcaacgccgttcagatctcagaacccctgtacagaaatgcgtgggaaaaagaaaaggctaacgtgaacgtacccgccgatacgcccctgatgttacagagcaagatcaatgcccttcagatatcaaacaagaggtatcaacaagcatgggaagacgtcaagatgactgggtacgacctgagagctgacgctatcggcattcagcatgctaaggccagcagagacattgcttccgactacctctacaagaccgcatacgagaaacagaaagggcattacattggatgcaggagtgcgaaggaggaccctaaactggtgtgggctgccaatgtcctgaagatgcagaatgatagactgtacaagaaagcttacaatgaccacaaggccaagatcagtatacccgtggacatggtcagcatatcagccgctaaagaaggccaggctctggcttcagacgtggattacaggcattacctgcaccactggtcctgcttccctgaccagaatgacgtgatccaggctaggaaggcctacgatcttcagagtgacagcgtatataaagccgatctcgaatggctgcggggtatcggctggatgcccgagggctctgttgaaatgaacagggtcaaggtggctcaggacctggtcaatgagcggttatatcggacgcgccccgaagccctgtctttcacgagcattgtcgacaccccagaggtggtgctggcaaaggctaacagtctgcagattagcgagaagctttatcaggaggcctggaataaagacaaaagtaacattaccataccctctgacaccccggaaatgctgcaggcccacatcaacgccttacagatctcgaacaaactgtaccagaaggattggaacgatacgaagcaaaaaggctacgatatccgggcggatgctatcgagattaaacatgctaaggccagccgcgagattgcaagcgaatataaatataaagagggctacaggaaacagctaggacaccacatggggttccgcaccctgcaggacgaccctaaatccgtatgggctatccatgcggctaaaatccagtctgaccgggagtataagaaagcctacgaaaagagcaagggcatccacaataccccccttgacatgatgtccattgtacaagccaaaaagtgtcaggtgctggtgtctgacatcgattacaggaattaccttcatcagtggacatgcctgcccgatcagaatgacgtgatccaggctaagaaggcgtatgacctgcaatctgataacttgtacaaatccgatcttgaatggttgaagggcatcggctggctgcccgaggggtccgttgaggtcatgcgagtgaaaaacgcacagaatctgttaaacgaacgtctgtataggatcaaacccgaagcgctcaagttcacaagtatagttgatacccccgaggtcatccaggcgaaaataaacgctgtacagatctcagagcccctttaccgcgacgcctgggaaaaagagaaagcaaacgtgaacgtaccagccgacactccactgatgctgcaatctaagattaatgctctacaaatctcaaacaagcggtatcagcaggcttgggaagacgtaaaaatgacagggtacgacctgagagctgatgctattgggatccagcacgcaaaagcctctcgggacatcgcctctgactacctgtataagacagcttatgaaaaacagaaaggccattacattggatgtcgctccgcaaaggaggacccgaagctcgtatgggctgctaacgtgctgaaaatgcagaacgaccgattgtacaagaaagcttataacgaccacaaggccaaaatttctatccctgtggacatggtttcaatcagtgcagccaaagagggccaggcactggcctcggacgtggattaccggcactacttgcaccgctggtcatgtttccccgaccagaatgatgttatccaggcccgtaaagcttatgacctgcagtctgacgcactctacaaagctgacctggagtggttacgcggcatcggatggatgccccagggttctccagaggtactgcgcgtaaagaacgcccagaatatcttttgcgacagtgtgtacaggactcccgttgtgaatctgaaatacacttcgatcgtggacacaccggaggtggttttggcgaaatccaacgctgagaatatctctataccaaagtaccgggaagtttgggacaaggacaaaacaagcattcacattatgcctgatacccctgaaattaatctggctagagcgaatgcccttaatgtctctaataaactgtatcgggagggctgggacgaaatgaaagccggctgcgatgtgaggctagacgctatccctatccaagctgcaaaggcttctcgtgaaatcgcctctgattataagtacaagctggaccatgaaaaacagaaagggcactatgtgggaactctgacggccagggatgataacaagattcgctgggctctcattgccgataaacttcagaacgaacgagaatataggctggattgggctaaatggaaggccaaaatccaatcccccgttgacatgctctcaattttgcactcaaaaaacagtcaggcccttgtctctgacatggattacaggaactatctccaccagtggacatgtatgcccgaccaaaacgacgtgatccaggcaaaaaaagcttatgagttacagtccgataatgtatataaggccgacctcgaatggctccgcggaatcggctggatgccaaatgattcagttagtgttaaccacgcaaaacacgccgcagacatcttcagtgaaaaaaagtacaggaccaagatagaaacattgaattttacacctgtggacgaccgagtggattatgtgactgccaaacagtcaggggaaatcctggatgatattaagtaccgcaaggactggaacgctaccaagtccaagtatacactgacggaaacccctctacttcatacagcccaggaagccgccagaatcctcgaccaatacctgtacaaggaaggatgggagaggcagaaagctactggctacatcctgcctccagacgcagtcccttttgtgcacgcccatcattgcaatgacgtgcagagtgagctgaaatataaggctgagcatgtgaagcagaagggccactacgtgggcgttcccactatgcgagacgatcctaagctagtgtggttcgaacatgccgggcagattcagaacgagagattgtataaggaggattaccacaaaactaaggccaaaattaatatacctgccgatatggtgtcagtgctggcagccaaacagggacagaccttggtctccgatattgattacagaaattacctacatcaatggatgtgccaccctgaccaaaatgatgtgattcaagcacggaaagcctacgatttgcagtcagataatgtgtacagagctgatctggaatggctacggggcattggctggatccctttagatagtgtcgaccacgtgcgagtaacaaagaaccaggaaatgatgagtcaaattaagtataaaaagaatgctctggaaaactacccaaatttccgcagcgtcgtggatccgcctgaaatagtgctcgcgaagatcaacagcgtcaatcagtcagatgtcaagtataaggagacgttcaacaaggctaaggggaaatacacctttagtcccgatactccacatatatcccacagtaaggatatgggcaagctttactctactattctgtacaagggagcttgggagggtactaaggcttatggctacaccttagatgagaggtacattcccattgttggtgccaaacacgccgatctcgtgaactccgaactgaagtacaaggagacctacgagaagcagaaaggccactacctggccggcaaggtgataggagaatttccgggcgtcgtgcattgcctagactttcagaagatgcggtcagccctgaactaccgtaaacactacgaggatactaaagcaaacgtgcacatccctaacgacatgatgaaccatgttctggccaagaggtgccagtacattctcagcgatctggaatacagacactacttccaccaatggacatcgttgctggaggagccgaatgtcatccgtgtgcgaaacgcccaggaaatcctgagtgataacgtctataaagacgacctgaactggctgaagggcataggctgctacgtgtgggacacaccacagatccttcatgctaagaagtcgtacgatttacagtcccagctgcagtatactgccgccggaaaagaaaatctgcagaactacaacctagtgactgacacacccctctacgtgacagccgttcaaagcggaatcaatgcctcggaagttaaatataaggagaattaccaccagataaaagacaaatacacgactgtgttagaaacagtggactacgaccgaacacgcaacctcaaaaatctgtacagcagcaatctgtataaagaagcgtgggatcgagtgaaggctactagctatattctgccatcctccaccctaagtctgacccatgcaaaaaatcaaaaacatttggccagtcatattaaatacagagaggaatatgaaaagtttaaagccctgtacacgctgccgcgaagcgtcgacgatgaccctaatacagccaggtgtttacgggtgggaaaactgaatatcgacaggctctacaggtccgtttatgagaaaaacaagatgaaaatacacatcgtgcctgatatggtcgaaatggttacagcgaaggactctcagaaaaaagtgtctgagatagactatcgcctaagactgcacgagtggatatgccaccctgacctccaggttaatgaccatgtccggaaagtgacagatcagatctctgacatcgtgtacaaagacgacctgaattggttaaaggggattggctgctacgtgtgggacactccagaaattctgcatgccaaacacgcctacgacctaagggacgatattaagtacaaagcacacatgctgaagacaaggaacgattataaactcgtgaccgacaccccagtctacgttcaggcagttaaaagcgggaaacagctgtccgacgccgtgtaccattatgactacgtgcacagcgtacgggggaaagtcgctcctaccactaagaccgttgacctggatagagctttgcatgcgtacaagttacagagcagcaacctgtacaagacctcccttcgcaccctccctactgggtacaggctgccgggcgacacccctcattttaaacatatcaaagacactcgctatatgtccagttacttcaagtacaaggaagcttatgaacacactaaggcgtacggctacaccctgggacctaaggacgttccttttgtgcacgtgaggcgcgtgaacaacgtgacatccgagagactgtatagagaactgtatcacaaactgaaggataaaatccacaccacacctgacacaccagaaatccgccaggtaaagaaaactcaggaggcggtctcagaacttatctacaagtccgatttcttcaagatgcagggacatatgattagcctgccctacaccccacaggtaatccactgccgctatgtaggagatattacttcagatatcaagtataaagaagacctccaggtcctcaaaggcttcggatgttttctttatgatactcctgatatggtgcggtcccgtcatctgaggaagctgtggagtaactacttgtatacggacaaagctaggaagatgcgtgataaatataaggtggtgcttgataccccggaataccgcaaggtgcaggaactaaaaactcatctctcggaactcgtttaccgggctgcaggaaagaaacagaagtccatattcacttccgtccctgatacacccgatctccttagagcaaagcgaggacagaagctgcaaagccagtatctgtacgtggagttggctacgaaggagaggccgcaccaccacgcagggaaccaaacaacagccctgaagcacgccaaggacgtgaaagacatggtgagtgagaagaagtacaaaatccagtacgagaaaatgaaggataagtatactcctgttccggacactccaatcctgattagggccaagagagcatactggaacgctagcgaccttaggtacaaggagacgtttcagaagactaaaggtaagtatcatactgttaaggatgcgctcgatatcgtctatcaccggaaagtgaccgatgacatttccaagattaaatacaaggaaaactacatgtctcagctgggtatctggcggtcaatccccgatagacccgagcacttccatcacagagcagtaactgatacagtctcagacgtcaagtacaaggaggatctcacatggctgaagggcatcggctgctacgcctacgatacccccgactttacactcgctgagaaaaataaaaccctctattccaaatacaaatacaaagaggtgtttgaaagaacgaaaagtgattttaaatacgtcgctgactctcccattaaccgacatttcaaatatgccacccagcttatgaatgagcgtaaatacaagtcatccgccaaaatgttcctccagcacggctgcaatgagatactgaggccagacatgctgaccgccctgtacaactctcacatgtggtctcagatcaaataccggaagaattatgagaaatctaaggacaagttcacatccatcgtggatacgccggaacacctgaggacaacgaaagtcaataagcaaatatccgatattctgtataaattagaatacaacaaggccaagccacgcgggtatactacgatccatgacacacctatgctgcttcatgttcgtaaggtcaaggacgaggtgagtgacctgaagtataaagaagtgtatcagcgtaataaatctaactgtactattgaaccggatgccgtccatattaaggccgcgaaagacgcctacaaggtcaacactaatctggactataaaaaacagtacgaagccaacaaggcccattggaaatggacacccgacaggcccgattttctccaagcggctaagagttctctgcagcaatcagattttgagtataagcttgatcgcgagttccttaagggttgtaagttgtcagtgaccgatgataagaatacagttttagcactcagaaatactctgatcgagtccgacctgaagtataaggaaaagcacgttaaagagagaggaacctgtcacgccgtaccagatacacctcaaattctcctggcgaaaacggtaagcaatttagtgagcgaaaataaatataaggatcacgtgaagaaacacttggcccaaggatcgtatacaactcttcctgaaacaagggacactgttcacgtgaaggaagtgaccaagcacgtgagtgatacaaattataagaaaaaatttgttaaagaaaagggtaaaagcaactactccattatgttggaacctcctgaggtcaagcatgctatggaagtcgctaaaaaacaaagcgatgtggcttatagaaaggacgcaaaggagaacctgcactacaccacagtagcagacaggcctgatataaagaaagctacccaggctgctaagcaggcgtccgaagtcgagtacagagccaagcaccgcaaggaagggtctcacgggcttagcatgctcggacggcctgatattgagatggctaaaaaggcagctaagttgtcctctcaggtgaagtatcgtgaaaatttcgataaagaaaagggaaagacaccaaagtacaatcctaaggatagccaactgtacaaggtgatgaaggatgcaaacaatttggcctcagaagtgaaatacaaagcagacctcaagaagctacacaagcccgtcaccgatatgaaagagagcctgatcatgaaccacgtgttaaacaccagccagctcgcttcctcttaccagtataagaaaaagtacgaaaagtccaagggccactatcataccatccccgataatctcgaacagctgcatttaaaggaggcaacagaactgcaatcaatcgtgaagtataaggagaagtatgaaaaggagcgggggaagcctatgttggattttgagacacctacatacatcaccgctaaggagtctcaacagatgcagagcggcaaggaataccggaaggactacgaagagtcaataaaggggagaaacctgacaggactggaagtcacgccagcgcttctgcacgttaaatatgccacgaagattgcttccgagaaagagtaccggaaagatcttgaggaatccataaggggcaaaggactgaccgagatggaggatacaccggatatgctcagagccaagaatgctacacagattctaaacgagaaagaatacaaaagagacctcgaactggaggttaagggtcgcggactgaacgccatggctaatgagacccctgacttcatgcgagcccgtaatgcgacagatattgcatcacagatcaaatacaaacagagcgcagaaatggaaaaggcaaattttacatcggttgtcgacacgcctgagatcattcacgcccaacaggtcaagaatttgtccagccaaaagaaatataaggaagatgccgagaagagcatgagttattatgaaaccgtgctcgatactccagaaatacagcgggttcgggaaaaccagaaaaactttagtttactccagtatcagtgcgatctcaagaatagcaagggcaagataacggtggtgcaagatacgccggaaattctgagggttaaagagaatcaaaaaaatttctcctccgtcctctacaaagaggacgtgtcccctggaaccgccattggcaaaacgcccgagatgatgagagtaaagcaaacccaagatcatatcagtagcgtaaaatacaaagaggccataggacaagggacccctatccctgacctccccgaggtgaaaagagtcaaagaaactcagaagcatatcagtagtgtaatgtacaaagagaacctggggacaggaatcccaacgactgtgaccccggaaatcgaaagagtgaagcgaaatcaggagaattttagttcagttctatacaaagaaaatttggggaaagggataccgaccccaattacacctgagatggagagagtaaagcgaaatcaggaaaatttttctagcatcttatataaagagaacctgagcaagggcactccgctgcctgtgaccccagagatggaacgcgtcaagctaaatcaggagaacttctctagcgtgttgtacaaggagaacgtgggaaaagggattcccatacccatcacaccagaaatggagcgtgtgaagcataatcaggagaacttttccagtgtactgtacaaggaaaatctgggaactggtatcccaatcccgataaccccagaaatgcagagggtgaagcacaatcaggagaaccttagttctgtcttgtacaaagagaacatggggaaggggacacccttacctgtcacccctgagatggaacgcgttaaacataaccaggagaatattagctctgttctgtataaggagaacatgggcaaggggactcctttgccagtcaccccagagatggaaagggtgaagcataatcaggaaaacatctcctctgttctttataaagagaatatgggaaagggaacccccctggcggtgaccccagagatggagcgcgtgaaacacaaccaagaaaacatcagttctgttctatataaggaaaacgtggggaaggcgacagctaccccagtcacgcctgagatgcagcgcgttaagcggaatcaagagaatataagcagtgtcttatataaggaaaatcttggaaaagcaacgcccactcctttcacgcctgaaatggagcgcgtaaagcgaaatcaggagaattttagttccgttctgtacaaagagaacatgcgcaaggctacaccaactcctgtgacccctgagatggagagggctaaaagaaatcaggaaaatatcagcagcgttctgtattccgacagttttcgtaaacagatccagggtaaagctgcctacgtgctcgacactccagagatgcgccgggtccgcgaaacgcagcgccatattagcaccgtcaagtatcacgaagactttgaaaagcataaaggttgtttcacacctgtggtaacagaccccataaccgaaagagtaaaaaagaatatgcaggatttctctgatatcaactatcgggggattcagcgcaaggtggtggagatggagcagaagcggaatgaccaggatcaggaaaccattaccgggctgagggtatggcggaccaacccaggatccgtcttcgactatgatccagcagaagacaatatccagtcgagatccctgcacatgataaacgtgcaggcgcagcgccgaagccgtgagcagtctagatccgcctccgccctgagcatatccggcggagaagagaagagtgaacattccgaagcaccggatcaccacttatcaacttactctgatggaggcgtgttcgcagtctccactgcatacaaacatgctaagaccaccgagctaccccagcagaggtcgtccagtgtagccacacaacaaacaacagtaagttcaatcccctctcatcctagcaccgcaggcaagatttttagggctatgtacgactacatggccgccgacgccgacgaggtgagttttaaagatggggatgcgatcatcaatgtccaggctatcgacgaaggatggatgtatggcactgttcaacggaccggccgtactggaatgctgcccgcaaattatgttgaggcaatctag

SEQ ID NO: 62994 - DNA, 26202 bp, Artificial Sequence
  derived and/or modified sequence
aggcatcacgctggcttttgcctggggttctcaggaggggagagttgggagaggctttgctgctgaggaaatttatttggtagattgaaggtttgaacgagagctacagaaacgaaagaaaaagtctgtataagccaatggtgttcgggaagaaaataaccccattgccttgagtttgtaggtgccactactactctggaaaaatggcagatgacgaagactatgaggaggtggtggagtactacacagaagaagtggtttacgaagaggtgccgggagagacaataacaaaaatttatgagactacgacaacaaggacatctgactatgagcaatcagaaacttccaaaccagctctggcacagccagcactggcacagccagcatcagcaaagccggtggagaggaggaaggtcatccggaagaaagtggatccttcaaagttcatgaccccctacattgcacacagtcagaaaatgcaggatctttttagcccaaataaatacaaggagaagtttgagaaaacaaaaggacagccatacgccagcacaacagatactccagaacttcgcagaatcaaaaaagtacaagatcaactcagtgaggttaagtatcgaatggatggtgatgttgctaagactatatgtcacgtagatgaaaaagcaaaggatattgaacatgcaaagaaagtgtcgcagcaagtcagtaaggttttatacaagcagaactgggaagacaccaaggataagtacctgcttcctcctgatgcccctgaacttgtccaggccgttaagaacaccgccatgttcagcaagaaactgtacactgaagactgggaagcagacaaaagtttgttttacccctataatgatagcccggaactgaggagagttgcccaggcccagaaagctctcagtgatgttgcctacaaaaaaggtctcgctgaacagcaagctcaattcacgcctctggctgatcctccagatatagaatttgccaagaaagtaaccaatcaagtgagcaagcaaaaatacaaagaagactatgaaaataaaatcaaaggcaaatggagtgagacaccttgctttgaagttgcaaatgccagaatgaatgctgataacattagcacaaggaaataccaggaagattttgaaaacatgaaagaccagatctacttcatgcagaccgaaacaccagagtataaaatgaataaaaaagctggtgtggcagctagcaaggtaaaatacaaagaagactatgaaaagaataaaggaaaagcagattataatgtgcttcctgcttcagagaacccacagcttaggcagctgaaggcagcaggagatgccctaagtgacaaactatacaaggaaaactatgaaaagacaaaagcaaagagcataaattactgcgagacccccaaattcaagctcgatactgttctgcagaacttcagtagtgataaaaaatataaagattcctacttaaaagatattttgggacattatgtaggcagcttcgaggatccataccattcacactgcatgaaagtcacagctcaaaacagtgataaaaactacaaagcagaatacgaagaagacagaggcaaaggcttcttccctcagaccataactcaagaatatgaagcaattaagaaactagatcagtgtaaagaccacacctacaaagtccatccagataagacaaaattcacccaagttacagactctcctgttctgctacaagcccaagtcaattccaaacaactgagtgacttaaattacaaagcaaaacatgaaagtgaaaagttcaagtgccatatcccccctgatactcctgcttttatccagcacaaagtcaatgcctataacttgagtgataatctttataagcaagactgggagaagagcaaagccaaaaagtttgacattaaagtggatgccattcccctgctggcagccaaagccaacaccaagaacaccagcgatgtgatgtacaagaaagactatgaaaaaaacaaagggaaaatgattggagtcctcagcattaatgacgatcccaagatgctgcactccttgaaggtggccaaaaaccagagtgatagattatacaaggaaaactatgagaagacaaaggcaaagagtatgaattactgtgagaccccaaaatatcaacttgatactcagctgaagaacttcagtgaggctagatataaagacttatatgtaaaggatgttttgggacattatgtaggcagcatggaggacccatatcacacacactgcatgaaagttgcagctcaaaacagtgataaaagttacaaagcagaatatgaagaagataaaggaaaatgctatttccctcagacaataacacaagaatatgaagcaatcaagaagctggaccagtgtaaagatcatacctacaaagttcatccagataagaccaaattcacggcagtcactgattctcctgtactgttgcaagcccagctcaacacgaaacagcttagtgatctgaattacaaagcaaaacatgaaggtgagaagttcaagtgccatataccagcagatgctccacagtttatccaacacagagtcaatgcctataatctgagtgataatgtttataagcaagactgggagaagagcaaagccaagaagtttgacattaaagtggacgccattcccctgttggcagccaaagccaacaccaagaacaccagcgatgtgatgtacaagaaagactatgaaaagagcaaagggaaaatgattggagccctcagcattaatgacgatccaaagatgctgcactccttgaagacagccaaaaaccagagtgatcgcgaatatcgaaaagattatgaaaagtcaaaaactatctacacggcacctcttgatatgctccaagtcactcaagctaagaaatctcaggcaattgccagcgacgttgattataagcacatcttacacagttacagctacccccctgatagcatcaatgtggaccttgccaagaaggcatatgcgctgcagagcgatgttgaatacaaagctgactacaatagctggatgaaaggttgtggctgggtgccttttgggtccttagaaatggaaaaggcaaagcgagcttcagacatcctcaatgagaaaaaatatcgccaacatccagacaccctcaagtttacctcgattgaagatgctccaattacagtacagtctaaaattaaccaggcccagaggagtgatatcgcttacaaagccaaaggagaggaaattattcacaaatacaacctgccaccagacctgccccagttcatccaggctaaagttaatgcctacaatatcagtgagaatatgtacaaagcagacttgaaagacttgagcaagaagggatatgacctgagaactgatgcgattcccatcagagctgccaaagctgccaggcaggcggcgagtgacgttcagtacaaaaaagactatgaaaaggctaaagggaaaatggttggcttccaaagtcttcaagatgaccctaaactggttcattatatgaacgtggccaagatacaatcagatcgggagtataaaaaagactatgagaagacaaagtccaaatacaacacgccccatgatatgttcaatgtcgtggcggctaagaaagcccaggatgtggtcagcaatgtcaactataagcattctctccatcattacacctacttgcctgacgccatggacctggagctgtctaagaacatgatgcagatacagagtgataacgtctacaaggaagactacaacaactggatgaaaggcattggctggattcctattggcagtctcgacgtcgaaaaagttaaaaaggccggtgatgctctgaatgaaaagaagtacaggcaacatccagacaccctcaaatttaccagcattgtggactccccagttatggtccaggcaaaacagaacacgaagcaagtcagtgatatcttatacaaggctaaaggagaagatgtgaaacataaatacaccatgagtcctgatcttcctcagtttctccaggccaagtgcaatgcttacaatataagtgacgtctgttataaacgggattggtatgacttaatagccaagggcaacaatgtgctgggcgatgctattcccatcactgcagccaaggcatcgagaaacattgccagtgattataaatacaaggaagcttatgagaagtcaaagggaaagcatgtgggtttcagaagcctccaggatgatcccaagctggtccactatatgaatgtggcaaagctgcagtctgatcgtgaatacaagaagaactatgagaacaccaaaaccagctaccatacccctggggacatggttagcatcacagctgcaaagatggcccaggatgtcgctaccaatgtcaactacaaacagccattgcatcattacacatacctacctgacgccatgagtcttgagcatacgaggaatgtcaatcaaattcagagtgataatgtgtataaagacgagtataacagcttcttgaagggcatcggatggatccctattggttccctggaggtggagaaggtcaagaaagcaggcgatgcattaaatgagaggaagtatcgacagcacccagataccgtcaagttcacaagtgtgcctgattccatgggcatggtgttggctcagcataacacaaagcagctaagtgatttgaactacaaggtagagggagagaaactgaagcacaagtatactattgaccctgaattgcctcagtttattcaagccaaagtcaacgccctcaacatgagtgatgctcattataaagcagattggaagaaaaccattgccaagggctatgatttgagaccagatgccatcccaattgttgctgcaaaaagttcaaggaatattgctagtgattgcaaatataaggaggcctacgagaaagccaaaggcaagcaagttggatttctcagtcttcaggatgatcctaaactggttcactacatgaatgtggccaaaatccagtctgatcgtgagtacaaaaagggctatgaagccagcaagaccaagtaccacacacctctggatatggtcagtgtgacagctgcaaagaaatctcaggaggttgccaccaacgccaactacagacagtcataccaccactacactctcctgcccgatgccttgaatgtggagcactccaggaatgccatgcagattcagagtgataatctgtacaaatctgacttcaccaattggatgaaagggatcggctgggtgcccatagagtccctggaggtggagaaggcaaagaaagcaggagagattcttagtgagaagaagtatcgccagcaccccgagaagctgaagttcacttacgccatggacacaatggaacaggcacttaacaagagtaacaaactgaacatggacaagaggctctacactgaaaaatggaacaaggacaagaccaccattcatgtcatgcctgacacaccggatattttactctccagagtaaaccaaatcaccatgagtgataaactgtacaaagctggctgggaagaggaaaagaagaaaggatatgacctgaggcctgatgccattgcaataaaggctgcaagagcctctagagacattgccagtgattacaaatacaagaaagcctatgaacaagccaaagggaaacacattggcttccggagcctggaagatgaccccaagctggtgcacttcatgcaagtggccaagatgcagtcagaccgggaatacaagaagggatatgagaaatccaagacctccttccacaccccggtggacatgctcagtgtggtggcagccaagaagtctcaggaagtggccaccaatgccaactacaggaacgtgatccatacctacaacatgcttcctgatgccatgagctttgaattggccaaaaatatgatgcagattcaaagtgataatcagtacaaggctgactatgctgacttcatgaagggcattggatggctccctctgggctccctggaagcagagaaaaacaagaaagccatggagattattagtgaaaagaagtaccgccagcacccagacactttgaagtattccacactcatggactcgatgaacatggttttggcccagaataatgcaaaaattatgaacgaacatctctacaaacaagcatgggaggctgacaaaaccaaagtccacatcatgcctgatatcccccagattattttggcaaaggcaaatgcaattaatatgagtgataaactctacaaactttccttggaagagtctaaaaagaaaggctatgatctcagacctgatgcaattcctatcaaagctgccaaggcttccagagatattgcaagtgattataaatacaagtacaattatgaaaaagggaaggggaaaatggttggtttccgcagtctcgaggatgatcccaaattagtccattccatgcaagtggctaagatgcaatctgatcgggagtacaagaaaaactatgagaacacaaagaccagctaccacacccctgccgacatgctcagtgtcacggctgcaaaggatgcccaagccaacatcaccaacactaactacaagcacctgattcacaagtacatcctccttccagatgcaatgaacattgagctgaccaggaatatgaatcgcatacagagtgataatgaatataagcaagattacaatgaatggtacaaagggcttggctggagtccagcaggttctctggaagtggagaaggccaagaaagcaactgaatatgccagtgatcagaaataccgccagcacccgagcaacttccagtttaagaagctgactgattccatggacatggtgcttgccaagcagaatgcacataccatgaacaagcatttatacaccattgattggaataaagataagaccaagattcatgtgatgcctgatacaccagatattttacaagccaagcagaatcaaacactgtatagtcagaaactctataaacttggatgggaagaagctttgaagaaaggctatgatctcccagttgatgcaatttctgtacagctagctaaagcttcaagagacattgctagtgattataaatacaaacaaggctaccgaaagcaacttggccaccatgttggattccggagtctgcaagatgacccaaaacttgtgttgtccatgaatgtagccaaaatgcagagtgaaagagaatacaagaaggactttgagaagtggaaaactaagttctccagcccagtggacatgttgggagtggtactggccaagaagtgtcaggagttggttagtgacgtggactacaagaactacctgcatcagtggacatgtctgcctgatcagaacgatgttgtgcaagctaagaaagtttatgaactgcaaagtgagaatctatataaatctgaccttgagtggctgagaggcataggatggagtcccttgggttctttagaggcagaaaagaacaagcgggcttcggaaatcatcagtgagaagaaatatcgtcagcctccagacagaaacaagttcaccagcattcctgatgccatggatatagttctggcaaagacaaatgccaaaaataggagtgatagactttatagagaagcttgggacaaagacaagactcagatccacatcatgcctgatacacctgacattgttctggctaaagcaaacttaatcaacacaagtgataaactctaccgaatgggttatgaggagctgaagagaaaaggttacgatcttcctgttgatgccataccaatcaaagcagcaaaagcctcccgggaaattgccagtgaatacaagtacaaggaaggctttcgcaagcagctcggccaccacattggtgcccggaacattgaagatgaccccaagatgatgtggtccatgcatgtggccaagatccagagtgacagggagtacaagaaggactttgagaagtggaagaccaagttcagcagcccagtggacatgctgggggtggtgttggccaagaagtgccagaccttagtcagcgacgtggactacaagaactacctgcaccagtggacatgcctgcccgaccagagcgatgtcatccatgctcggcaggcctatgacctccagagcgataatttgtacaagtcagaccttcagtggctaaaaggcattggctggatgactagtggttctctcgaggatgagaaaaataaacgagccacccagattttgagtgaccatgtttaccgtcagcacccagatcaatttaagttttccagccttatggattccataccaatggttttggcaaaaaacaatgctattaccatgaatcatcgcctctatacagaagcttgggataaagataaaaccactgtccacattatgccagatacccctgaagttttattagctaaacaaaacaaagtaaattacagtgagaaattgtataagcttggcctagaagaagccaagaggaaaggttatgacatgcgggtagatgccattcctatcaaggcagccaaggcctccagagatattgcaagtgaattcaagtacaaagaaggctatcgtaagcagctcggccaccacattggtgcccgagctatacgtgatgaccccaagatgatgtggtccatgcacgtggccaagatccagagtgacagggagtacaagaaggactttgagaagtggaagaccaagttcagcagcccagtggacatgctgggggtggtgctggccaagaagtgccagaccttagtcagcgatgtggactacaagaactacctgcaccagtggacatgcctgcccgaccagagcgacgtcatccatgctcggcaggcctatgacctccagagcgataatatgtacaagtctgatctccagtggatgagaggcattggctgggtgtccattggctctttggatgtggaaaaatgcaaaagggcaactgaaattttgagtgataaaatctatcgccagcctccagacagattcaaatttaccagtgtgactgactctctggaacaagtgttggccaaaaataatgccatcactatgaacaagcgtttatacacagaagcctgggacaaagacaagactcagatccacataatgccagacacaccagaaattatgttggcaagaatgaacaaaatcaactacagtgagagtctgtacaaacttgctaatgaagaagcaaagaagaaaggctatgacttgcgaagcgacgccatccccatcgtggcggccaaggcctccagggacatcatcagtgactacaaatataaagatggttactgcaagcaacttggccaccatattggagcccggaacattgaagatgaccccaagatgatgtggtccatgcacgtagccaagatccagagtgacagggagtacaaaaaggactttgagaagtggaagaccaagttcagcagcccagtggacatgctgggggtggtgctggccaagaagtgccagaccttagtcagtgacgtggactataagaactacctgcacgagtggacatgcctgcctgaccagagcgatgtcatccatgctcggcaggcctatgacctccagagtgacaatatttacaagtcagatctccagtggctgagaggcattggctgggtccccattgggtctatggatgtggtcaagtgcaagagagctaccgaaatactgagtgataacatctaccgccagcctccggacaagctgaaatttaccagtgtgactgattctctagagcaggtgctggccaagaacaatgctctcaacatgaataagcgtttatacacagaggcctgggacaaagacaagactcaaattcacataatgcctgatacaccagagattatgttggcaaggcagaacaaaatcaactacagtgagactctatacaaacttgccaatgaagaagcaaaaaagaaaggctacgacttgcgaagtgacgccatccccatcgtggctgccaaggcctccagggacgttatcagtgattacaaatacaaagatggttaccgcaagcagctcggccaccacattggagcccggaacattgaagatgaccccaagatgatgtggtccatgcatgtggccaagatccagagtgacagggagtataagaaggactttgagaagtggaagaccaagttcagcagcccagtggacatgctgggagtggtgttagccaagaagtgccagaccttagtcagcgatgtggactacaagaactacctgcacgagtggacgtgcctgcccgaccagaatgatgtcatccatgctcggcaggcctatgacctccagagcgataacatttacaaatctgatctccagtggctgagaggcattggctgggtccccattgggtctatggatgtggtcaagtgcaagagagctgctgaaatactgagtgataacatctaccgccagcctccggacaagctgaaatttaccagtgtgactgactctctagagcaggtgctggccaagaacaatgctctcaatatgaacaagcgcttatacacagaagcctgggacaaagacaagacccaagtccatattatgcctgatacacctgaaatcatgttggcaagacaaaataaaataaattatagtgagagcctctatcgtcaggccatggaagaagccaagaaagaaggctatgacttgagaagtgatgccattcccattgtggctgccaaggcctctcgggatattgccagtgattacaaatacaaagaagcatatcgtaaacagttgggtcaccacattggcgcccgagcagtacacgatgaccccaagataatgtggtccctccacattgccaaagtgcagagtgaccgtgagtacaagaaagattttgagaaatacaagacaaggtacagcagcccagtggacatgcttggtatcgttttggccaagaagtgtcagaccttggtcagcgatgtggactataaacatcctctgcatgaatggatctgcctgcccgaccagaatgacatcattcatgcacggaaagcctatgacctccagagtgacaatttgtataagtcagaccttgaatggatgaaaggcattggctgggttccgattgattccttggaagttgttagggccaagagagctggagaattacttagtgatactatctaccgtcagcgtccagaaacgctgaaatttaccagtataacggacactccggagcaggtgctggcaaaaaacaatgctttaaacatgaataagcgcttatatactgaagcctgggacaatgacaagaaaactattcatgtcatgcctgatacaccagaaatcatgttagccaaactcaaccgaataaactacagtgataaactctataaacttgctttggaagagtccaagaaggaaggctatgacttgcgtctggatgccattccaatccaagcagccaaggcttcaagagatattgctagtgattacaagtacaaggaaggctaccgcaaacagcttggccaccatattggggcccggaacattaaggatgacccgaagatgatgtggtccatccatgtggccaagatccagagtgacagggagtacaagaaggagtttgagaagtggaagaccaagttcagcagcccagtggacatgctgggggtggtgctggccaagaagtgtcagatccttgtaagcgacatagactacaagcatcccctgcatgaatggacctgcctgcctgatcagaatgacgtcattcaggctcggaaggcctatgacctgcagagtgatgctatttacaaatctgatcttgagtggctgagaggcataggatgggttcccattggctctgtagaggtcgagaaagtgaagagagctggagaaatcctgagtgacaggaagtatcgccagcctgcagaccagctcaaattcacatgcattaccgacactccggaaattgtcctagcaaagaataatgccctgacaatgagcaagcatttatacacagaagcttgggatgctgacaaaacctccatccacgtgatgccagacaccccagatatcctgctggccaagagtaattctgccaatatcagccaaaaactttacaccaagggatgggatgaatcaaagatgaaggactatgatctgagagcagatgctatttccatcaaaagtgccaaggcctccagggacatcgccagtgactacaaatacaaggaagcctatgagaaacagaaaggccaccacattggagcccagagcattgaagatgatcccaagattatgtgtgccatacatgcaggaaaaattcaaagtgaaagggagtacaagaaggaattccaaaagtggaaaaccaagttctctagcccagtggacatgttaagcatcttgctggccaagaaatgtcagactttggtcactgacattgattatcgcaattacctgcatgaatggacatgcatgccggatcaaaacgacattatccaagcaaaaaaggcctatgacctgcagagtgatagtgtgtataaggcagacctggagtggctgcgtggcatcggctggatgccagaaggctcagtggaaatgaacagagtgaaggttgctcaagacctcgtgaatgaaagactctataggacacgtccagaagctttgtcattcaccagcattgtcgacactccagaagttgtcttggcaaaagccaattctctgcaaataagtgagaaactgtatcaggaagcctggaataaagataaaagcaacatcaccattccttctgatactccggagatgctgcaggcccacatcaatgccttgcaaatcagcaataaactctaccaaaaagactggaatgacgccaagcagaaaggctatgacataagggcagatgccattgaaatcaagcacgccaaggcctccagagaaattgccagtgagtacaaatacaaagaaggttaccgtaagcaactgggccaccacatgggtttccgcaccctacaagatgaccccaagtcagtatgggctatacatgctgccaagatccagagtgacagagaatataagaaagcttatgagaagtctaaaggaattcacaacacaccgttggacatgatgtcaattgttcaagccaagaaatgccaggtcctggttagcgacattgattatcgcaattatctgcaccagtggacgtgtctgccagatcagaacgatgtgatccaggccaagaaagcctacgacctgcagagcgataacttgtacaagtcagacctggaatggctgaagggtattggatggctgccagagggttctgtggaagtgatgagagtgaagaatgcccagaatctcttgaatgaaaggctgtatcgtataaagcctgaggccctcaaattcaccagcattgttgacaccccggaagtaatccaggcaaagatcaatgctgtacagatcagtgagccattgtatcgcgatgcctgggagaaagagaaggctaatgtgaacgtgccagctgacactcccctgatgctgcaatccaaaatcaatgccctgcagatcagcaataaacgctatcagcaagcttgggaagatgtcaagatgactggttatgacctgcgagcagatgccattgggatccagcatgccaaggcttccagggatattgccagtgactatctgtacaaaactgcttatgagaaacagaaaggccattacattggctgtcgcagcgccaaggaagaccctaaactggtttgggcagcaaatgtgttgaagatgcagaatgacaggctgtacaaaaaggcctacaacgaccacaaagccaagatctccatccctgtggacatggtgtccatcagcgctgccaaagaaggtcaggcactggcaagtgatgtggactatcgccattacctgcaccactggtcttgctttcccgaccagaatgatgtgatccaagccaggaaagcctacgacctacagagcgacagtgtgtataaggcagacctggagtggctgcgtggcatcggctggatgccagaaggctcagtggaaatgaacagagtgaaggttgctcaagacctcgtgaatgaaagactctataggacacgtccagaagctttgtcattcaccagcattgtcgacactccagaagttgtcttggcaaaagccaattctctgcaaataagtgagaaactgtatcaggaagcctggaataaagataaaagcaacatcaccattccttctgatactccggagatgctgcaggcccacatcaatgccttgcaaatcagcaataaactctaccaaaaagactggaatgacaccaagcagaaaggctatgacataagggcagatgccattgaaatcaagcacgccaaggcctccagagaaattgccagtgagtacaaatacaaagaaggttaccgtaagcaactgggccaccacatgggtttccgcaccctacaagatgaccccaagtcagtatgggctatacatgctgccaagatccagagtgacagagaatataagaaagcttatgagaagtctaaaggaattcacaacacaccgttggacatgatgtcaattgttcaagccaagaaatgccaggtcctggttagcgacattgattatcgcaattatctgcaccagtggacgtgtctgccagatcagaacgatgtgatccaggccaagaaagcctacgacctgcagagcgataacttgtacaagtcagacctggaatggctgaagggtattggatggttgccagagggttctgtggaagtgatgagagtgaagaatgcccagaatctcttgaatgaaaggctgtatcgtataaagcctgaggccctcaaattcaccagcattgttgacaccccggaagtaatccaggcaaagatcaatgctgtacagatcagtgagccattgtatcgcaatgcctgggagaaagagaaggctaatgtgaacgtgccagctgacactcccctgatgctgcaatccaaaatcaatgctctgcagatcagcaataaacgctatcagcaagcttgggaagatgtcaagatgactggttatgacctgcgagcagatgccattgggatccagcatgccaaggcttccagggatattgccagtgattatctgtacaaaactgcttatgagaaacagaaaggccattacattggctgtcgcagcgccaaggaagaccctaaactggtttgggcagcaaatgtgttgaagatgcagaatgacaggctgtacaaaaaggcctacaacgaccacaaagccaagatctccatccctgtggacatggtgtccatcagcgctgccaaagaaggtcaggcactggcaagtgatgtggactatcgccattacctgcaccactggtcttgctttcccgaccagaatgatgtgatccaagccaggaaagcctacgacctacagagcgacagtgtgtataaggcagacctggagtggctgcgtggcatcggctggatgccagaaggctcagtggaaatgaacagagtgaaggttgctcaagacctcgtgaatgaaagactctataggacacgtccagaagctttgtcattcaccagcattgtcgacactccagaagttgtcttggcaaaagccaattctctgcaaataagtgagaaactgtatcaggaagcctggaataaagataaaagcaacatcaccattccttctgatactccggagatgctgcaggcccacatcaatgccttgcaaatcagcaataaactctaccaaaaagactggaatgacaccaagcagaaaggctatgacataagggcagatgccattgaaatcaagcacgccaaggcctccagagaaattgccagtgagtacaaatacaaagaaggttaccgtaagcaactgggccaccacatgggtttccgcaccctacaagatgaccccaagtcagtatgggctatacatgctgccaagatccagagtgacagagaatataagaaagcttatgagaagtctaaaggaattcacaacacaccgttggacatgatgtcaattgttcaagccaagaaatgccaggtcctggttagcgacattgattatcgcaattatctgcaccagtggacgtgtctgccagatcagaacgatgtgatccaggccaagaaagcctacgacctgcagagcgataacttgtacaagtcagacctggaatggctgaagggtattggatggttgccagagggttctgtggaagtgatgagagtgaagaatgcccagaatctcttgaatgaaaggctgtatcgtataaagcctgaggccctcaaattcaccagcattgttgacaccccggaagtaatccaggcaaagatcaatgctgtacagatcagtgagccattgtatcgcgatgcctgggagaaagagaaggctaatgtgaacgtgccagctgacactcccctgatgctgcaatccaaaatcaatgccctgcagatcagcaataaacgctatcagcaagcttgggaagatgtcaagatgactggttatgacctgcgagcagatgccattgggatccagcatgccaaggcttccagggatattgccagtgactatctgtacaaaactgcttatgagaaacagaaaggccattacattggctgtcgcagcgccaaggaagaccctaaactggtttgggcagcaaatgtgttgaagatgcagaatgacaggctgtacaaaaaggcctacaacgaccacaaagccaagatctccatccctgtggacatggtgtccatcagcgctgccaaagaaggtcaggcactggcaagtgatgtggactatcgccattacctgcaccgctggtcttgctttcccgaccagaatgatgtgatccaagccaggaaagcctacgacctacagagcgacgccctctacaaggctgacttggagtggttgcgtggcattggctggatgccccaagggtctcctgaagtgttgagagtcaaaaacgcccagaatatcttttgtgacagtgtctatcggacgcctgtggtgaaccttaagtacacaagcattgttgacacacctgaagtggtccttgctaaatcaaatgctgaaaatattagtattccaaagtacagagaggtttgggacaaggataaaacttcaatacacataatgccagatactccagaaattaatctcgctagagcaaatgctcttaatgtgagcaataaactttaccgtgagggctgggatgaaatgaaggcgggctgtgatgtccggctggatgccatccccatccaggctgccaaggcctccagggagattgccagtgactataaatataagcttgaccatgagaagcagaagggacactacgtgggcaccctcacagccagggatgacaacaagatccgctgggccctcatagctgacaagctccagaatgaacgagagtaccggctggactgggccaaatggaaggccaagatccagagccctgtggacatgctttccatcctgcactctaaaaattcccaggctctggtcagtgacatggattaccgcaattacctgcaccagtggacctgcatgcccgaccagaacgatgtgattcaggccaagaaggcctacgaactgcagagcgataatgtttacaaggctgacttggaatggttgcgtggaattgggtggatgccaaatgactccgtgtccgtcaatcatgccaaacatgccgcggacatcttcagtgagaaaaaatatcgcacaaaaatagaaactctcaactttacgcctgtggatgacagagttgattatgtgacagcgaaacaaagtggcgagatcctcgatgatattaaataccggaaagactggaatgccaccaaatcaaagtacaccctcacagaaacccccctgctgcacactgcccaggaggctgctaggatactggaccagtatctctacaaggaaggctgggagagacaaaaagccacaggttacattttgcctccagatgctgtgccatttgttcatgcccatcactgcaatgacgttcagagtgagctgaaatacaaagctgaacatgtgaagcaaaaaggtcattatgttggtgtcccgacgatgagagatgatcctaagctggtttggtttgagcatgcaggccagattcagaatgagagactatacaaagaggactatcacaaaacaaaggccaaaatcaatatacctgctgatatggtgtcagtcttggccgccaagcaggggcagacccttgtcagtgatattgattatcgtaattacttgcaccaatggatgtgtcatcctgaccagaacgatgttattcaggcaagaaaggcctatgacctacagagtgataatgtctacagagctgacctggagtggctccgaggcattggctggatcccactggattctgtggaccatgtaagggttactaagaaccaggaaatgatgagtcagatcaaatataagaaaaatgcccttgaaaactatcctaactttagaagtgtggtggatcctccagagattgttttagccaagattaattctgtcaatcaaagtgatgtaaaatataaagaaacatttaataaagcaaagggcaaatatacgttttcaccagatacaccacatatctcccactccaaagacatgggaaaactctacagtactatactgtataaaggggcgtgggagggcaccaaggcctatggctacaccctggatgagcgctacattcccattgttggagccaagcatgctgatctggtgaacagtgagcttaaatacaaagagacatatgagaagcagaaaggtcactacctggctggaaaagtgatcggtgaattccctggtgtggttcactgtctggatttccaaaagatgaggagtgcgttgaactacagaaaacattatgaggataccaaagcaaatgttcatatccccaatgacatgatgaatcacgtgctggctaaaaggtgccagtacatcctcagtgacctggagtatcgacactatttccaccagtggacgtctcttctggaagaacccaatgttatacgcgtccgaaacgcccaggagatcttgagtgataatgtgtataaagatgacctgaattggttgaaaggcattggttgctacgtttgggatacaccccaaatcctccatgccaagaaatcatacgaccttcagagtcagctacaatatacagcagcaggtaaagaaaatctacaaaactataatctggtcacagacacgcccctctatgtgactgctgttcagagtggcattaatgccagtgaggtaaaatataaagaaaattatcatcagattaaggacaaatacacaacagttctagaaacagtggattatgacagaaccagaaacctgaagaatctttacagcagtaacctgtacaaggaggcctgggatagagtgaaagccaccagctacatcctgccttccagcaccttgtccctgacacacgccaagaaccagaagcatctggccagccatatcaaatatcgggaagaatatgaaaagttcaaagctctttatacgttaccaagaagtgttgacgatgatccgaacacagcacggtgcctccgagttggcaagcttaacatcgatcgcctgtacagatcagtttatgaaaagaacaagatgaaaatccacatcgtgcccgacatggtagagatggttactgccaaggattcccagaagaaagtcagtgagattgattaccgcctgcgcctccacgaatggatttgccaccccgacttgcaagtcaatgatcacgtcaggaaagtcacagatcagatcagcgatattgtatacaaggatgacctcaactggctgaaaggcattggttgctacgtctgggacactcctgaaatcctccatgccaagcatgcttatgatctacgtgatgatatcaagtataaagctcacatgttgaaaacaaggaatgactacaagcttgtcacagatacaccagtctacgtgcaggctgtcaaaagtgggaaacagctaagtgacgctgtctaccactatgactatgtgcacagtgtcagaggcaaagtggctccaactaccaaaaccgtggatctggaccgggcccttcatgcatacaagctccagagttcgaatctatacaaaaccagcctgcgcaccctgcccactggatatagacttccaggtgacactcctcacttcaaacacatcaaggacacccgttacatgagcagttatttcaagtacaaagaagcctatgaacacaccaaggcatatgggtatacacttggccccaaagatgttccatttgtccacgtccggagagtcaacaatgttaccagcgagagactgtatcgggaattgtaccacaaactgaaagacaagatccatacaactcccgatacccctgagatccgccaagtcaagaagacacaagaggctgtcagtgagttgatctacaaatcagacttcttcaagatgcagggccacatgatctctctgccatacacaccccaagtgatccattgccgctatgtgggagacatcaccagtgatattaaatacaaagaggacttgcaggtcctgaagggatttggctgcttcctgtatgacactcctgacatggtccgctcccggcacctgcggaagctctggtctaattacctatacactgataaggcaaggaagatgcgagacaaatacaaagtggtgcttgacactccagaatacagaaaagtgcaagaactgaagacacatctgagtgagctggtctacagagctgcaggcaagaagcagaagtcaatctttacttcagttcctgatactcctgatcttttaagagccaagcgagggcagaagcttcagagtcagtatctgtatgttgaacttgccaccaaagagagaccccatcatcacgctggaaaccagaccacagccttgaagcatgctaaagacgtgaaggacatggtcagtgagaaaaagtacaagattcaatatgaaaagatgaaagacaagtacactccggttccagatacgccaatcctcatcagagccaagagggcttactggaatgccagtgatctacgctacaaagaaacatttcaaaagaccaaagggaaataccacacggtgaaagatgccctagacattgtctatcatcgcaaagtcacagatgacatcagtaaaataaaatacaaggagaactacatgagccagttgggtatctggaggtccattcctgatcgtccagagcatttccaccaccgagcagtcactgacacagtcagtgatgtaaaatataaagaagacttgacttggcttaaaggcattggttgctatgcctatgatacccctgatttcactctggctgaaaagaacaagactctctacagcaagtataagtataaagaagtatttgaaaggacaaagtcagatttcaagtatgttgccgactctccgatcaataggcatttcaagtatgcaactcaattgatgaatgagagaaaatataaatctagtgccaagatgtttctgcaacatggatgtaatgaaattctgcgtccagatatgttgactgctctctacaattcgcatatgtggagccagatcaaatacaggaaaaactatgaaaaatcaaaggacaaatttacctcaattgtggatactccagaacacctgcgtactacaaaagtcaacaaacaaatcagcgatatcctttataaattggaatacaacaaggccaaacccagaggctacaccacaatccacgacacacccatgttgctgcatgtccgcaaggttaaagatgaagtcagtgatctgaaatacaaagaagtataccaaagaaataaatccaactgcaccattgagccagatgctgttcatatcaaagcagccaaggacgcctacaaagtcaacaccaatctggactataagaaacagtacgaagccaacaaagcccactggaagtggactcctgaccgaccggacttcctccaggctgccaagtcatccctgcagcaaagcgattttgaatataagctggaccgggagttcctcaagggttgcaagctttctgtcactgatgacaaaaacacggtgctcgccctcaggaatactttaatagaaagtgatctgaaatacaaagagaaacatgtcaaggaaagaggaacctgccatgccgtacctgacacgcctcagatcctgctggcgaagactgtcagcaacctggtgtctgagaacaagtacaaggaccatgtcaagaagcacttggcacagggctcatacacaacactaccagagacccgggacactgttcacgtcaaggaagtgaccaagcatgtcagtgatacaaattacaaaaagaagtttgtcaaggagaaaggaaaatccaactactccatcatgctggagccaccagaggtgaaacatgctatggaagtggccaagaagcaaagtgatgtcgcttacagaaaagatgccaaagagaacctgcattacaccacagtggctgatcgaccagacatcaagaaggccacacaggcagccaaacaggccagtgaggtggagtacagagccaagcaccgcaaggaaggcagccatggcttaagcatgctcggtcgcccagacatagaaatggccaagaaggcagccaagctgagcagccaggttaaataccgagaaaatttcgataaagaaaagggcaagacaccaaaatacaatccaaaagacagccagctctacaaagtcatgaaagatgctaataatcttgcaagtgaggttaaatacaaggctgacctgaagaaacttcacaaacccgtgactgacatgaaggagtctctgatcatgaatcatgtcctgaatacaagccaacttgccagttcttaccagtacaagaagaagtatgagaagagtaaaggccactaccacaccatacccgataatctggagcagcttcacctaaaagaggccacagaattacagagtatagtgaaatacaaagaaaagtatgaaaaggaacgaggaaaacccatgctggactttgaaacaccaacgtacatcactgccaaagagtctcagcagatgcagagtgggaaagaatataggaaagattatgaagagtccattaaaggcagaaacctgactggcctggaggtcacgccagctttgttacatgtcaaatatgcaactaaaatagcaagcgagaaagagtacaggaaagatctagaggaaagcatccgtgggaagggcctcactgaaatggaagatacacctgacatgctaagagcaaagaatgccactcaaatcctcaatgagaaagaatataagcgagacctggaactggaagtcaaaggaagaggcctgaatgccatggccaatgaaactccggattttatgagggccaggaatgctactgatattgccagtcagattaagtataagcaatcagcagaaatggagaaagccaatttcacttctgtggttgatactccagagatcattcatgcccaacaagtcaagaatctttcaagccagaaaaagtacaaggaagatgctgagaagtccatgtcgtattatgagactgttttggacaccccagagatacagagagtccgggagaaccaaaagaacttcagccttctccaataccagtgtgaccttaaaaacagtaaaggaaaaattacagttgttcaagacacgccagaaatactgcgtgtaaaagaaaatcagaagaatttcagctcggttttatataaagaggatgtctcaccaggaacggctatcggaaagacacctgagatgatgagagtgaaacaaacacaggaccacattagctcggtgaagtataaggaagcaataggacaaggaactccaatccctgacctgcctgaagtgaaacgtgtgaaggagacgcagaagcacattagctcggttatgtacaaagaaaacttgggaacaggcattccaaccactgtgactccagagattgagagagtcaaacgcaatcaagagaactttagctcggttttgtacaaagaaaatttggggaaaggaatcccaacacctatcactccagagatggagagagtcaaacgcaatcaagagaactttagctcgatattgtacaaagagaacttgagcaaggggactcccctacctgtcactcctgagatggagcgagtcaaactcaatcaagaaaactttagctcggtgttgtataaagaaaacgttggaaaagggattccaatccccatcactccagagatggagagagtcaaacacaatcaagaaaactttagttcggtgctatacaaagaaaacctggggacaggaattccaatccccatcactcctgagatgcagagagtcaaacacaatcaagaaaaccttagctcggtgttatacaaagaaaacatgggcaagggaacccctttacctgtcactcccgagatggaaagagtcaaacacaatcaagaaaatattagctcggtgttatacaaagaaaacatgggcaagggaacccctctacctgtcactcctgagatggagagagtcaaacacaatcaagaaaatattagctcggtgttatacaaagaaaacatgggcaagggaactcctttagctgtcactcccgagatggagcgagtcaaacacaatcaagaaaatattagctcggttttgtacaaagaaaatgtggggaaagccaccgcaacccctgtcactcctgagatgcagagagtcaaacgcaatcaagaaaacattagctcggtgttatacaaagagaacctggggaaagcaacccccacaccctttactcctgagatggaaagagtgaaacgcaatcaagaaaactttagctcggtattgtacaaagagaacatgagaaaagcaactccgacacctgttactccagagatggagagagctaagcgcaaccaagaaaacattagctcggttctttattctgatagtttccggaaacaaatacaaggcaaagctgcctatgtattggatacccccgagatgagacgggtgagggagacccaacggcacatctcaacggtgaaatatcatgaagactttgagaaacacaagggttgcttcacaccagtggtgacagatcctatcactgaacgagtaaagaagaacatgcaggacttcagtgacattaactaccgaggtattcagaggaaagtggtagaaatggaacaaaaacggaatgaccaagatcaggagactattacaggtttacgtgtctggcgtactaatcctggttcggtttttgactatgatccagcagaagacaacatccagtcccgaagcttacacatgattaatgtccaagctcagcgccggagccgggagcagtcacgatctgccagtgcactaagcatcagtgggggtgaggagaagtctgagcattcagaagcaccagaccaccacctttcgacttacagcgacgggggtgtctttgcagtctcaacagcttacaaacatgcaaaaaccacagagctcccacaacaacgatcatcttcagttgctacccaacagacaacggtatcttccatcccatctcatccatctactgctggaaaaatcttccgtgccatgtatgactatatggctgctgatgcagatgaggtgtccttcaaggatggagatgccatcataaatgttcaagcaattgatgaaggctggatgtatggcactgtgcagaggactggcaggaccggaatgctcccagccaactacgttgaagctatttaggcatttcaaagcatcacacttgtctgcaggacttacagatcctgcagtcaatgtttcggtttagactctccactgttacctaagttctcaagctgcctatggtttttctgtgtcaatgtgatttatggtagtaccatcctttctcctttgggttttaaaataagttgcagaacagacactttaaaagcttctgcaatattatttctgtgcctagagtctttctccattataaacatgttttaacattatttcttttctaaaacagggattttgaatatgccaaacacattaaaggaaaaatagcagagatgttcaccttttccttgctgattgctaatgcttattatttctaattcagttctgaagttataaacttataatcaatacaaaccagcaactaataaaacctctaattctgcaa

SEQ ID NO: 62995 - DNA, 25578 bp, Artificial Sequence
  derived and/or modified sequence
atggctgacgatgaggattatgaggaagtggttgagtactatactgaagaagtcgtgtacgaggaagtgccaggcgaaacaatcacaaagatctatgaaaccaccactacgcgtacttcagattatgaacagagcgaaaccagtaaacccgctctcgcccaacccgcactggctcaacctgcatccgccaagcctgtggagcgaaggaaagtgattcggaagaaggtcgacccctccaaattcatgactccgtacatcgcccatagtcagaaaatgcaggacctgttctctccaaataagtataaagagaaatttgaaaaaaccaaaggccagccatatgcttcaaccaccgacacacccgaactcagacgcatcaaaaaagttcaggatcagctgagcgaggtcaaatacaggatggacggtgatgtggcaaaaaccatctgccacgtggacgagaaagcgaaggacatcgagcatgcaaaaaaagttagccagcaggtatccaaggttctgtacaagcaaaactgggaggacactaaggataaatacttgctccccccagatgcaccagagctggttcaggccgttaagaacaccgccatgttttctaagaaactttatactgaagattgggaagccgacaagagcttgttttatccttacaatgatagccccgaactgaggcgggtcgcacaggcccaaaaggctctgagcgacgtggcctacaagaagggcctggcagagcaacaggcccagtttactccacttgccgacccgccagatattgagttcgccaagaaagtgaccaaccaggtgagcaagcagaagtataaggaggattacgagaacaagatcaaaggtaagtggtccgagacaccttgcttcgaagtggcaaatgccaggatgaatgccgataacatcagcaccaggaagtatcaagaggatttcgagaacatgaaagaccagatttactttatgcagaccgaaactccagaatacaaaatgaataaaaaggccggagtcgctgccagcaaggtgaaatacaaagaggattacgaaaagaacaaggggaaggcagactataacgtacttccagcatcggagaatccacagttgaggcagctcaaggcggctggcgacgcgctgagcgacaagttatataaggagaattatgagaaaacgaaggccaagtctatcaactattgtgaaacacccaaatttaaactggatacggtgctacagaacttctcatccgataaaaagtacaaagacagttatctgaaagacattttgggccactatgttggaagcttcgaggacccgtatcacagccattgcatgaaagttacagcacaaaacagtgataaaaattataaggcggagtacgaggaggatagggggaaaggttttttcccccaaactattacgcaggaatatgaagccattaagaagctggatcagtgtaaggatcatacctataaagttcatccagataagaccaaattcacacaggtcactgatagtccagttcttctgcaggctcaggtcaattcaaaacagttgagtgaccttaattacaaagcgaagcacgaatctgagaagttcaagtgccacattccacccgacaccccagccttcattcagcacaaggtaaatgcctacaatctctcagataacctatacaaacaggactgggagaagtccaaggcaaagaaatttgatattaaagtcgatgcaatccccctccttgccgcaaaagctaacaccaagaacacaagtgacgtgatgtataagaaggactatgaaaagaataaaggcaagatgattggagttttgagcattaatgacgatccaaaaatgctccattcattgaaagtagcaaagaatcaatcagaccgtctgtacaaggagaattacgagaaaaccaaggcaaagagcatgaactactgcgagacccccaaataccagctcgacacacagctgaaaaacttctccgaggcgaggtacaaagatctttatgtgaaggatgtcctgggacattatgtcgggtcaatggaggacccttatcatacccattgtatgaaggtggcggctcaaaatagcgataagtcttataaggctgaatatgaagaagacaagggaaaatgttatttccctcaaacaattacgcaggagtacgaggctatcaagaaattagaccagtgcaaggaccacacctacaaggtacacccagataagactaaattcacagcggtgactgatagccccgttctgttacaggcccaattgaacaccaaacagctttcagaccttaactacaaagcaaagcacgagggtgagaagtttaagtgtcacatcccagctgatgcccctcagtttatccaacatcgcgttaacgcctataacctgtctgataatgtgtataaacaggattgggaaaaatcaaaggcaaaaaagttcgatataaaagtggacgccatccctctcttggccgcaaaagccaacaccaagaacacttcagacgtcatgtataaaaaagactatgagaaatcaaagggcaaaatgattggcgctttatcgattaatgatgaccctaaaatgctccattccttgaaaaccgccaagaaccaaagcgaccgcgaataccgtaaagactatgaaaaaagtaagactatttacacggcccctctcgacatgctgcaggtgactcaggccaagaagtcccaagcaattgccagtgacgtggattataaacatatcctgcattcatattcctaccctccggactccatcaatgtggacctcgcaaaaaaagcctacgcattgcagtctgatgtcgagtacaaagctgactataatagttggatgaaaggctgtggatgggtgcctttcggttctctcgaaatggagaaggccaagcgggcttctgacattctgaatgaaaagaagtatcgacagcaccctgacacgttgaaattcacctctatcgaagacgcccctatcactgtccaaagcaagattaaccaggcccagcgcagtgacattgcatataaggcgaagggtgaggaaattattcacaagtataatctcccacccgacctgcctcagtttatacaggccaaagtgaacgcctataacatcagtgaaaatatgtacaaggctgacttgaaggatttgtctaaaaagggctacgatctgaggactgacgcaattcctatccgtgccgctaaagccgctaggcaggctgcttcggatgtccaatacaaaaaggactacgagaaagctaagggaaagatggtcggttttcaaagtttgcaggacgaccctaagctcgttcattatatgaatgtagctaagatacagtcggatcgggagtacaaaaaagactacgaaaagaccaaaagtaaatacaatacacctcatgatatgttcaatgtcgtagcggctaaaaaagcacaggacgttgtgtcgaacgtcaattacaagcactcgctgcaccactatacctacctccctgatgccatggacctggagctgtctaaaaacatgatgcagatccaaagcgataatgtctacaaggaggattacaataattggatgaagggcataggctggataccaatcggtagcctggacgtcgaaaaagtcaagaaggcaggtgacgcccttaatgaaaaaaagtatcggcagcatcctgataccctaaaatttacttccatcgtcgacagcccagtcatggtccaggccaaacagaatacaaaacaggtcagcgatatcctgtataaagccaagggtgaagacgtcaaacacaaatacacaatgagtcctgacctcccccagtttctacaggctaaatgcaatgcgtacaacatctctgatgtttgttataaacgcgattggtatgacctcattgcaaaaggcaacaatgtgctcggagacgctataccaatcacagcagctaaggcctctcgtaatatcgcatctgattacaagtataaggaagcatacgaaaaatctaaggggaagcatgtgggatttagaagcctccaggatgaccccaaactggtccactacatgaacgtggccaaactgcagagcgatcgcgagtacaagaaaaattacgaaaacacgaaaactagctaccacactccaggagatatggtttctatcaccgccgcaaagatggctcaggacgtagcaactaacgtgaattacaaacaacctctccatcactacacctacctgccagacgcaatgtcactggaacataccaggaacgtgaaccaaatccagtccgacaacgtgtataaagacgaatacaattcatttttgaaaggaatcggatggattccgatcggtagcctggaagtggaaaaagtgaaaaaagcaggcgacgccctcaatgaacgcaaataccgccagcatccggatacggtcaagtttacatcggtgcccgattctatgggcatggttttagcccagcataacaccaaacagctgtctgatctgaattataaggtggagggcgagaagctaaagcataagtatacaattgaccccgaattgccacagtttattcaggcaaaggtcaacgctcttaatatgagtgacgcgcactataaggcggattggaagaaaactatagctaaaggttacgacttgagacccgacgccatccctatcgtagccgctaagtcaagcagaaacatagcctccgattgcaaatacaaggaagcgtatgaaaaagcgaaagggaagcaggtggggtttttgtcgcttcaggatgatcctaagctcgtgcattatatgaacgtcgccaagattcagtccgatagggagtataagaagggttatgaagctagcaagacgaagtaccatacaccccttgacatggttagtgtgacagctgctaagaaatctcaggaggtagccaccaatgcaaattacagacagagctatcatcactatactctgttacctgacgcacttaatgtggagcactctcgcaatgccatgcagatacaaagtgataatctctacaagagcgatttcactaactggatgaaagggatcggatgggtgcctatcgagtcattggaggtggagaaagcaaagaaggctggggaaatcctgagtgaaaaaaagtaccgccagcaccccgaaaagctcaagtttacttatgcaatggacacgatggagcaagctctgaacaagagtaataaactcaacatggataagcgcctgtacaccgaaaagtggaacaaggataagaccaccattcatgtgatgcctgatactcctgatattctgctgtctagagtgaatcagattaccatgtccgacaaactttataaagccggttgggaggaggagaagaaaaaggggtatgacctcaggcccgacgcaatcgcaattaaagcagccagggctagcagagacattgctagcgattacaagtataagaaagcctatgaacaggctaaagggaagcacatcggtttcagatctcttgaagatgaccccaagctcgttcattttatgcaggtcgcaaagatgcagagcgacagggaatataagaaaggttatgagaaaagcaagacttcctttcacacacccgtggatatgctttccgttgtagctgctaaaaagtctcaggaggttgccaccaacgcgaactaccggaacgtgattcacacctacaatatgcttccagatgccatgtcctttgaactcgctaagaacatgatgcaaatccaaagtgacaaccagtataaagcggattatgccgacttcatgaagggaatcggctggcttccattgggctcacttgaagcagagaaaaataagaaagctatggagatcataagtgaaaaaaagtatagacagcatcccgatacactgaagtactcaaccctgatggacagtatgaatatggtgctcgcccagaataatgctaaaattatgaatgaacacctgtacaaacaggcgtgggaggctgacaagaccaaagtgcacatcatgcctgacattcctcagattatcctggctaaggccaacgccattaacatgtctgataagctgtataagctgtccctggaggagagcaagaagaagggctacgacctgcgacctgatgcgattccaattaaggcggctaaggcaagtcgggacatcgcctccgattacaaatataaatataactatgagaagggaaagggtaagatggttggattcagaagtcttgaagacgacccaaagttggtgcactccatgcaggtggctaagatgcaaagcgaccgggagtacaagaaaaactatgagaatacgaaaacatcctaccacactcctgcggatatgctgtcagtgaccgcagcaaaagatgctcaagcgaacataacaaacacaaactacaagcatttaatccacaagtatattctcctgccagacgcgatgaacatcgagctgacgcggaatatgaaccgtatccaaagcgacaatgagtacaaacaggattacaatgaatggtacaaaggtctgggatggagtccggcaggctccctggaagtcgaaaaggctaaaaaggccacagagtacgcatcagatcaaaagtataggcaacacccatctaattttcaattcaaaaaactgaccgacagcatggacatggtgctggcgaaacagaacgcccacacaatgaacaagcatctgtatactatagattggaataaggacaagacgaaaattcacgtgatgcctgatacgcccgacattctccaggccaagcagaatcaaaccctgtactcccaaaaactgtacaagctgggctgggaagaagctcttaagaaagggtacgacctgcctgtggatgctatttccgtgcaactcgcaaaggcctctcgggacatagcaagcgattacaaatacaaacagggctatcggaaacagctagggcaccacgttggctttcgcagcttgcaggatgacccaaaactagttctcagcatgaacgtggccaagatgcagtctgagcgagagtacaagaaagactttgaaaaatggaagactaaattcagctctcccgtagacatgctgggagttgtccttgcgaagaagtgccaggagcttgtgagcgacgtggattacaagaactatctgcatcaatggacttgtctgccagatcagaatgacgtcgtccaggctaagaaggtctacgaactgcagtccgagaacctctataaatccgacctcgaatggctacgcggaatcggatggagccctcttggctcccttgaggctgagaagaacaagcgcgcaagtgaaattatcagcgaaaagaagtaccgacaacctcccgatagaaataaattcacgagcatccccgatgctatggatatcgttctggcaaaaacaaacgctaagaatcgcagtgataggctctaccgggaggcatgggacaaagacaagactcaaatccatattatgcccgacactcccgacatagttctggcaaaggccaatctaattaatacatccgacaagctgtatcgtatgggctacgaggaactaaagcggaagggatacgatctcccagtggacgcaattcccattaaggccgcaaaggcatctcgggagattgccagcgagtacaagtacaaggaggggttccgcaagcagttagggcaccatatcggggctcgtaacatcgaggacgatccaaagatgatgtggagcatgcatgttgcgaaaattcaaagtgacagagagtataagaaagactttgaaaaatggaaaactaagtttagcagtccagtagatatgctgggagtggttctggcgaaaaaatgccagaccttggtctccgatgtcgattacaagaattatctgcaccaatggacatgcttgccagaccagtctgacgtcatccacgcccgacaggcgtatgacctgcagtctgataatctttataaatctgaccttcaatggctgaaagggattggctggatgacctctggatccctagaggacgaaaaaaacaagagggctacacagattttgtcggatcatgtgtataggcaacatccagatcagttcaagttcagctctctgatggattcaattccgatggtgttggccaagaataatgccatcactatgaatcatcgcttatacactgaggcctgggacaaagataagactacggttcatataatgcctgatacacctgaagtcctgttggccaagcagaataaggtcaactattctgagaagctttacaaattgggactggaagaggccaaacgcaagggctatgatatgcgagtggatgcaataccaatcaaggccgctaaagcatcgagagacattgcatccgagttcaaatataaagagggttaccggaaacaactcggccatcatatcggagctcgcgctattcgcgacgatccgaagatgatgtggtccatgcatgtggcaaagatccaaagcgatcgggaatacaagaaagactttgagaagtggaaaactaagttctcctctcctgtggatatgctcggtgtggtcctcgcgaagaagtgccagactctcgtgtctgatgttgattataagaattatttacaccaatggacctgtctgcctgaccagagcgacgttatccacgcccgtcaggcctacgacctccagtctgataatatgtacaagagcgatctccaatggatgcggggtataggatgggtatctatcggcagccttgatgttgagaagtgcaagcgtgcaacagagattctcagcgataaaatctacaggcagcctccggataggtttaaattcacatcagtgacagactctctcgaacaagtgctcgctaagaataacgctatcacgatgaataagcgcctgtacacggaagcttgggataaagacaagactcaaatccacattatgccagataccccagagattatgctggcaagaatgaataaaatcaattactctgaatccctgtacaagcttgcaaacgaggaagccaagaaaaagggctacgacctccgcagtgatgccatccccatagtagctgccaaggcaagccgcgacatcataagtgactataagtacaaggacggttactgtaaacagctgggccaccatataggtgccaggaatatagaagatgacccgaaaatgatgtggtctatgcatgtcgcgaagattcagagtgatagggagtataagaaggactttgaaaaatggaaaactaagttcagttcaccggtggacatgctgggggttgtcctggctaagaaatgtcaaacactggtttctgatgtcgactataagaattaccttcatgaatggacctgtttacccgatcagagcgacgtgattcatgcccgtcaggcctatgacctgcaaagcgacaatatctacaaaagtgatctccagtggcttcgcggaattggttgggtgcccatcgggtctatggacgtggttaaatgcaagcgtgcgactgaaatactgtcagataatatctaccgtcagccacctgacaaactcaaattcacaagcgtgaccgattccctggagcaagtactagcaaaaaacaacgccctaaacatgaataagcggttgtatactgaagcatgggacaaggacaaaacccaaatccatatcatgccggatactcccgaaattatgctggccagacaaaataagattaactattccgaaacactttacaagctggccaatgaagaagcgaagaagaaaggctacgatcttagatcagatgccataccaatcgtcgcagccaaagcgtcaagagatgtcatatctgactataaatacaaagacggttatcggaaacagctaggacatcacattggtgccagaaatattgaagacgatcccaagatgatgtggtctatgcatgtggccaaaatccagtccgatagggaatacaaaaaggactttgagaaatggaagacgaaatttagttcccctgttgacatgcttggcgtggtcttagccaaaaagtgtcaaaccctggtatctgatgtggactacaagaattacttgcacgaatggacttgcctgccagaccaaaatgacgtgatacatgctcgtcaggcctatgatttgcagtcggacaatatctataagagcgatctccaatggctgcgcggaatcggatgggtgccaatcgggtctatggatgtagtgaaatgtaaacgcgcagcagagatcctctccgacaacatataccgccagcctcccgacaaactgaagtttacctctgtaaccgattctctggaacaagtgctggcaaaaaataatgcattgaatatgaacaagagattgtatacagaggcctgggacaaagacaaaacccaggtccacataatgccggatacccctgagatcatgctggctagacagaacaagataaactatagtgagagtttataccgccaagcaatggaggaagccaagaaggaaggttacgatcttcgctctgatgcgatcccaatcgtggccgctaaggcctccagggacatcgcatctgattataagtataaggaggcttacagaaagcaacttgggcaccacatcggggctcgagctgtccacgacgatcccaagatcatgtggtcactccacatcgcaaaagtgcagtcagacagagaatacaagaaagacttcgagaagtataaaaccaggtatagctctccggtcgacatgcttggcattgttttagccaagaaatgccaaacgttggttagtgacgtggactataaacaccctctgcacgagtggatctgcttgccggaccaaaacgatatcatccacgctcgtaaggcgtacgacctgcagtcagacaacctttacaaatcggatctggagtggatgaagggcattggctgggtacccatagattccttggaagtcgtccgggctaaaagagcaggcgaactcctgtccgacaccatctaccgtcagcgaccggagacactgaagttcacttccattactgacaccccggaacaggttctagccaagaacaacgcactgaacatgaacaagcgactgtatacagaagcttgggataacgataaaaagaccatacatgtgatgccagatacccccgagattatgctggcgaagctgaaccggatcaattactctgataaactgtacaaactggccctggaggagtctaaaaaggagggctacgatctgagactggacgcgatccctatacaggccgctaaggcgagcagagatatcgcctcagattacaagtataaggaaggctaccgcaagcaactaggccaccatattggcgcacggaacatcaaggatgacccaaagatgatgtggagcatccatgttgccaagatacaaagcgatagagagtataagaaggaatttgaaaagtggaagactaaattttcctcgccggtggacatgcttggagttgttttagctaagaagtgtcagattctggtgtcagacatcgactacaaacaccccttgcacgagtggacatgccttcctgaccagaacgacgtgattcaagctaggaaggcatacgatcttcagagcgacgctatctacaagagcgaccttgagtggcttcgtgggatcggctgggtgccaattgggtccgtggaggtggaaaaggtgaaacgggcaggcgagatcttgtcagatcggaagtacagacaacctgcagaccagcttaaatttacatgcatcactgacacgccagagattgtcctcgcaaaaaacaacgctctgacaatgagcaagcatctgtacacagaagcctgggacgccgataaaacctcaatccacgtgatgccagacacgcctgatatccttctggccaaatctaatagcgccaatatctctcagaagctgtatacaaagggatgggatgagtctaagatgaaggactatgatctgagagcagacgccattagcatcaagagtgccaaggccagccgagatattgcaagtgactacaaatataaagaggcctacgagaaacagaaaggacatcatatcggagctcagtccatcgaggatgaccctaaaatcatgtgtgcaatccacgcaggtaaaattcagagtgagcgagaatataaaaaggagtttcagaagtggaaaacaaaattttcttctcctgtcgatatgttgtctatcttgttggccaaaaaatgccagaccctggtgaccgatattgactatcggaattatttacatgaatggacttgtatgcccgatcagaacgacatcatccaggccaagaaggcctatgacctgcaatccgactcagtctataaagcagatctggagtggttgcgtgggatcggttggatgcccgagggctcggttgaaatgaatcgagtcaaagtggctcaagatttggtgaatgaacggctatacagaacaaggcccgaggctctctcattcacctcaatagtggacacccctgaagttgtactcgccaaggcgaattccctgcaaatttccgaaaaactttatcaggaggcatggaataaggacaaatcaaatatcactatcccctccgacactcccgaaatgctgcaggcgcacatcaatgccctgcagatctcaaacaagctctaccagaaagattggaacgatgctaagcagaaagggtatgacatcagagcagacgctattgaaatcaaacacgctaaggccagcagggagatagcaagtgagtataaatacaaggagggttacagaaagcaactcggccatcatatgggctttagaaccctccaagatgatcccaaaagcgtgtgggcaattcacgctgccaagatacagtccgatcgggagtacaagaaggcctacgagaagtccaaagggatccacaatacacccctagatatgatgtctatcgtccaggccaaaaagtgtcaagtgcttgtctctgacatagactaccggaactaccttcaccaatggacttgcctgcccgatcaaaacgacgtaatccaggctaaaaaggcatacgacctgcagagtgataacttatataaaagtgacctggagtggctaaaagggattggttggctgccagaggggtccgttgaggttatgagagtgaagaacgcacagaacctccttaatgaacgcctttacagaattaagcctgaggccttaaaatttacatccatcgttgatacacccgaggtcattcaggctaaaatcaatgctgtgcagatctctgaaccattataccgggatgcttgggagaaggaaaaagctaatgtcaatgtccccgctgatacgccactaatgcttcaatccaaaattaatgcactgcagatcagcaacaaaaggtatcagcaggcatgggaagatgttaagatgacaggatacgatcttcgggctgatgcaatcggcattcagcatgcaaaagcctctagagatatagcatctgattacctatacaaaaccgcctacgagaaacagaagggtcactacataggttgccgctctgcaaaagaggacccaaaactagtgtgggcagctaacgtcctaaagatgcagaacgaccgcttatacaagaaggcctacaatgatcacaaggccaagatctctattcctgttgacatggttagcatttctgctgccaaagagggacaagcgctcgccagcgacgtagactaccgacactacctccaccattggtcttgtttcccagaccagaacgacgtgattcaggccaggaaagcgtacgacttgcaaagcgattcggtgtacaaagctgatctggagtggttgaggggaataggttggatgccagagggcagcgtggaaatgaacagagtaaaagtggcccaggacctagtcaacgaaaggctgtatagaacacgaccggaagccctgtcattcactagtatcgtggacacccccgaagtggttctggctaaagccaatagcctccagatctccgagaagctctaccaggaggcctggaataaggacaaaagtaacatcacgatcccttcagacacgcctgagatgctgcaggcgcatattaacgcgctgcagattagcaacaagctctaccaaaaagactggaacgataccaagcagaagggctacgacattcgggcagacgcgattgaaatcaagcacgccaaggcttctcgggagatcgcaagtgagtacaagtacaaggagggttataggaagcagcttggccaccacatgggtttccgcacactccaggacgaccccaagagcgtgtgggccatccacgccgcaaagattcaatctgatagggaatacaagaaggcctacgaaaagagcaagggaatccacaataccccattagacatgatgagtattgtccaggcaaaaaagtgtcaggtactggtgtcagatatcgattaccgcaactacctccatcagtggacatgtctgcctgatcagaacgacgtcatccaagccaaaaaagcatatgatttacagtccgataacctgtacaaatccgacttggaatggcttaagggcattggttggctgccagaggggtccgtggaagtgatgcgagtcaagaacgctcagaatctgctcaatgagcgcttgtatcgcatcaaacctgaggcactaaaattcactagcattgtggacacacctgaggtcattcaggccaaaattaacgctgtgcagatctctgaacctctttaccgcaatgcatgggaaaaagagaaagcgaacgtcaatgttcccgcagacactccactgatgcttcagtctaagataaacgcccttcagatcagcaacaaacgctatcagcaagcttgggaggatgtgaaaatgaccggatacgacctgagggccgatgctataggcatacagcatgcaaaagcgtctagggatatcgcaagcgattatctatacaaaacggcatacgagaaacagaagggtcattacattgggtgcagaagcgcaaaagaagatcctaaactcgtctgggcagctaatgtgctgaagatgcaaaatgatcggctctacaaaaaggcctacaatgatcacaaagccaaaatatctatcccagtggacatggtgagtatcagcgcagccaaagaggggcaagccttagcctccgacgtggactaccgacattatttgcaccattggtcttgctttcctgatcaaaacgacgtgattcaggcacgcaaggcttatgatcttcagtcagatagcgtgtataaagccgacttagaatggctgaggggaattggatggatgcctgagggctcggtcgagatgaatcgggtaaaagtcgcccaagatctggtaaatgagcgcctctacaggaccagacccgaggctctgagtttcacatccatcgtggatacacctgaagtcgtgttggcgaaggcgaatagcttacagatcagcgagaagctgtaccaggaagcgtggaacaaggacaagtccaatataaccatccctagcgatactccagagatgttgcaggcacacatcaacgctctgcaaatctccaataaactttatcaaaaggactggaatgacacaaaacagaaggggtacgacatccgagccgacgctatagagattaaacatgctaaggcatccagagagatagcctcagagtataagtataaggaaggctatcgcaagcagctgggccaccacatggggtttcgtaccctccaggatgaccccaaatccgtctgggctatccacgcagccaagattcagagcgatcgggagtacaagaaggcctacgaaaagagcaagggaattcacaacacccccctggacatgatgtctattgtacaggcgaagaagtgtcaggtgctggtgagcgatatcgattaccggaattatcttcaccagtggacatgcttgcctgatcagaacgacgttatccaggcaaaaaaggcgtacgacctgcagtctgacaacttatataaatccgatttggagtggttgaaagggatcggctggttacccgagggatcagttgaggttatgagggtgaaaaatgctcagaacttactaaatgagcgcctgtacaggattaagcctgaggccctgaaattcacgtctattgtggatacaccagaggtgatacaggcaaagattaacgctgttcagataagtgagcccctgtaccgcgacgcctgggagaaggagaaagcaaacgtgaacgtacccgctgacacccccctcatgcttcagtccaagattaatgcattgcaaattagcaacaagaggtaccagcaggcctgggaggatgtaaaaatgaccggatacgatctccgggctgatgcgattggcatccaacacgccaaggcctcacgtgacatcgcgtcagattacttgtacaagaccgcgtatgagaagcagaaaggacactatatagggtgtcgctcagcgaaggaagatccaaaattagtgtgggccgctaatgtgttgaagatgcagaacgaccggctctataaaaaggcatacaacgatcataaagctaagatatcaatcccagttgacatggtgtctatcagcgcagccaaagaagggcaggctctcgccagcgacgtggactacaggcactacctgcatcggtggtcctgcttccctgaccagaacgatgtcatccaggccaggaaagcctatgacttacaatctgacgcactttacaaagctgatctggagtggctcagaggcataggatggatgcctcagggctcgcctgaggtgctcagagttaaaaacgctcaaaatatcttctgcgatagcgtctacagaactccggtggtcaacctcaagtacacttccattgtggatacaccagaggtggtgctagcgaaatcaaacgccgaaaacatctcaatcccaaaataccgcgaagtctgggataaggataaaacttctatccacatcatgccagatacacccgagataaacttggcccgtgccaacgccctgaatgtgtctaacaagctctaccgtgaaggatgggatgagatgaaggcaggttgcgacgtacggttagatgcaatcccaatccaggctgccaaagccagtcgggagattgcttctgactacaagtacaaactggaccacgagaaacagaaaggacactatgtcgggacattgaccgcaagggatgataataagatcagatgggccctcatagccgataagctgcaaaacgaacgcgagtaccgactggattgggcaaaatggaaggccaaaattcagtccccagtcgacatgctgtccatcctgcattccaaaaacagccaagcactggtctccgatatggattaccgaaactacctgcaccagtggacttgcatgccagaccagaatgacgtcatccaggccaaaaaagcttatgagctgcagagcgacaacgtgtataaggcggacctggagtggttacggggaatcggctggatgcccaatgacagcgtctccgtgaaccacgcaaaacacgcagccgacatttttagcgagaaaaaataccgtacgaagatcgagactctgaatttcacccctgtggacgacagggtggactacgtgactgcaaaacagtctggcgaaatactggacgatatcaaatatcggaaagattggaacgcaactaagagcaagtacacacttactgagacacctctactccatacagcccaagaggcagcgagaattttggatcagtatctgtacaaggaaggctgggaacgacagaaggccacaggctacattcttcccccagacgccgtgccatttgtccacgcccatcactgtaatgatgtgcagtctgaactgaagtacaaggcagaacacgtgaagcagaagggtcattacgtaggagtgccgacaatgagagatgatcccaaacttgtctggttcgagcacgccggacagatccaaaacgaaaggctctacaaagaggattatcacaaaactaaagccaaaataaatatacctgccgatatggtgagtgtgctcgcagctaaacaaggccaaactctcgtgagcgacattgattatcggaactatttacaccagtggatgtgccaccctgaccagaatgatgttatccaagccaggaaagcttacgacctgcaaagtgacaatgtgtatagggccgatcttgagtggcttcgcggtattgggtggattcccctggatagtgtggatcatgtgcgtgtgactaaaaaccaagagatgatgtcacagattaaatataagaagaacgccctcgagaactacccaaatttccgcagcgtggtcgaccctccagaaatagtattagccaaaatcaattcagtcaaccagtctgatgtaaagtacaaagaaacattcaacaaggccaagggaaagtacaccttttcgccagacactcctcacattagtcattctaaggatatgggtaagctgtatagtaccatcttgtacaaaggggcatgggaaggaacgaaagcctacggttacacccttgacgaacggtacattcccatcgtcggtgccaaacatgcggatctggtcaactccgagcttaagtataaggagacctatgaaaagcaaaaggggcattatctggctggcaaagtgatcggcgagtttcctggagtcgttcattgcctggactttcaaaaaatgcgaagtgccctcaactaccgcaagcattacgaggacaccaaggctaacgtccacatacctaatgacatgatgaaccacgtcctggcgaagaggtgccagtatattttgagcgaccttgaatacaggcactatttccatcagtggaccagccttcttgaggagcccaacgtgatccgagtacgcaatgcacaggaaatcctctccgataatgtgtataaggacgacctgaattggctaaaaggcatcggttgttacgtgtgggacacgccccaaatcctgcatgctaaaaagagctatgacttgcagtcccagttgcaatataccgccgctggcaaggaaaatcttcagaactacaacctggtgaccgacacacctctttatgtcaccgccgtgcagtccggaatcaacgcctccgaggtaaagtacaaggagaactaccaccagataaaagacaaatacactactgtgctggagacagtggactatgaccgtacacgcaatctcaaaaatctatatagttccaacctgtataaagaggcttgggatcgggtgaaggccactagctatattctcccttcctccacactgtcactcactcacgccaaaaatcaaaagcacctggcttcccacattaagtatcgggaggagtatgagaaattcaaagccctttacaccctgcctaggagtgtggacgacgaccctaacacagcccgttgcttgcgagtcggaaaactcaacatcgacagattgtaccgcagtgtctacgagaaaaacaagatgaagatacacatcgtccccgacatggttgagatggtaactgccaaagatagtcagaaaaaggtctcagaaattgattatcgtttgaggcttcatgaatggatttgtcaccccgacctccaagtaaacgaccatgtccgcaaagtgacagatcaaataagtgatatcgtctataaagacgatctgaactggctgaagggtatcggctgttatgtgtgggatacacctgaaatattgcacgccaaacacgcctacgacctcagagacgatattaagtacaaggcacatatgttgaagacacgcaatgattacaagctagtcactgacactcctgtatatgtgcaggcagtcaagtcaggtaagcaacttagcgacgctgtataccactacgactacgtgcatagcgtgagagggaaggtggcccctacaacaaagaccgtcgaccttgacagggctttgcacgcatacaagctgcagtcctctaacttgtacaagacctcgttgcgaactttgcccacaggataccggttgcctggggacactcctcacttcaagcacattaaagacactcgctatatgagttcatatttcaaatataaagaggcttacgaacacaccaaagcctatggctatacgttggggcctaaggacgtgccttttgttcatgttcgaagggttaacaacgtgacatccgagcgtctgtacagagagctgtaccataaattgaaggacaagatccatacaactccagataccccggagatccgtcaagttaaaaaaactcaggaagcagtctccgagctgatctacaagagtgactttttcaagatgcaagggcatatgataagcctgccctacacaccacaagtaatccactgtaggtatgtcggggatatcacgtctgatatcaagtataaggaggacctgcaggtcttgaaggggttcgggtgtttcctctacgatacccccgatatggtccggtctagacacctccggaagctgtggtctaactatctgtatacagacaaagcgcgtaaaatgcgcgacaagtataaggttgtgcttgatacaccagaatatcgaaaggtgcaggagctgaaaacacaccttagcgagctagtctaccgtgcggcaggcaagaaacagaagtctatctttacatcagtgccggacacccccgatctgctgcgcgctaagagaggacaaaagctgcagagccagtatttatacgtcgagctggctacaaaagagcgtccccaccaccacgccggaaaccaaaccactgcactgaaacatgctaaagacgtgaaagatatggttagtgagaagaagtataagatacagtatgagaaaatgaaagataagtatacacctgtacccgacacccctatactgatccgcgctaaacgcgcttattggaatgccagtgaccttaggtataaggaaacctttcaaaagactaagggaaagtaccacactgtgaaggatgccctggacattgtctatcaccgaaaagtgactgacgacataagcaaaattaagtataaagagaactacatgtctcagctgggaatctggcgaagcatccctgatagaccagagcatttccaccatagggccgttactgacacagtctccgatgttaaatacaaggaggaccttacttggctgaagggcattgggtgctatgcctacgacacccctgatttcacactcgctgaaaaaaacaagactctctattcaaaatacaaatacaaagaggtgttcgaaaggaccaagagtgatttcaaatatgtcgctgactcacccatcaatagacattttaagtatgcgactcagctaatgaacgagcggaagtacaagtcttcagctaaaatgtttctgcagcacggttgtaacgaaatactgagacctgacatgctgaccgccctatataacagccacatgtggagccagatcaagtaccgtaaaaattatgagaagtcaaaggacaagttcacctctattgttgacaccccagagcacttgcgcacaacgaaagtcaacaagcagataagtgacattctatacaagttagagtataacaaggccaaaccacgaggctatacgaccatacacgatacaccaatgctcctccacgttaggaaggtcaaggacgaagtatcagatttgaaatacaaggaagtgtaccagcggaacaaaagcaactgcacgatagagccagatgctgtgcacattaaggccgcaaaggacgcatacaaggtaaatactaatctggactacaagaaacaatacgaagctaacaaagctcattggaagtggacgcctgacagaccagactttctccaagctgcgaagtcttccctgcagcagtccgattttgagtacaaactcgaccgcgagtttctgaagggctgtaaacttagtgtgacagacgacaaaaacacggtgctggcactcagaaatacacttatagaaagcgatctcaaatacaaggagaagcacgtcaaggaacgagggacctgccacgccgtgcctgatactccccaaattctgctcgcaaaaaccgtgtcaaacctcgtatccgagaataagtataaggaccatgttaagaagcaccttgcccagggctcatacaccaccctgccggaaacccgggacaccgtgcacgtaaaggaagtcaccaaacacgtgtcagatacaaattataaaaaaaagttcgtgaaggagaagggaaagagtaattatagcattatgttggaacctcctgaggtgaaacacgctatggaagtcgcaaagaagcaatccgacgtggcgtacaggaaggatgctaaggaaaatttgcactacaccacagtcgcagataggccggatatcaagaaggccacccaggctgcgaaacaggccagtgaggtggaatatagggccaaacacaggaaagagggctctcacgggctctctatgttgggaaggcccgacattgagatggccaaaaaagccgctaagctgagctcccaggtgaagtaccgggaaaacttcgacaaagagaaggggaagacccctaagtataatccaaaggacagccaactgtataaagtcatgaaagatgctaataacctggctagtgaagttaagtacaaggcagacttaaagaagctgcacaagcccgtgacagacatgaaggagtccctcattatgaaccacgtcctgaacaccagccagttggcctcctcttaccagtataagaagaaatacgagaagtccaagggtcactaccataccatcccggataacttggaacagctgcatctcaaagaggccaccgagctccagtccatcgttaaatacaaggagaagtacgaaaaagaacgagggaagccaatgctggattttgaaactcctacctacatcaccgcaaaggaatcacagcagatgcaaagtggaaaagagtatcggaaagattacgaggagtccatcaaaggaaggaacttaaccggacttgaagtgaccccagccctgctccatgtaaaatacgccacaaaaatcgcaagcgagaaagagtaccgcaaagatcttgaagagagtattaggggtaaaggcctgacggaaatggaggacacgccagacatgctgagagctaaaaatgcaacacagatcctgaacgaaaaagagtataagcgcgacttggagctggaagtcaaaggcagaggcctaaacgctatggcgaatgagactccagacttcatgagggccagaaatgcgacggacatcgcatctcagattaaatacaagcagtccgcggagatggagaaagctaacttcacatctgttgttgacactcccgaaataatccacgcacagcaggtaaagaatttgagcagccagaagaaatataaagaggacgctgagaagtcaatgagttattacgagacagtacttgacactccagagattcaacgggtaagagaaaaccagaagaacttctcactgctccagtaccaatgcgacctcaagaatagcaagggcaagattactgttgtgcaagacacaccagagattctgagagtgaaggagaatcaaaaaaatttttcgtccgttctttacaaagaagatgtcagtccgggtacagccatcggcaagactcctgaaatgatgcgtgtgaagcagactcaggaccacattagtagcgtgaagtacaaagaagccattggacagggaactcctatcccggatttgcctgaagtcaagcgcgtaaaagagacacagaaacacattagtagcgtgatgtataaagagaatctgggaactgggattccaacaacagtaacacctgaaatagaacgggtaaaaaggaatcaggaaaatttttcctctgtgctgtataaggagaaccttggcaaaggcattccaacccctatcacccctgagatggagagagttaagaggaaccaggagaacttttctagtattttatacaaggaaaacctatccaaaggaacgcccttacctgtgacgcccgagatggaacgcgttaagctgaatcaggagaacttcagttcagtgttgtacaaagagaatgtgggaaagggaatcccaatccctattacacccgaaatggagcgagttaagcacaatcaggaaaattttagtagcgttctgtacaaagagaatcttggtaccggcatacctattcccataactcccgaaatgcagagagtgaagcacaatcaggaaaacctgagcagcgtgctctataaagaaaatatggggaaaggtacacctctgccagttacgcctgagatggaacgtgtgaagcataaccaagaaaatatctcttcagtgctttacaaggaaaacatggggaaaggtaccccactgccagtgacgcctgaaatggaacgggttaagcataaccaggagaacatttccagcgtgctctacaaagaaaatatggggaagggcacgcccttggccgtgacccccgagatggagcgcgtgaaacataaccaggaaaatatctcctctgtcttgtacaaagaaaatgtggggaaggccaccgccacacctgtgaccccggaaatgcaacgagtcaagcgaaaccaagaaaacatctcttccgtgctttacaaggagaacctgggtaaagcaaccccaacacctttcacccccgaaatggagcgagtgaagcgaaatcaggaaaatttcagttcagttctatacaaggagaacatgaggaaagccacaccaaccccggtcacccccgaaatggagagggccaaacgcaaccaggagaacatcagcagtgtgctttatagtgattcctttcggaagcaaatccaggggaaggcggcttacgtgcttgacacccctgagatgaggcgcgtgagggaaacacagcggcatatctcgacggtgaagtatcatgaagattttgaaaaacacaaagggtgcttcacaccggttgtgactgacccaatcaccgagagagtgaaaaaaaacatgcaggatttcagtgacatcaactatcggggaatccagaggaaagtggtggagatggaacaaaagcggaacgaccaggaccaggaaactattactgggctgcgcgtctggagaactaaccctggtagcgtgtttgactacgaccccgctgaggataacatacagtcacgatcgcttcatatgatcaacgtacaggctcagcgccgaagcagagagcagtctcgctccgcaagcgcattgtccatctctggcggagaggagaaatcagagcatagtgaggctcccgaccaccatctgagcacctattcagacggtggggtgttcgcggtgtctacagcctacaaacacgctaagaccactgagttgccccaacagaggagctcaagtgtggccacacaacagacaacagtctcatcaattcctagtcacccctctaccgctggaaagattttccgagccatgtacgattatatggcagccgacgcagacgaggtgagtttcaaggacggcgatgccatcattaacgtccaagcgatcgatgagggatggatgtatggaacggtccagaggaccgggaggacagggatgctgcccgctaactacgttgaggccatttag

SEQ ID NO: 62996 - DNA, 25578 bp, Artificial Sequence
  derived and/or modified sequence
atggccgacgacgaggactacgaggaggtggtggagtactacaccgaggaggtggtgtacgaggaggtgcccggcgagaccatcaccaagatctacgagaccaccaccaccagaaccagcgactacgagcagagcgagaccagcaagcccgccctggcccagcccgccctggcccagcccgccagcgccaagcccgtggagagaagaaaggtgatcagaaagaaggtggaccccagcaagttcatgaccccctacatcgcccacagccagaagatgcaggacctgttcagccccaacaagtacaaggagaagttcgagaagaccaagggccagccctacgccagcaccaccgacacccccgagctgagaagaatcaagaaggtgcaggaccagctgagcgaggtgaagtacagaatggacggcgacgtggccaagaccatctgccacgtggacgagaaggccaaggacatcgagcacgccaagaaggtgagccagcaggtgagcaaggtgctgtacaagcagaactgggaggacaccaaggacaagtacctgctgccccccgacgcccccgagctggtgcaggccgtgaagaacaccgccatgttcagcaagaagctgtacaccgaggactgggaggccgacaagagcctgttctacccctacaacgacagccccgagctgagaagagtggcccaggcccagaaggccctgagcgacgtggcctacaagaagggcctggccgagcagcaggcccagttcacccccctggccgacccccccgacatcgagttcgccaagaaggtgaccaaccaggtgagcaagcagaagtacaaggaggactacgagaacaagatcaagggcaagtggagcgagaccccctgcttcgaggtggccaacgccagaatgaacgccgacaacatcagcaccagaaagtaccaggaggacttcgagaacatgaaggaccagatctacttcatgcagaccgagacccccgagtacaagatgaacaagaaggccggcgtggccgccagcaaggtgaagtacaaggaggactacgagaagaacaagggcaaggccgactacaacgtgctgcccgccagcgagaacccccagctgagacagctgaaggccgccggcgacgccctgagcgacaagctgtacaaggagaactacgagaagaccaaggccaagagcatcaactactgcgagacccccaagttcaagctggacaccgtgctgcagaacttcagcagcgacaagaagtacaaggacagctacctgaaggacatcctgggccactacgtgggcagcttcgaggacccctaccacagccactgcatgaaggtgaccgcccagaacagcgacaagaactacaaggccgagtacgaggaggacagaggcaagggcttcttcccccagaccatcacccaggagtacgaggccatcaagaagctggaccagtgcaaggaccacacctacaaggtgcaccccgacaagaccaagttcacccaggtgaccgacagccccgtgctgctgcaggcccaggtgaacagcaagcagctgagcgacctgaactacaaggccaagcacgagagcgagaagttcaagtgccacatcccccccgacacccccgccttcatccagcacaaggtgaacgcctacaacctgagcgacaacctgtacaagcaggactgggagaagagcaaggccaagaagttcgacatcaaggtggacgccatccccctgctggccgccaaggccaacaccaagaacaccagcgacgtgatgtacaagaaggactacgagaagaacaagggcaagatgatcggcgtgctgagcatcaacgacgaccccaagatgctgcacagcctgaaggtggccaagaaccagagcgacagactgtacaaggagaactacgagaagaccaaggccaagagcatgaactactgcgagacccccaagtaccagctggacacccagctgaagaacttcagcgaggccagatacaaggacctgtacgtgaaggacgtgctgggccactacgtgggcagcatggaggacccctaccacacccactgcatgaaggtggccgcccagaacagcgacaagagctacaaggccgagtacgaggaggacaagggcaagtgctacttcccccagaccatcacccaggagtacgaggccatcaagaagctggaccagtgcaaggaccacacctacaaggtgcaccccgacaagaccaagttcaccgccgtgaccgacagccccgtgctgctgcaggcccagctgaacaccaagcagctgagcgacctgaactacaaggccaagcacgagggcgagaagttcaagtgccacatccccgccgacgccccccagttcatccagcacagagtgaacgcctacaacctgagcgacaacgtgtacaagcaggactgggagaagagcaaggccaagaagttcgacatcaaggtggacgccatccccctgctggccgccaaggccaacaccaagaacaccagcgacgtgatgtacaagaaggactacgagaagagcaagggcaagatgatcggcgccctgagcatcaacgacgaccccaagatgctgcacagcctgaagaccgccaagaaccagagcgacagagagtacagaaaggactacgagaagagcaagaccatctacaccgcccccctggacatgctgcaggtgacccaggccaagaagagccaggccatcgccagcgacgtggactacaagcacatcctgcacagctacagctacccccccgacagcatcaacgtggacctggccaagaaggcctacgccctgcagagcgacgtggagtacaaggccgactacaacagctggatgaagggctgcggctgggtgcccttcggcagcctggagatggagaaggccaagagagccagcgacatcctgaacgagaagaagtacagacagcaccccgacaccctgaagttcaccagcatcgaggacgcccccatcaccgtgcagagcaagatcaaccaggcccagagaagcgacatcgcctacaaggccaagggcgaggagatcatccacaagtacaacctgccccccgacctgccccagttcatccaggccaaggtgaacgcctacaacatcagcgagaacatgtacaaggccgacctgaaggacctgagcaagaagggctacgacctgagaaccgacgccatccccatcagagccgccaaggccgccagacaggccgccagcgacgtgcagtacaagaaggactacgagaaggccaagggcaagatggtgggcttccagagcctgcaggacgaccccaagctggtgcactacatgaacgtggccaagatccagagcgacagagagtacaagaaggactacgagaagaccaagagcaagtacaacaccccccacgacatgttcaacgtggtggccgccaagaaggcccaggacgtggtgagcaacgtgaactacaagcacagcctgcaccactacacctacctgcccgacgccatggacctggagctgagcaagaacatgatgcagatccagagcgacaacgtgtacaaggaggactacaacaactggatgaagggcatcggctggatccccatcggcagcctggacgtggagaaggtgaagaaggccggcgacgccctgaacgagaagaagtacagacagcaccccgacaccctgaagttcaccagcatcgtggacagccccgtgatggtgcaggccaagcagaacaccaagcaggtgagcgacatcctgtacaaggccaagggcgaggacgtgaagcacaagtacaccatgagccccgacctgccccagttcctgcaggccaagtgcaacgcctacaacatcagcgacgtgtgctacaagagagactggtacgacctgatcgccaagggcaacaacgtgctgggcgacgccatccccatcaccgccgccaaggccagcagaaacatcgccagcgactacaagtacaaggaggcctacgagaagagcaagggcaagcacgtgggcttcagaagcctgcaggacgaccccaagctggtgcactacatgaacgtggccaagctgcagagcgacagagagtacaagaagaactacgagaacaccaagaccagctaccacacccccggcgacatggtgagcatcaccgccgccaagatggcccaggacgtggccaccaacgtgaactacaagcagcccctgcaccactacacctacctgcccgacgccatgagcctggagcacaccagaaacgtgaaccagatccagagcgacaacgtgtacaaggacgagtacaacagcttcctgaagggcatcggctggatccccatcggcagcctggaggtggagaaggtgaagaaggccggcgacgccctgaacgagagaaagtacagacagcaccccgacaccgtgaagttcaccagcgtgcccgacagcatgggcatggtgctggcccagcacaacaccaagcagctgagcgacctgaactacaaggtggagggcgagaagctgaagcacaagtacaccatcgaccccgagctgccccagttcatccaggccaaggtgaacgccctgaacatgagcgacgcccactacaaggccgactggaagaagaccatcgccaagggctacgacctgagacccgacgccatccccatcgtggccgccaagagcagcagaaacatcgccagcgactgcaagtacaaggaggcctacgagaaggccaagggcaagcaggtgggcttcctgagcctgcaggacgaccccaagctggtgcactacatgaacgtggccaagatccagagcgacagagagtacaagaagggctacgaggccagcaagaccaagtaccacacccccctggacatggtgagcgtgaccgccgccaagaagagccaggaggtggccaccaacgccaactacagacagagctaccaccactacaccctgctgcccgacgccctgaacgtggagcacagcagaaacgccatgcagatccagagcgacaacctgtacaagagcgacttcaccaactggatgaagggcatcggctgggtgcccatcgagagcctggaggtggagaaggccaagaaggccggcgagatcctgagcgagaagaagtacagacagcaccccgagaagctgaagttcacctacgccatggacaccatggagcaggccctgaacaagagcaacaagctgaacatggacaagagactgtacaccgagaagtggaacaaggacaagaccaccatccacgtgatgcccgacacccccgacatcctgctgagcagagtgaaccagatcaccatgagcgacaagctgtacaaggccggctgggaggaggagaagaagaagggctacgacctgagacccgacgccatcgccatcaaggccgccagagccagcagagacatcgccagcgactacaagtacaagaaggcctacgagcaggccaagggcaagcacatcggcttcagaagcctggaggacgaccccaagctggtgcacttcatgcaggtggccaagatgcagagcgacagagagtacaagaagggctacgagaagagcaagaccagcttccacacccccgtggacatgctgagcgtggtggccgccaagaagagccaggaggtggccaccaacgccaactacagaaacgtgatccacacctacaacatgctgcccgacgccatgagcttcgagctggccaagaacatgatgcagatccagagcgacaaccagtacaaggccgactacgccgacttcatgaagggcatcggctggctgcccctgggcagcctggaggccgagaagaacaagaaggccatggagatcatcagcgagaagaagtacagacagcaccccgacaccctgaagtacagcaccctgatggacagcatgaacatggtgctggcccagaacaacgccaagatcatgaacgagcacctgtacaagcaggcctgggaggccgacaagaccaaggtgcacatcatgcccgacatcccccagatcatcctggccaaggccaacgccatcaacatgagcgacaagctgtacaagctgagcctggaggagagcaagaagaagggctacgacctgagacccgacgccatccccatcaaggccgccaaggccagcagagacatcgccagcgactacaagtacaagtacaactacgagaagggcaagggcaagatggtgggcttcagaagcctggaggacgaccccaagctggtgcacagcatgcaggtggccaagatgcagagcgacagagagtacaagaagaactacgagaacaccaagaccagctaccacacccccgccgacatgctgagcgtgaccgccgccaaggacgcccaggccaacatcaccaacaccaactacaagcacctgatccacaagtacatcctgctgcccgacgccatgaacatcgagctgaccagaaacatgaacagaatccagagcgacaacgagtacaagcaggactacaacgagtggtacaagggcctgggctggagccccgccggcagcctggaggtggagaaggccaagaaggccaccgagtacgccagcgaccagaagtacagacagcaccccagcaacttccagttcaagaagctgaccgacagcatggacatggtgctggccaagcagaacgcccacaccatgaacaagcacctgtacaccatcgactggaacaaggacaagaccaagatccacgtgatgcccgacacccccgacatcctgcaggccaagcagaaccagaccctgtacagccagaagctgtacaagctgggctgggaggaggccctgaagaagggctacgacctgcccgtggacgccatcagcgtgcagctggccaaggccagcagagacatcgccagcgactacaagtacaagcagggctacagaaagcagctgggccaccacgtgggcttcagaagcctgcaggacgaccccaagctggtgctgagcatgaacgtggccaagatgcagagcgagagagagtacaagaaggacttcgagaagtggaagaccaagttcagcagccccgtggacatgctgggcgtggtgctggccaagaagtgccaggagctggtgagcgacgtggactacaagaactacctgcaccagtggacctgcctgcccgaccagaacgacgtggtgcaggccaagaaggtgtacgagctgcagagcgagaacctgtacaagagcgacctggagtggctgagaggcatcggctggagccccctgggcagcctggaggccgagaagaacaagagagccagcgagatcatcagcgagaagaagtacagacagccccccgacagaaacaagttcaccagcatccccgacgccatggacatcgtgctggccaagaccaacgccaagaacagaagcgacagactgtacagagaggcctgggacaaggacaagacccagatccacatcatgcccgacacccccgacatcgtgctggccaaggccaacctgatcaacaccagcgacaagctgtacagaatgggctacgaggagctgaagagaaagggctacgacctgcccgtggacgccatccccatcaaggccgccaaggccagcagagagatcgccagcgagtacaagtacaaggagggcttcagaaagcagctgggccaccacatcggcgccagaaacatcgaggacgaccccaagatgatgtggagcatgcacgtggccaagatccagagcgacagagagtacaagaaggacttcgagaagtggaagaccaagttcagcagccccgtggacatgctgggcgtggtgctggccaagaagtgccagaccctggtgagcgacgtggactacaagaactacctgcaccagtggacctgcctgcccgaccagagcgacgtgatccacgccagacaggcctacgacctgcagagcgacaacctgtacaagagcgacctgcagtggctgaagggcatcggctggatgaccagcggcagcctggaggacgagaagaacaagagagccacccagatcctgagcgaccacgtgtacagacagcaccccgaccagttcaagttcagcagcctgatggacagcatccccatggtgctggccaagaacaacgccatcaccatgaaccacagactgtacaccgaggcctgggacaaggacaagaccaccgtgcacatcatgcccgacacccccgaggtgctgctggccaagcagaacaaggtgaactacagcgagaagctgtacaagctgggcctggaggaggccaagagaaagggctacgacatgagagtggacgccatccccatcaaggccgccaaggccagcagagacatcgccagcgagttcaagtacaaggagggctacagaaagcagctgggccaccacatcggcgccagagccatcagagacgaccccaagatgatgtggagcatgcacgtggccaagatccagagcgacagagagtacaagaaggacttcgagaagtggaagaccaagttcagcagccccgtggacatgctgggcgtggtgctggccaagaagtgccagaccctggtgagcgacgtggactacaagaactacctgcaccagtggacctgcctgcccgaccagagcgacgtgatccacgccagacaggcctacgacctgcagagcgacaacatgtacaagagcgacctgcagtggatgagaggcatcggctgggtgagcatcggcagcctggacgtggagaagtgcaagagagccaccgagatcctgagcgacaagatctacagacagccccccgacagattcaagttcaccagcgtgaccgacagcctggagcaggtgctggccaagaacaacgccatcaccatgaacaagagactgtacaccgaggcctgggacaaggacaagacccagatccacatcatgcccgacacccccgagatcatgctggccagaatgaacaagatcaactacagcgagagcctgtacaagctggccaacgaggaggccaagaagaagggctacgacctgagaagcgacgccatccccatcgtggccgccaaggccagcagagacatcatcagcgactacaagtacaaggacggctactgcaagcagctgggccaccacatcggcgccagaaacatcgaggacgaccccaagatgatgtggagcatgcacgtggccaagatccagagcgacagagagtacaagaaggacttcgagaagtggaagaccaagttcagcagccccgtggacatgctgggcgtggtgctggccaagaagtgccagaccctggtgagcgacgtggactacaagaactacctgcacgagtggacctgcctgcccgaccagagcgacgtgatccacgccagacaggcctacgacctgcagagcgacaacatctacaagagcgacctgcagtggctgagaggcatcggctgggtgcccatcggcagcatggacgtggtgaagtgcaagagagccaccgagatcctgagcgacaacatctacagacagccccccgacaagctgaagttcaccagcgtgaccgacagcctggagcaggtgctggccaagaacaacgccctgaacatgaacaagagactgtacaccgaggcctgggacaaggacaagacccagatccacatcatgcccgacacccccgagatcatgctggccagacagaacaagatcaactacagcgagaccctgtacaagctggccaacgaggaggccaagaagaagggctacgacctgagaagcgacgccatccccatcgtggccgccaaggccagcagagacgtgatcagcgactacaagtacaaggacggctacagaaagcagctgggccaccacatcggcgccagaaacatcgaggacgaccccaagatgatgtggagcatgcacgtggccaagatccagagcgacagagagtacaagaaggacttcgagaagtggaagaccaagttcagcagccccgtggacatgctgggcgtggtgctggccaagaagtgccagaccctggtgagcgacgtggactacaagaactacctgcacgagtggacctgcctgcccgaccagaacgacgtgatccacgccagacaggcctacgacctgcagagcgacaacatctacaagagcgacctgcagtggctgagaggcatcggctgggtgcccatcggcagcatggacgtggtgaagtgcaagagagccgccgagatcctgagcgacaacatctacagacagccccccgacaagctgaagttcaccagcgtgaccgacagcctggagcaggtgctggccaagaacaacgccctgaacatgaacaagagactgtacaccgaggcctgggacaaggacaagacccaggtgcacatcatgcccgacacccccgagatcatgctggccagacagaacaagatcaactacagcgagagcctgtacagacaggccatggaggaggccaagaaggagggctacgacctgagaagcgacgccatccccatcgtggccgccaaggccagcagagacatcgccagcgactacaagtacaaggaggcctacagaaagcagctgggccaccacatcggcgccagagccgtgcacgacgaccccaagatcatgtggagcctgcacatcgccaaggtgcagagcgacagagagtacaagaaggacttcgagaagtacaagaccagatacagcagccccgtggacatgctgggcatcgtgctggccaagaagtgccagaccctggtgagcgacgtggactacaagcaccccctgcacgagtggatctgcctgcccgaccagaacgacatcatccacgccagaaaggcctacgacctgcagagcgacaacctgtacaagagcgacctggagtggatgaagggcatcggctgggtgcccatcgacagcctggaggtggtgagagccaagagagccggcgagctgctgagcgacaccatctacagacagagacccgagaccctgaagttcaccagcatcaccgacacccccgagcaggtgctggccaagaacaacgccctgaacatgaacaagagactgtacaccgaggcctgggacaacgacaagaagaccatccacgtgatgcccgacacccccgagatcatgctggccaagctgaacagaatcaactacagcgacaagctgtacaagctggccctggaggagagcaagaaggagggctacgacctgagactggacgccatccccatccaggccgccaaggccagcagagacatcgccagcgactacaagtacaaggagggctacagaaagcagctgggccaccacatcggcgccagaaacatcaaggacgaccccaagatgatgtggagcatccacgtggccaagatccagagcgacagagagtacaagaaggagttcgagaagtggaagaccaagttcagcagccccgtggacatgctgggcgtggtgctggccaagaagtgccagatcctggtgagcgacatcgactacaagcaccccctgcacgagtggacctgcctgcccgaccagaacgacgtgatccaggccagaaaggcctacgacctgcagagcgacgccatctacaagagcgacctggagtggctgagaggcatcggctgggtgcccatcggcagcgtggaggtggagaaggtgaagagagccggcgagatcctgagcgacagaaagtacagacagcccgccgaccagctgaagttcacctgcatcaccgacacccccgagatcgtgctggccaagaacaacgccctgaccatgagcaagcacctgtacaccgaggcctgggacgccgacaagaccagcatccacgtgatgcccgacacccccgacatcctgctggccaagagcaacagcgccaacatcagccagaagctgtacaccaagggctgggacgagagcaagatgaaggactacgacctgagagccgacgccatcagcatcaagagcgccaaggccagcagagacatcgccagcgactacaagtacaaggaggcctacgagaagcagaagggccaccacatcggcgcccagagcatcgaggacgaccccaagatcatgtgcgccatccacgccggcaagatccagagcgagagagagtacaagaaggagttccagaagtggaagaccaagttcagcagccccgtggacatgctgagcatcctgctggccaagaagtgccagaccctggtgaccgacatcgactacagaaactacctgcacgagtggacctgcatgcccgaccagaacgacatcatccaggccaagaaggcctacgacctgcagagcgacagcgtgtacaaggccgacctggagtggctgagaggcatcggctggatgcccgagggcagcgtggagatgaacagagtgaaggtggcccaggacctggtgaacgagagactgtacagaaccagacccgaggccctgagcttcaccagcatcgtggacacccccgaggtggtgctggccaaggccaacagcctgcagatcagcgagaagctgtaccaggaggcctggaacaaggacaagagcaacatcaccatccccagcgacacccccgagatgctgcaggcccacatcaacgccctgcagatcagcaacaagctgtaccagaaggactggaacgacgccaagcagaagggctacgacatcagagccgacgccatcgagatcaagcacgccaaggccagcagagagatcgccagcgagtacaagtacaaggagggctacagaaagcagctgggccaccacatgggcttcagaaccctgcaggacgaccccaagagcgtgtgggccatccacgccgccaagatccagagcgacagagagtacaagaaggcctacgagaagagcaagggcatccacaacacccccctggacatgatgagcatcgtgcaggccaagaagtgccaggtgctggtgagcgacatcgactacagaaactacctgcaccagtggacctgcctgcccgaccagaacgacgtgatccaggccaagaaggcctacgacctgcagagcgacaacctgtacaagagcgacctggagtggctgaagggcatcggctggctgcccgagggcagcgtggaggtgatgagagtgaagaacgcccagaacctgctgaacgagagactgtacagaatcaagcccgaggccctgaagttcaccagcatcgtggacacccccgaggtgatccaggccaagatcaacgccgtgcagatcagcgagcccctgtacagagacgcctgggagaaggagaaggccaacgtgaacgtgcccgccgacacccccctgatgctgcagagcaagatcaacgccctgcagatcagcaacaagagataccagcaggcctgggaggacgtgaagatgaccggctacgacctgagagccgacgccatcggcatccagcacgccaaggccagcagagacatcgccagcgactacctgtacaagaccgcctacgagaagcagaagggccactacatcggctgcagaagcgccaaggaggaccccaagctggtgtgggccgccaacgtgctgaagatgcagaacgacagactgtacaagaaggcctacaacgaccacaaggccaagatcagcatccccgtggacatggtgagcatcagcgccgccaaggagggccaggccctggccagcgacgtggactacagacactacctgcaccactggagctgcttccccgaccagaacgacgtgatccaggccagaaaggcctacgacctgcagagcgacagcgtgtacaaggccgacctggagtggctgagaggcatcggctggatgcccgagggcagcgtggagatgaacagagtgaaggtggcccaggacctggtgaacgagagactgtacagaaccagacccgaggccctgagcttcaccagcatcgtggacacccccgaggtggtgctggccaaggccaacagcctgcagatcagcgagaagctgtaccaggaggcctggaacaaggacaagagcaacatcaccatccccagcgacacccccgagatgctgcaggcccacatcaacgccctgcagatcagcaacaagctgtaccagaaggactggaacgacaccaagcagaagggctacgacatcagagccgacgccatcgagatcaagcacgccaaggccagcagagagatcgccagcgagtacaagtacaaggagggctacagaaagcagctgggccaccacatgggcttcagaaccctgcaggacgaccccaagagcgtgtgggccatccacgccgccaagatccagagcgacagagagtacaagaaggcctacgagaagagcaagggcatccacaacacccccctggacatgatgagcatcgtgcaggccaagaagtgccaggtgctggtgagcgacatcgactacagaaactacctgcaccagtggacctgcctgcccgaccagaacgacgtgatccaggccaagaaggcctacgacctgcagagcgacaacctgtacaagagcgacctggagtggctgaagggcatcggctggctgcccgagggcagcgtggaggtgatgagagtgaagaacgcccagaacctgctgaacgagagactgtacagaatcaagcccgaggccctgaagttcaccagcatcgtggacacccccgaggtgatccaggccaagatcaacgccgtgcagatcagcgagcccctgtacagaaacgcctgggagaaggagaaggccaacgtgaacgtgcccgccgacacccccctgatgctgcagagcaagatcaacgccctgcagatcagcaacaagagataccagcaggcctgggaggacgtgaagatgaccggctacgacctgagagccgacgccatcggcatccagcacgccaaggccagcagagacatcgccagcgactacctgtacaagaccgcctacgagaagcagaagggccactacatcggctgcagaagcgccaaggaggaccccaagctggtgtgggccgccaacgtgctgaagatgcagaacgacagactgtacaagaaggcctacaacgaccacaaggccaagatcagcatccccgtggacatggtgagcatcagcgccgccaaggagggccaggccctggccagcgacgtggactacagacactacctgcaccactggagctgcttccccgaccagaacgacgtgatccaggccagaaaggcctacgacctgcagagcgacagcgtgtacaaggccgacctggagtggctgagaggcatcggctggatgcccgagggcagcgtggagatgaacagagtgaaggtggcccaggacctggtgaacgagagactgtacagaaccagacccgaggccctgagcttcaccagcatcgtggacacccccgaggtggtgctggccaaggccaacagcctgcagatcagcgagaagctgtaccaggaggcctggaacaaggacaagagcaacatcaccatccccagcgacacccccgagatgctgcaggcccacatcaacgccctgcagatcagcaacaagctgtaccagaaggactggaacgacaccaagcagaagggctacgacatcagagccgacgccatcgagatcaagcacgccaaggccagcagagagatcgccagcgagtacaagtacaaggagggctacagaaagcagctgggccaccacatgggcttcagaaccctgcaggacgaccccaagagcgtgtgggccatccacgccgccaagatccagagcgacagagagtacaagaaggcctacgagaagagcaagggcatccacaacacccccctggacatgatgagcatcgtgcaggccaagaagtgccaggtgctggtgagcgacatcgactacagaaactacctgcaccagtggacctgcctgcccgaccagaacgacgtgatccaggccaagaaggcctacgacctgcagagcgacaacctgtacaagagcgacctggagtggctgaagggcatcggctggctgcccgagggcagcgtggaggtgatgagagtgaagaacgcccagaacctgctgaacgagagactgtacagaatcaagcccgaggccctgaagttcaccagcatcgtggacacccccgaggtgatccaggccaagatcaacgccgtgcagatcagcgagcccctgtacagagacgcctgggagaaggagaaggccaacgtgaacgtgcccgccgacacccccctgatgctgcagagcaagatcaacgccctgcagatcagcaacaagagataccagcaggcctgggaggacgtgaagatgaccggctacgacctgagagccgacgccatcggcatccagcacgccaaggccagcagagacatcgccagcgactacctgtacaagaccgcctacgagaagcagaagggccactacatcggctgcagaagcgccaaggaggaccccaagctggtgtgggccgccaacgtgctgaagatgcagaacgacagactgtacaagaaggcctacaacgaccacaaggccaagatcagcatccccgtggacatggtgagcatcagcgccgccaaggagggccaggccctggccagcgacgtggactacagacactacctgcacagatggagctgcttccccgaccagaacgacgtgatccaggccagaaaggcctacgacctgcagagcgacgccctgtacaaggccgacctggagtggctgagaggcatcggctggatgccccagggcagccccgaggtgctgagagtgaagaacgcccagaacatcttctgcgacagcgtgtacagaacccccgtggtgaacctgaagtacaccagcatcgtggacacccccgaggtggtgctggccaagagcaacgccgagaacatcagcatccccaagtacagagaggtgtgggacaaggacaagaccagcatccacatcatgcccgacacccccgagatcaacctggccagagccaacgccctgaacgtgagcaacaagctgtacagagagggctgggacgagatgaaggccggctgcgacgtgagactggacgccatccccatccaggccgccaaggccagcagagagatcgccagcgactacaagtacaagctggaccacgagaagcagaagggccactacgtgggcaccctgaccgccagagacgacaacaagatcagatgggccctgatcgccgacaagctgcagaacgagagagagtacagactggactgggccaagtggaaggccaagatccagagccccgtggacatgctgagcatcctgcacagcaagaacagccaggccctggtgagcgacatggactacagaaactacctgcaccagtggacctgcatgcccgaccagaacgacgtgatccaggccaagaaggcctacgagctgcagagcgacaacgtgtacaaggccgacctggagtggctgagaggcatcggctggatgcccaacgacagcgtgagcgtgaaccacgccaagcacgccgccgacatcttcagcgagaagaagtacagaaccaagatcgagaccctgaacttcacccccgtggacgacagagtggactacgtgaccgccaagcagagcggcgagatcctggacgacatcaagtacagaaaggactggaacgccaccaagagcaagtacaccctgaccgagacccccctgctgcacaccgcccaggaggccgccagaatcctggaccagtacctgtacaaggagggctgggagagacagaaggccaccggctacatcctgccccccgacgccgtgcccttcgtgcacgcccaccactgcaacgacgtgcagagcgagctgaagtacaaggccgagcacgtgaagcagaagggccactacgtgggcgtgcccaccatgagagacgaccccaagctggtgtggttcgagcacgccggccagatccagaacgagagactgtacaaggaggactaccacaagaccaaggccaagatcaacatccccgccgacatggtgagcgtgctggccgccaagcagggccagaccctggtgagcgacatcgactacagaaactacctgcaccagtggatgtgccaccccgaccagaacgacgtgatccaggccagaaaggcctacgacctgcagagcgacaacgtgtacagagccgacctggagtggctgagaggcatcggctggatccccctggacagcgtggaccacgtgagagtgaccaagaaccaggagatgatgagccagatcaagtacaagaagaacgccctggagaactaccccaacttcagaagcgtggtggacccccccgagatcgtgctggccaagatcaacagcgtgaaccagagcgacgtgaagtacaaggagaccttcaacaaggccaagggcaagtacaccttcagccccgacaccccccacatcagccacagcaaggacatgggcaagctgtacagcaccatcctgtacaagggcgcctgggagggcaccaaggcctacggctacaccctggacgagagatacatccccatcgtgggcgccaagcacgccgacctggtgaacagcgagctgaagtacaaggagacctacgagaagcagaagggccactacctggccggcaaggtgatcggcgagttccccggcgtggtgcactgcctggacttccagaagatgagaagcgccctgaactacagaaagcactacgaggacaccaaggccaacgtgcacatccccaacgacatgatgaaccacgtgctggccaagagatgccagtacatcctgagcgacctggagtacagacactacttccaccagtggaccagcctgctggaggagcccaacgtgatcagagtgagaaacgcccaggagatcctgagcgacaacgtgtacaaggacgacctgaactggctgaagggcatcggctgctacgtgtgggacaccccccagatcctgcacgccaagaagagctacgacctgcagagccagctgcagtacaccgccgccggcaaggagaacctgcagaactacaacctggtgaccgacacccccctgtacgtgaccgccgtgcagagcggcatcaacgccagcgaggtgaagtacaaggagaactaccaccagatcaaggacaagtacaccaccgtgctggagaccgtggactacgacagaaccagaaacctgaagaacctgtacagcagcaacctgtacaaggaggcctgggacagagtgaaggccaccagctacatcctgcccagcagcaccctgagcctgacccacgccaagaaccagaagcacctggccagccacatcaagtacagagaggagtacgagaagttcaaggccctgtacaccctgcccagaagcgtggacgacgaccccaacaccgccagatgcctgagagtgggcaagctgaacatcgacagactgtacagaagcgtgtacgagaagaacaagatgaagatccacatcgtgcccgacatggtggagatggtgaccgccaaggacagccagaagaaggtgagcgagatcgactacagactgagactgcacgagtggatctgccaccccgacctgcaggtgaacgaccacgtgagaaaggtgaccgaccagatcagcgacatcgtgtacaaggacgacctgaactggctgaagggcatcggctgctacgtgtgggacacccccgagatcctgcacgccaagcacgcctacgacctgagagacgacatcaagtacaaggcccacatgctgaagaccagaaacgactacaagctggtgaccgacacccccgtgtacgtgcaggccgtgaagagcggcaagcagctgagcgacgccgtgtaccactacgactacgtgcacagcgtgagaggcaaggtggcccccaccaccaagaccgtggacctggacagagccctgcacgcctacaagctgcagagcagcaacctgtacaagaccagcctgagaaccctgcccaccggctacagactgcccggcgacaccccccacttcaagcacatcaaggacaccagatacatgagcagctacttcaagtacaaggaggcctacgagcacaccaaggcctacggctacaccctgggccccaaggacgtgcccttcgtgcacgtgagaagagtgaacaacgtgaccagcgagagactgtacagagagctgtaccacaagctgaaggacaagatccacaccacccccgacacccccgagatcagacaggtgaagaagacccaggaggccgtgagcgagctgatctacaagagcgacttcttcaagatgcagggccacatgatcagcctgccctacaccccccaggtgatccactgcagatacgtgggcgacatcaccagcgacatcaagtacaaggaggacctgcaggtgctgaagggcttcggctgcttcctgtacgacacccccgacatggtgagaagcagacacctgagaaagctgtggagcaactacctgtacaccgacaaggccagaaagatgagagacaagtacaaggtggtgctggacacccccgagtacagaaaggtgcaggagctgaagacccacctgagcgagctggtgtacagagccgccggcaagaagcagaagagcatcttcaccagcgtgcccgacacccccgacctgctgagagccaagagaggccagaagctgcagagccagtacctgtacgtggagctggccaccaaggagagaccccaccaccacgccggcaaccagaccaccgccctgaagcacgccaaggacgtgaaggacatggtgagcgagaagaagtacaagatccagtacgagaagatgaaggacaagtacacccccgtgcccgacacccccatcctgatcagagccaagagagcctactggaacgccagcgacctgagatacaaggagaccttccagaagaccaagggcaagtaccacaccgtgaaggacgccctggacatcgtgtaccacagaaaggtgaccgacgacatcagcaagatcaagtacaaggagaactacatgagccagctgggcatctggagaagcatccccgacagacccgagcacttccaccacagagccgtgaccgacaccgtgagcgacgtgaagtacaaggaggacctgacctggctgaagggcatcggctgctacgcctacgacacccccgacttcaccctggccgagaagaacaagaccctgtacagcaagtacaagtacaaggaggtgttcgagagaaccaagagcgacttcaagtacgtggccgacagccccatcaacagacacttcaagtacgccacccagctgatgaacgagagaaagtacaagagcagcgccaagatgttcctgcagcacggctgcaacgagatcctgagacccgacatgctgaccgccctgtacaacagccacatgtggagccagatcaagtacagaaagaactacgagaagagcaaggacaagttcaccagcatcgtggacacccccgagcacctgagaaccaccaaggtgaacaagcagatcagcgacatcctgtacaagctggagtacaacaaggccaagcccagaggctacaccaccatccacgacacccccatgctgctgcacgtgagaaaggtgaaggacgaggtgagcgacctgaagtacaaggaggtgtaccagagaaacaagagcaactgcaccatcgagcccgacgccgtgcacatcaaggccgccaaggacgcctacaaggtgaacaccaacctggactacaagaagcagtacgaggccaacaaggcccactggaagtggacccccgacagacccgacttcctgcaggccgccaagagcagcctgcagcagagcgacttcgagtacaagctggacagagagttcctgaagggctgcaagctgagcgtgaccgacgacaagaacaccgtgctggccctgagaaacaccctgatcgagagcgacctgaagtacaaggagaagcacgtgaaggagagaggcacctgccacgccgtgcccgacaccccccagatcctgctggccaagaccgtgagcaacctggtgagcgagaacaagtacaaggaccacgtgaagaagcacctggcccagggcagctacaccaccctgcccgagaccagagacaccgtgcacgtgaaggaggtgaccaagcacgtgagcgacaccaactacaagaagaagttcgtgaaggagaagggcaagagcaactacagcatcatgctggagccccccgaggtgaagcacgccatggaggtggccaagaagcagagcgacgtggcctacagaaaggacgccaaggagaacctgcactacaccaccgtggccgacagacccgacatcaagaaggccacccaggccgccaagcaggccagcgaggtggagtacagagccaagcacagaaaggagggcagccacggcctgagcatgctgggcagacccgacatcgagatggccaagaaggccgccaagctgagcagccaggtgaagtacagagagaacttcgacaaggagaagggcaagacccccaagtacaaccccaaggacagccagctgtacaaggtgatgaaggacgccaacaacctggccagcgaggtgaagtacaaggccgacctgaagaagctgcacaagcccgtgaccgacatgaaggagagcctgatcatgaaccacgtgctgaacaccagccagctggccagcagctaccagtacaagaagaagtacgagaagagcaagggccactaccacaccatccccgacaacctggagcagctgcacctgaaggaggccaccgagctgcagagcatcgtgaagtacaaggagaagtacgagaaggagagaggcaagcccatgctggacttcgagacccccacctacatcaccgccaaggagagccagcagatgcagagcggcaaggagtacagaaaggactacgaggagagcatcaagggcagaaacctgaccggcctggaggtgacccccgccctgctgcacgtgaagtacgccaccaagatcgccagcgagaaggagtacagaaaggacctggaggagagcatcagaggcaagggcctgaccgagatggaggacacccccgacatgctgagagccaagaacgccacccagatcctgaacgagaaggagtacaagagagacctggagctggaggtgaagggcagaggcctgaacgccatggccaacgagacccccgacttcatgagagccagaaacgccaccgacatcgccagccagatcaagtacaagcagagcgccgagatggagaaggccaacttcaccagcgtggtggacacccccgagatcatccacgcccagcaggtgaagaacctgagcagccagaagaagtacaaggaggacgccgagaagagcatgagctactacgagaccgtgctggacacccccgagatccagagagtgagagagaaccagaagaacttcagcctgctgcagtaccagtgcgacctgaagaacagcaagggcaagatcaccgtggtgcaggacacccccgagatcctgagagtgaaggagaaccagaagaacttcagcagcgtgctgtacaaggaggacgtgagccccggcaccgccatcggcaagacccccgagatgatgagagtgaagcagacccaggaccacatcagcagcgtgaagtacaaggaggccatcggccagggcacccccatccccgacctgcccgaggtgaagagagtgaaggagacccagaagcacatcagcagcgtgatgtacaaggagaacctgggcaccggcatccccaccaccgtgacccccgagatcgagagagtgaagagaaaccaggagaacttcagcagcgtgctgtacaaggagaacctgggcaagggcatccccacccccatcacccccgagatggagagagtgaagagaaaccaggagaacttcagcagcatcctgtacaaggagaacctgagcaagggcacccccctgcccgtgacccccgagatggagagagtgaagctgaaccaggagaacttcagcagcgtgctgtacaaggagaacgtgggcaagggcatccccatccccatcacccccgagatggagagagtgaagcacaaccaggagaacttcagcagcgtgctgtacaaggagaacctgggcaccggcatccccatccccatcacccccgagatgcagagagtgaagcacaaccaggagaacctgagcagcgtgctgtacaaggagaacatgggcaagggcacccccctgcccgtgacccccgagatggagagagtgaagcacaaccaggagaacatcagcagcgtgctgtacaaggagaacatgggcaagggcacccccctgcccgtgacccccgagatggagagagtgaagcacaaccaggagaacatcagcagcgtgctgtacaaggagaacatgggcaagggcacccccctggccgtgacccccgagatggagagagtgaagcacaaccaggagaacatcagcagcgtgctgtacaaggagaacgtgggcaaggccaccgccacccccgtgacccccgagatgcagagagtgaagagaaaccaggagaacatcagcagcgtgctgtacaaggagaacctgggcaaggccacccccacccccttcacccccgagatggagagagtgaagagaaaccaggagaacttcagcagcgtgctgtacaaggagaacatgagaaaggccacccccacccccgtgacccccgagatggagagagccaagagaaaccaggagaacatcagcagcgtgctgtacagcgacagcttcagaaagcagatccagggcaaggccgcctacgtgctggacacccccgagatgagaagagtgagagagacccagagacacatcagcaccgtgaagtaccacgaggacttcgagaagcacaagggctgcttcacccccgtggtgaccgaccccatcaccgagagagtgaagaagaacatgcaggacttcagcgacatcaactacagaggcatccagagaaaggtggtggagatggagcagaagagaaacgaccaggaccaggagaccatcaccggcctgagagtgtggagaaccaaccccggcagcgtgttcgactacgaccccgccgaggacaacatccagagcagaagcctgcacatgatcaacgtgcaggcccagagaagaagcagagagcagagcagaagcgccagcgccctgagcatcagcggcggcgaggagaagagcgagcacagcgaggcccccgaccaccacctgagcacctacagcgacggcggcgtgttcgccgtgagcaccgcctacaagcacgccaagaccaccgagctgccccagcagagaagcagcagcgtggccacccagcagaccaccgtgagcagcatccccagccaccccagcaccgccggcaagatcttcagagccatgtacgactacatggccgccgacgccgacgaggtgagcttcaaggacggcgacgccatcatcaacgtgcaggccatcgacgagggctggatgtacggcaccgtgcagagaaccggcagaaccggcatgctgcccgccaactacgtggaggccatctag

SEQ ID NO: 62997 - protein, 886 aa, Artificial Sequence
  derived and/or modified sequence
MPGGGPQGAPAAAGGGGVSHRAGSRDCLPPAACFRRRRLARRPGYMRSSTGPGIGFLSPAVGTLFRFPGGVSGEESHHSESRARQCGLDSRGLLVRSPVSKSAAAPTVTSVRGTSAHFGIQLRGGTRLPDRLSWPCGPGSAGWQQEFAAMDSSETLDASWEAACSDGARRVRAAGSLPSAELSSNSCSPGCGPEVPPTPPGSHSAFTSSFSFIRLSLGSAGERGEAEGCPPSREAESHCQSPQEMGAKAASLDGPHEDPRCLSRPFSLLATRVSADLAQAARNSSRPERDMHSLPDMDPGSSSSLDPSLAGCGGDGSSGSGDAHSWDTLLRKWEPVLRDCLLRNRRQMEVISLRLKLQKLQEDAVENDDYDKVETGFHYVGQAGLELLTSSNPPASASQSAGITAETLQQRLEDLEQEKISLHFQLPSRQPALSSFLGHLAAQVQAALRRGATQQASGDDTHTPLRMEPRLLEPTAQDSLHVSITRRDWLLQEKQQLQKEIEALQARMFVLEAKDQQLRREIEEQEQQLQWQGCDLTPLVGQLSLGQLQEVSKALQDTLASAGQIPFHAEPPETIRSLQERIKSLNLSLKEITTKVCMSEKFCSTLRKKVNDIETQLPALLEAKMHAISGNHFWTAKDLTEEIRSLTSEREGLEGLLSKLLVLSSRNVKKLGSVKEDYNRLRREVEHQETAYETSVKENTMKYMETLKNKLCSCKCPLLGKVWEADLEACRLLIQSLQLQEARGSLSVEDERQMDDLEGAAPPIPPRLHSEDKRKTPLKVLEEWKTHLIPSLHCAGGEQKEESYILSAELGEKCEDIGKKLLYLEDQLHTAIHSHDEDLIHSLRRELQMVKETLQAMILQLQPAKEAGEREAAASCMTAGVHEAQA

SEQ ID NO: 62998 - protein, 92 aa, Artificial Sequence
  derived and/or modified sequence
MKYMETLKNKLCSCKCPLLGKVWEADLEACRLLIQSLQLQEARGSLSVEDERQMDDLEGAAPPIPPRLHSEDKRKTPLKVLEEWKTHLIPSL

SEQ ID NO: 62999 - DNA, 2661 bp, Artificial Sequence
  derived and/or modified sequence
atgcccggtggcgggccacagggggcaccagccgcggccggaggcggaggcgttagccatagagcagggtctcgggattgtcttccgccagctgcctgtttccggcgcaggaggctggctcggcgccccggctatatgagaagtagcaccgggccaggcattggttttctctcacctgctgtgggcacactgttcagattcccagggggggtctccggcgaagagagccatcatagtgaatcacgcgcaaggcagtgcgggcttgattctcggggtctgcttgtgagaagccctgtgtctaaatcggctgctgcacccacagtgacctcggtgcgcggcacctccgcccactttggcattcagctccgggggggaactagattgccggatagactctcctggccttgtggacctggcagcgccggttggcagcaggagtttgctgctatggattctagtgaaacgttggacgcatcatgggaggctgcttgctctgacggcgcacgtcgggtccgagcggccggaagtctgcccagcgccgagttgagttccaactcttgtagtccagggtgcggacctgaggtcccacccacaccacccggttcgcattcggcttttacttcctcatttagctttattagattgtctctggggtctgccggagagcggggggaagcagaaggttgtcctccgagtagagaggccgaaagccactgccagtcgcctcaagaaatgggagctaaagctgcttcgctggacggcccacacgaggatccaagatgcctctcccggccattttcactacttgcaacccgcgttagtgcagacctggcgcaggctgctcgcaattcaagcagaccggagagagatatgcactccctacctgatatggatccaggttcttcatcaagtctcgatccatccctcgctggttgcggcggcgatggaagctcgggttccggagatgcacactcatgggacacactgttgagaaagtgggagccagtcctaagggactgtctcctgcgaaacaggcgccagatggaggttatctctctcaggctgaaactgcagaaactccaggaagatgctgtggaaaatgatgactatgataaggtggagacaggattccattacgtcggccaagctggcttggaactcttaacctccagcaacccacccgcctcggccagccagtccgctggcatcaccgccgaaaccctccagcagaggctggaagatttggagcaagaaaaaatcagtctgcactttcagctgccatcccgccagccagctctctcctcattcctgggacatctggccgcacaggttcaggccgcactcaggagaggcgcaacacagcaggcgtcaggcgatgacacacacactcccctgcgaatggagcccagactcctggaaccaacagcgcaggactccttgcatgtgtccatcactcgcagagactggctacttcaggagaagcagcagctccagaaagagattgaggccctgcaagcacggatgttcgtgttggaagctaaagatcagcaactgcgaagggagatcgaagaacaagaacagcaactgcagtggcagggctgcgatctgacacccttggtgggccaactgtccctgggacagttgcaggaagtgtccaaggccctgcaagacacactggcctcagcaggacagatcccattccacgcagaaccccccgagacgattagatctctgcaggagcgtattaaatctttgaaccttagtctgaaggagattacaacaaaggtgtgcatgagtgagaagttctgcagcacattacggaagaaggtgaacgacatcgagacccagttaccggctctgctggaagccaaaatgcacgctataagcggaaatcacttctggaccgccaaggatctcacagaagaaattcgttccctgacctccgaacgggaagggcttgaagggctgctgagtaagctcttggtgttgtcctccagaaacgtcaagaaattaggcagcgtcaaagaggactacaatagactgcgccgtgaagtggaacatcaggaaacagcctacgagacaagcgtgaaggaaaatactatgaagtacatggaaactttaaagaataaactctgcagttgtaaatgccccctcctgggtaaggtctgggaggcggacctggaggcttgcagactgcttatccagagcctgcagttgcaggaggctcgcgggtctctatcagttgaggatgagcgccaaatggatgaccttgaaggagccgcaccacctatcccacctcggctacatagtgaagataagcgaaagactccacttaaagtgttggaagagtggaaaacccacctgataccatcactgcattgcgccggaggcgagcaaaaagaagagagctacattctgagtgctgagttgggcgagaagtgtgaggacatcggcaagaaactgctttacctggaggatcaattgcacaccgcgattcactctcacgacgaggaccttatacattccctgagacgcgaattgcagatggtcaaagagactctgcaggccatgatcctgcagctacagcctgccaaagaagccggcgaacgggaggcagccgcaagctgcatgactgcaggtgtgcacgaggcccaagcgtag

SEQ ID NO: 63000 - DNA, 2661 bp, Artificial Sequence
  derived and/or modified sequence
atgcctgggggcggcccccagggcgccccagctgctgctgggggcggcggcgtgagccaccgggccggcagccgggactgcctgcccccagctgcctgcttcagaagaagaaggctggcccggcggcccggctacatgaggagcagcacaggccctggcatcggcttcctgagccctgctgtgggcaccctcttccgcttccctgggggcgtgtctggagaggagagccaccacagcgagagccgggcccggcagtgtggcctggacagccggggcctgctggtgcgcagccctgtgtccaagtctgctgctgcccccaccgtgacctctgtgcggggcaccagcgcccacttcggcatccagctgcggggcggcacccggctgcctgaccggctgtcctggccctgtggccctggcagcgctggctggcagcaggagtttgctgccatggacagcagcgagaccctggatgcctcctgggaggccgcctgcagtgatggagccaggagagtgcgggccgccggcagcctgcccagcgctgagctgagcagcaacagctgcagccctggctgcggccctgaggtgccccccaccccacctggcagccacagcgccttcaccagcagcttctccttcatccggctgagcctgggcagcgctggggagcggggggaggccgagggctgcccccccagccgggaggccgagagccactgccagagcccccaggagatgggcgccaaggccgccagcctggatggcccccatgaggacccccgctgcctgagccggcccttcagcctgctggccaccagggtgtctgctgacctggcccaggccgccaggaacagcagcaggcctgagcgggacatgcacagcctgcctgacatggaccccggcagcagcagcagcctggaccccagcctggccggctgtggaggagatggcagcagcggcagcggagatgcccacagctgggacaccctgctgaggaagtgggagcctgtgctgcgggactgcctgctgaggaacagacggcagatggaggtgatcagcctgcggctgaagctgcagaagctgcaggaggatgctgtggagaatgatgattatgacaaggtggagaccggcttccactacgtgggccaggccggcctggagctgctgaccagcagcaaccccccagccagcgccagccagagcgctggcatcacagctgagaccctgcagcagaggctggaggacctggagcaggagaagatcagcctgcacttccagctgcccagccggcagcctgccctgagcagcttcctgggccacctggccgcccaggtgcaggccgccctgcggcggggggccacccagcaggccagcggagatgacacccacacccccctgaggatggagccccggctgctggagcccacagcccaggacagcctgcacgtgtccatcacccggcgggactggctgctgcaggagaagcagcagctgcagaaggagattgaggccctgcaggccaggatgtttgtgctggaggccaaggaccagcagctgcggcgggagattgaggagcaggagcagcagctgcagtggcagggctgtgacctgacccccctggtgggccagctgagcctgggccagctgcaggaggtgtccaaggccctgcaggacaccctggccagcgctggccagatccccttccacgccgagcccccagagaccatccgcagcctgcaggagcgcatcaagagcctgaacctgagcctgaaggagatcaccaccaaggtgtgcatgtctgagaagttctgcagcaccctgaggaagaaggtgaatgacatcgagacccagctgcctgccctgctggaggccaagatgcacgccatcagcggcaaccacttctggacagccaaggacctgacagaggagatccgcagcctgaccagcgagcgggagggcctggagggcctgctgagcaagctgctggtgctgagcagcagaaatgtgaagaagctgggctctgtgaaggaggactacaaccggctgcggcgggaggtggagcaccaggagacagcctatgagacctctgtgaaggagaacaccatgaagtacatggagaccctgaagaacaagctgtgcagctgcaagtgccccctgctgggcaaggtgtgggaggccgacctggaggcctgccgcctgctgatccagagcctgcagctgcaggaggcccggggcagcctgtctgtggaggatgagcggcagatggatgacctggagggcgccgccccacccatccccccccggctgcacagcgaggacaagaggaagacccccctgaaggtgctggaggagtggaagacccacctgatccccagcctgcactgtgccggcggggagcagaaggaggagagctacatcctgtctgctgagctgggggagaagtgtgaagatattggcaagaagctgctgtacctggaggaccagctgcacacagccatccacagccatgatgaagatctcatccacagcctgcggcgggagctgcagatggtgaaggagaccctgcaggccatgatcctgcagctgcagcctgccaaggaggccggggagcgggaggccgccgccagctgcatgacagctggggtgcatgaggcccaggcctag

SEQ ID NO: 63001 - DNA, 2661 bp, Artificial Sequence
  derived and/or modified sequence
atgcccggcggcggcccccagggcgcccccgccgccgccggcggcggtggggtgtcacacagggctggctccagggactgcctccctcctgccgcatgcttcagaaggaggcgtctagcaaggcgccctggctatatgcggagtagcaccggccctggtattggtttcctttcccccgccgttgggaccttatttagattcccaggcggcgtaagtggggaagaatcacatcattctgaatcgagggcacgccagtgcggcttagactcgcgtgggttgctggtcagatcacccgtcagtaagtcagccgccgctccaaccgttactagcgttagaggtacaagtgcacattttggcattcagctgcgtggtggtacgcgcctacctgatcgtctgtcttggccttgtgggccaggctctgccgggtggcaacaggaattcgctgccatggactcttcagagactctggatgcctcctgggaagcagcttgctccgacggtgcacgacgggtcagagccgcagggagcctgccatccgcggagctttccagcaacagctgcagtcctggctgtggaccagaggtaccccccactcctccaggaagtcactcagccttcacttctagcttttcttttatccgcctgagcctgggctctgccggtgagaggggcgaggcagaggggtgccccccaagccgagaagctgagtcccactgccagtctccacaggaaatgggcgccaaggctgcctctttagacggcccccacgaagacccgcgctgcctatcccgtccctttagcctgctggcgactagggtgtctgccgaccttgcccaggcagccagaaactcttcacgcccggaaagggacatgcactccctgcctgatatggacccaggctcaagtagtagccttgacccatcactggccggctgtggcggcgacggcagttccggctctggtgacgcacacagctgggatacactcctgcgcaaatgggagccagtccttcgcgattgtctcctgaggaatagaagacagatggaagtcatatctctgcgtctgaaactccagaagcttcaggaagacgctgtcgagaatgacgattacgataaggtcgagacaggctttcattatgtgggacaagcaggtctcgaactgctcaccagctcaaaccctcctgcaagcgcatctcaaagtgccgggataaccgcggagaccttgcagcagaggctagaggacctcgaacaagaaaaaatctccctgcactttcagctccctagtagacaacctgccctgtcttcttttctcgggcacctggctgcacaggtgcaggcagcactgcggaggggagccacacaacaggcaagcggagatgacactcataccccactgagaatggaaccacgactactggagcctaccgcgcaagactcccttcacgtgagcattacaaggcgcgactggctgctgcaagaaaaacaacagctacagaaggagattgaagccctgcaggctaggatgtttgtccttgaggcaaaagatcagcagttgaggagggaaatcgaagagcaggagcaacaacttcagtggcaggggtgtgatttaacaccactggtgggacagctgtccctggggcagctgcaggaggtaagtaaggcattgcaggataccttggctagcgccggtcagataccattccacgcggaacctcctgaaacgattagatcactgcaggagaggatcaaaagtctgaacctgagcctaaaggagattaccaccaaggtgtgtatgagcgagaagttctgctcaaccctgcgcaaaaaggtgaacgacattgaaacccaacttcccgccttgctggaggctaaaatgcacgctatatccgggaaccacttttggacagccaaagacctgacagaggagattaggagtctcaccagtgaacgggaggggcttgaaggactcctttctaagctgctggtgctgagttcccggaacgtgaagaaactgggatctgtaaaagaggactataacaggctgaggagggaggtggaacatcaggaaactgcttatgaaacatccgtaaaggaaaataccatgaagtacatggaaacgctaaagaacaagctctgtagctgcaagtgtccactgcttggtaaagtgtgggaggctgatctcgaagcatgccgcttgcttattcagagcttgcagctccaagaggccagagggagcctcagcgtcgaggacgagcgacagatggatgaccttgaaggggctgcccctcccatccccccccggctgcactctgaggacaaaagaaagactcctctgaaagtcctggaggagtggaagacacatctcataccctcactccactgtgccggcggagagcaaaaagaggaatcatatattctgagtgccgagctcggagaaaagtgcgaagatattggaaagaaattactgtacctggaggaccagttacatactgctattcactcccatgacgaggatctcattcattccctccgccgcgagctgcagatggtgaaggaaactctgcaggccatgattctccagttgcagccggcgaaggaagccggagaacgcgaggcagccgcatcatgtatgaccgctggtgtgcatgaggcccaagcctag

SEQ ID NO: 63002 - DNA, 2661 bp, Artificial Sequence
  derived and/or modified sequence
atgcctggaggcggacctcaaggcgctcccgctgccgctggcggaggaggggtgtctcatcgggctggctcacgcgactgtcttccacccgcagcctgcttcagaaggcgtcgacttgctcgacggcctgggtacatgagatccagcaccggacccggtatcggatttctctctcccgctgtgggcaccctctttcgatttccaggcggtgtttccggggaggaatcccatcacagcgaaagccgggctaggcaatgtggattagatagccggggactcctagtgaggtcacctgtgtccaagtcagcagctgcgcctacagtgacatcagttcgcggaaccagcgctcacttcggcatccagctcagggggggaactcgactccccgacagattgtcttggccttgcgggccaggcagtgccggatggcagcaagagttcgctgctatggacagttccgaaacacttgatgccagttgggaggcagcctgcagcgacggagcaaggagagtgagagcggcaggctcactgccaagtgccgagctgagtagcaacagctgtagcccgggatgtgggcctgaggtcccacccaccccccctgggtctcactctgctttcacaagcagcttcagctttatccggttgagcctgggcagtgcaggggagaggggagaggccgagggctgtcctcctagcagggaagcagaaagccattgccagagcccccaggagatgggcgcaaaagctgccagcttggatgggcctcatgaagatcctaggtgcttgtctcgcccatttagcctactagccacgcgcgtctctgccgatctcgctcaggcagctagaaattcttcccgtccagaacgcgatatgcactctcttcccgacatggacccagggtcctcaagtagcctcgatcctagcttagccggatgtggtggagacggaagcagcggatcaggggatgctcattcctgggatacgctgttgcgtaaatgggagcctgtgctccgcgactgcctgctaagaaatcgaaggcagatggaagtgattagcctgcgcctgaagcttcagaagctgcaggaagacgcagtcgagaacgacgactatgacaaggttgaaaccgggtttcactacgtgggacaagccggactggagctcttgacatcctctaatccacccgctagcgcctcccaaagcgctggtatcacagctgaaaccctgcagcagcgcctggaagaccttgagcaagagaaaatcagtctccacttccaactgccctctcgtcagcctgctctgagctcttttttgggccatctcgctgcccaggtgcaggctgccctgagacgcggtgctacacaacaagcgagcggtgacgatactcatactcctctgagaatggagcccagactgctcgagccaacagcccaggacagtttgcatgtaagtattacaaggcgggattggctgctccaagagaagcagcagttgcagaaggaaattgaggcgctgcaggctagaatgttcgtccttgaggccaaagaccagcaactacggcgagagatcgaagaacaagaacaacagctgcaatggcaaggctgtgatttgaccccgctcgtgggccagttatcccttggtcagctgcaggaagtctcaaaggcacttcaggatacactcgcttccgcgggacagattccctttcatgccgagccccctgaaaccatcagatctctccaagaacgcatcaagtcattaaaccttagcttaaaggagatcaccaccaaagtgtgcatgtccgagaaattctgcagcactctgagaaagaaggtaaatgatattgagacgcagcttccagcgcttcttgaggccaaaatgcacgcaatttcaggaaaccacttttggacagccaaagacctcactgaggaaattaggagtctgacctcagaaagagaaggattggagggtctcctatcaaagctactggtgctgtccagccggaatgtgaagaagcttggcagcgttaaagaggattacaacaggctacggcgtgaggtggaacaccaagaaaccgcttacgagacatccgtcaaagagaatacaatgaagtacatggaaacgctgaaaaacaagctctgtagttgcaaatgcccccttctcggtaaagtctgggaagccgacttggaggcctgccggctccttatacagtcacttcagctgcaggaagcaagaggatccctgagtgtggaagatgaaaggcaaatggacgatctcgagggagctgctccccctatccccccacggctgcattcagaagataaacgcaaaactccactgaaagtattagaggaatggaagacccaccttattccttctctgcattgcgctggcggtgagcagaaggaggaaagctacatattgagcgctgagctaggcgaaaaatgcgaggatataggtaagaagcttctgtatctggaggaccagctgcataccgctatccactcccatgacgaggacctgatacatagcctgcgtagggaacttcagatggtgaaggaaactctgcaagccatgatcttgcagctgcagccagctaaggaagctggtgaaagagaagccgcagcttcatgtatgacagccggagtgcacgaagcacaagcctag

SEQ ID NO: 63003 - DNA, 2661 bp, Artificial Sequence
  derived and/or modified sequence
atgcccggcggcggcccccagggcgcccccgccgccgccggcggcggcggcgtgagccacagagccggcagcagagactgcctgccccccgccgcctgcttcagaagaagaagactggccagaagacccggctacatgagaagcagcaccggccccggcatcggcttcctgagccccgccgtgggcaccctgttcagattccccggcggcgtgagcggcgaggagagccaccacagcgagagcagagccagacagtgcggcctggacagcagaggcctgctggtgagaagccccgtgagcaagagcgccgccgcccccaccgtgaccagcgtgagaggcaccagcgcccacttcggcatccagctgagaggcggcaccagactgcccgacagactgagctggccctgcggccccggcagcgccggctggcagcaggagttcgccgccatggacagcagcgagaccctggacgccagctgggaggccgcctgcagcgacggcgccagaagagtgagagccgccggcagcctgcccagcgccgagctgagcagcaacagctgcagccccggctgcggccccgaggtgccccccaccccccccggcagccacagcgccttcaccagcagcttcagcttcatcagactgagcctgggcagcgccggcgagagaggcgaggccgagggctgcccccccagcagagaggccgagagccactgccagagcccccaggagatgggcgccaaggccgccagcctggacggcccccacgaggaccccagatgcctgagcagacccttcagcctgctggccaccagagtgagcgccgacctggcccaggccgccagaaacagcagcagacccgagagagacatgcacagcctgcccgacatggaccccggcagcagcagcagcctggaccccagcctggccggctgcggcggcgacggcagcagcggcagcggcgacgcccacagctgggacaccctgctgagaaagtgggagcccgtgctgagagactgcctgctgagaaacagaagacagatggaggtgatcagcctgagactgaagctgcagaagctgcaggaggacgccgtggagaacgacgactacgacaaggtggagaccggcttccactacgtgggccaggccggcctggagctgctgaccagcagcaacccccccgccagcgccagccagagcgccggcatcaccgccgagaccctgcagcagagactggaggacctggagcaggagaagatcagcctgcacttccagctgcccagcagacagcccgccctgagcagcttcctgggccacctggccgcccaggtgcaggccgccctgagaagaggcgccacccagcaggccagcggcgacgacacccacacccccctgagaatggagcccagactgctggagcccaccgcccaggacagcctgcacgtgagcatcaccagaagagactggctgctgcaggagaagcagcagctgcagaaggagatcgaggccctgcaggccagaatgttcgtgctggaggccaaggaccagcagctgagaagagagatcgaggagcaggagcagcagctgcagtggcagggctgcgacctgacccccctggtgggccagctgagcctgggccagctgcaggaggtgagcaaggccctgcaggacaccctggccagcgccggccagatccccttccacgccgagccccccgagaccatcagaagcctgcaggagagaatcaagagcctgaacctgagcctgaaggagatcaccaccaaggtgtgcatgagcgagaagttctgcagcaccctgagaaagaaggtgaacgacatcgagacccagctgcccgccctgctggaggccaagatgcacgccatcagcggcaaccacttctggaccgccaaggacctgaccgaggagatcagaagcctgaccagcgagagagagggcctggagggcctgctgagcaagctgctggtgctgagcagcagaaacgtgaagaagctgggcagcgtgaaggaggactacaacagactgagaagagaggtggagcaccaggagaccgcctacgagaccagcgtgaaggagaacaccatgaagtacatggagaccctgaagaacaagctgtgcagctgcaagtgccccctgctgggcaaggtgtgggaggccgacctggaggcctgcagactgctgatccagagcctgcagctgcaggaggccagaggcagcctgagcgtggaggacgagagacagatggacgacctggagggcgccgccccccccatcccccccagactgcacagcgaggacaagagaaagacccccctgaaggtgctggaggagtggaagacccacctgatccccagcctgcactgcgccggcggcgagcagaaggaggagagctacatcctgagcgccgagctgggcgagaagtgcgaggacatcggcaagaagctgctgtacctggaggaccagctgcacaccgccatccacagccacgacgaggacctgatccacagcctgagaagagagctgcagatggtgaaggagaccctgcaggccatgatcctgcagctgcagcccgccaaggaggccggcgagagagaggccgccgccagctgcatgaccgccggcgtgcacgaggcccaggcctag

SEQ ID NO: 63004 - DNA, 7151 bp, Artificial Sequence
  derived and/or modified sequence
ggaaggagcaggaggcagcccaggcggagcgggaggagctggcagcggggcgcatgccaggcgggggtcctcagggcgccccagccgccgccggcggcggcggcgtgagccaccgcgcaggcagccgggattgcttaccacctgcagcgtgctttcggaggcggcggctggcacggaggccgggctacatgagaagctcgacagggcctgggatcgggttcctttccccagcagtgggcacactgttccggttcccaggaggggtgtctggcgaggagtcccaccactcggagtccagggccagacagtgtggccttgactcgagaggcctcttggtccggagccctgtttccaagagtgcagcagcccctactgtgacctctgtgagaggaacctcggcgcactttgggattcagctcagaggtggcaccagattgcctgacaggcttagctggccgtgtggccctgggagtgctgggtggcagcaagagtttgcagccatggatagttctgagaccctggacgccagctgggaggcagcctgcagcgatggagcaaggcgtgtccgggcagcaggctctctgccatcagcagagttgagtagcaacagctgcagccctggctgtggccctgaggtccccccaacccctcctggctctcacagtgcctttacctcaagctttagctttattcggctctcgcttggctctgccggggaacgtggagaagcagaaggctgcccaccatccagagaggctgagtcccattgccagagcccccaggagatgggagccaaagctgccagcttggacgggcctcacgaggacccgcgatgtctctctcggcccttcagtctcttggctacacgggtctctgcagacttggcccaggccgcaaggaacagctccaggccagagcgtgacatgcattctttaccagacatggaccctggctcctccagttctctggatccctcactggctggctgtggtggtgatgggagcagcggctcaggggatgcccactcttgggacaccctgctcaggaaatgggagccagtgctgcgggactgcctgctgagaaaccggaggcagatggaggtaatatccttaagattaaaacttcagaaacttcaggaagatgcagttgagaatgatgattatgataaagtagagacggggtttcactatgttggtcaagctggtcttgaactcctgacctcaagcaatccacctgcttcggcctcccaaagtgctgggattacagctgagacgttacaacaaagattagaagacctggaacaagagaaaatcagcctgcactttcaacttccttcaaggcagccagctcttagcagtttcctgggtcacctggcagcacaagtccaggctgccttgcgccgtggggccactcagcaggccagcggagatgacacccacaccccactgagaatggagccgaggctgttggaacccactgctcaggacagcttgcacgtgtccatcacgagacgagactggcttcttcaggaaaagcagcagctacagaaagaaatcgaagctctccaagcaaggatgtttgtgctggaagccaaagatcaacagctgagaagggaaatagaggagcaagagcagcaactccagtggcagggctgcgacctgaccccactggtgggccagctgtccctgggtcagctgcaggaggtcagcaaggccttgcaggacaccctggcctcagccggtcagattcccttccatgcagagccaccggaaaccataaggagcctccaggaaagaataaaatccctcaacttgtcacttaaagaaatcactactaaggtgtgtatgagtgagaaattctgcagcaccctgaggaagaaagttaacgatattgaaacccaactaccagccttgcttgaagccaaaatgcatgccatatcaggaaaccatttctggacggctaaagacctcaccgaggagattagatcattaacatcagagagagaagggctggagggactcctcagcaagctgttggtgttgagttccaggaatgtcaaaaagctgggaagtgttaaagaagattacaacagactgagaagagaagtggagcaccaggagactgcctatgaaacaagtgtgaaggaaaatactatgaagtacatggaaacacttaagaataaactgtgcagctgcaagtgtccactgcttgggaaagtgtgggaagctgacttggaagcttgtcgattgcttatccagagcctacagctccaggaagccaggggaagcctgtctgtagaagatgagaggcagatggatgacttagagggagctgctcctcctattccccccaggctccactccgaggataaaaggaagacccctttgaaggtattggaagaatggaagactcacctcatcccctctctgcactgtgctggaggtgaacagaaagaggaatcttacatcctttctgcagaacttggagaaaagtgtgaagacataggcaagaagctattgtacttggaagatcaacttcacacagcaatccacagtcatgatgaagatctcattcattctctcaggagggagctccagatggtgaaggaaactctgcaggccatgatcctgcagctccagccagcaaaggaggcgggagaaagagaagctgcagcttcctgcatgacagctggtgtccacgaagcacaagcctgaggagtgacgggatgggggagggaggtgggccaccatgtttggacccggggggctgctcttccctcccccgccatagctaagatgcctgaatcaattacggagatacagagccttgaggtctttcagtggaaaggtggttcatgttcattctcatcagtgtgaaactgaggagtctgcaatttggaatatggagagagagactgatttgctgaatttccttctaaatgtcactcaaaaatttcttttccatgtcattcttgggaatgtcttccacaggatttgagaatagtttcatctcagcccccattagagagaagttggggtgaattctggaaaaatgtctctttttcctgtgccatttgccttctgctgcaacgaaaatatttcctgattcaagattctataaaaaggaaaccaagcataagactctgtcatcatacctgttacacgttcctacaggtgcacaatctaagagagctaattaacctcagagtctggagttaacagcttttcaccttacttctcctgtgatctaatattatcttagaaaaattaatatgcaatttccaaaagatattttggtaagacaacaacctcccagtgatatgccacctttcaattttccttttgtggcaatgattgcatctgaagaaaggatccctgagagtctctgtttcatcaggacattctgaaatttacccacagtgaggctgtggatggatcaggggacctgtataaaatgtttgagcctgttccattttcccgtggaacctgtttcactcaatgccaggcagtgcagcatttaggaaagcagtgcagtactcagtaaggcagtgcagtactcagtaacacaatacagtactcaggcagtgcagtactcagtaagacagtgcagtgctcagtaaggcagtgcaatactcagtaacagtgtagtactcagtaacagtgaagtactcagtaatacagtacagtattcagtaaggcagtgaagtactcagtaatacaatacagtactcagttaggcagtgcagtactcaggaatgcagcacagtactcaggcagtgcaatactcagtgcggtactcagtaacacagtgcagtactcagtaacagtgcagtactcagtaacagtgcagtactcagtaaggcagtgcagtactcagtaacacagtgcagtactcagtaatacagtacagtactcagtaaggcagtatggtactcagtaaagcaatgcaatgctcagtaacacagtgcagtgctcaataaggcagtgcagtgctcagtaaggcagtgaattgcttagtaacacagtgtagtgctcagtaggacagcatagtactcagtaacacagggcagctagtactcagtactataagtactgagtacttatataggcaatgtagtactcagtaaatcagtgcagtactcagtaatgcaagggcatttcaggctcctgctgggctgcttctttggcccagctgggactcctattgagacagctgcaaaacaggctgatttcaattaggcagcacttcccaaagtgcactgaggaaggtggccccaagagaagctctctaaacaaaggagtaccctctctggtcaagtacctttggtaaatacaccataccataatatctgcttggagaaccacaatgcacattagcatattagtctgagagagaacttatagtaaggaaactcacttgattttatctaacctcaaactttccaagtttaatggatcgtgaatttttttcatgtaactcctattcatatcccatagatctagtattgtacagcactgcattctctgaggaagtcccagtccaaactctgatttacatcactttagaaaccacactcacacttttgcagagtgttgagcttaataactacctgccacagattggtaaatttaatccagtggttgttctgtttgtgcttctgttctcatttatgtgtttagggatagtgaggttcctgccttcactaggatccacggatatgagaccatttttgtcatttcctgaagtcacactggcgtttccagaaggcatctggtgctttgctcagccttccatgctgtgcagcacttctgtcctcagtcaaggagatggccatgcttaagccagcaattggctggggtccaggaaacaaagcaaaagcacaatatgtgaatgtgctgattgtgttccctatggctttatctcgagcaaaatacactctacatattttaataataagtataattagcttgttcctggacttcattttcaatgatgaaccaaattcctgaattatttataattgtgtctaaagaaaattatgaactggtcacatggcacttggaatccttgagttaattccagtgaagcaaaacttgggaagagtcaggattggccacattgccaataacaaattcctacttcgacatatgtcttttcaaaaagcctcccagacacaagacatcttaaccgtcactagcccaagtgttttgtattactcagacaccatcatgaaataattctgtgaggtcatgatgtatttgaaaattctgcaagttaataactgccttgaattgtttgaacccgaaataagggttctttggtacctctagtagatagtgtgttcatttccctgctgcaaattttgaagtatttgggcaggtgagtcatgttttaaccacaagccataactcatctgttgtctttgcttggtcttagagtatcattcagaaagtccgctaagggccagcgtgcttcttctggctacacaaccttctcaggacaagcccactgtcttaagccactttgaccctgggagacacaggactgtgtatcctcaatcatactatacagcagtttttgtcaggggaacataaaaatatccaagagaggttagggcttagatttaaaagcatcaaaacaacaacaatggaaatttatgttggcgatagccaagaccacaagcaaaagcacatactggaaatgatgagttagaatctgatttgactgggatgttttatgagaatgtaagtgtgatattatactgtctgccttgctggaatgctggctttcaaatggtcacccatttttctttcactggcctgagttaggacatgctatcagtaatagtcccagttccatccaactttctgaaatttcatttttttttttgagatggagtctctctctgtcacccaagttggagtgcagtggccccgcaatctcggctcactgcaacctctacctcccaggttcaagctattctactgcctcagcctcccaagtagctggggttacaggcatttgccaccgggccctgatgatttttgtatttttagtagagacagggcttcaccatgttggctaggagggtctcaaactcctgacctcaggcgatccacccccacctcggcttcccaaagtgctgagattacaggtgtgagccaccgcacccggccaactttctgaaatttcaaaactgaattgatccttctccaaattagtatatactattggaaacttgtctttccctgcagtaaggctggtttccccaccccagaaacatgtaacggttggtaccatgctaagcccttgccatgctaagccctttacagtcatatcctataatccccatatcaaccttataaggaaggtgtttgtagatgatgcaactgagccttaagaggactaattccctttttctaaggcacagagctggtaaaatgtgaagtaatagtgaacctaacagtcagagacaggcagcatgctcttaactagtgctcttcctaaagttcctttaatgtccttttgagattttgagccatggaacttacttgttcacctggctaagaactcatggccactgtggaaatcttggttagggagtcaaagaaactgagcctggggcaaacgaggcttcccacactgccaggggagcctcactgtgaagtctaggctcagacaggcatcaacaaacctattcaccccaccatcatcctgatctaaccattccccagtcatcccaggaaaaccactcacagcctgacactgggctgactttcttgaagatcctcatccaattggtgtttttcagaagtgttccaatattatgaattctgtgttgtggagaaaagcaaccatgcatttactggtcaatgccttcttgtatatgtaattcaatacttttacttttaatatcctcaccttatctaatctttgaattttgtcatgtaatttattgcttcattaaggttactttttgttatacaaaataaaagctgatatccaaggcatggtgcatcttgatgattttttgtcctttgaagtatggatgatagaaaaatgtatcaggtttattcatctcatctttctgttacaggatgattaattgtacagttacatcacacgaaacatttataataaagtcatgcttt

SEQ ID NO: 63005 - protein, 206 aa, Artificial Sequence
  derived and/or modified sequence
  misc_feature (1)..(1): Xaa can be any naturally occurring amino acid
XNHFWTAKDLTEEIRSLTSEREGLEGLLSKLLVLSSRNVKKLGSVKEDYNRLRREVEHQETAYETSVKENTMKYMETLKNKLCSCKCPLLGKVWEADLEACRLLIQSLQLQEARGSLSVEDERQMDDLEGAAPPIPPRLHSEDKRKTPLKVLEEWKTHLIPSLHCAGGEQKEVCPFHMASRGDPYSKGCFGTMLQMGTINIGKASH

SEQ ID NO: 63006 - DNA, 621 bp, Artificial Sequence
  derived and/or modified sequence
tgaaatcacttctggaccgctaaggaccttactgaggagatcagaagcttgaccagcgaaagggaggggctcgagggcctgcttagtaaacttttagtactgtcttcaagaaatgtgaagaaattagggtccgttaaggaggactataaccggttgagaagggaagtggaacatcaggaaaccgcgtacgaaacttctgtgaaggaaaacacgatgaagtacatggaaaccttgaaaaataagctctgctcctgcaagtgccccctgttaggaaaggtgtgggaggcggatttggaggcttgtcgtctgctgatacagtctcttcaactgcaggaggcaagggggtcactatccgtcgaggacgaacgacagatggatgaccttgaaggagccgcaccccccatcccaccacggttgcatagtgaggacaagcgaaagactcctttgaaagtgctggaagagtggaagactcatctgattcccagcttacactgcgctggaggcgagcagaaggaagtgtgtccgttccacatggcctcacgcggcgacccctatagtaagggatgctttgggacaatgttacaaatgggaacgattaacattgggaaggcctctcactag

SEQ ID NO: 63007 - DNA, 621 bp, Artificial Sequence
  derived and/or modified sequence
tgaaaccacttctggacagccaaggacctgacagaggagatccgcagcctgaccagcgagcgggagggcctggagggcctgctgagcaagctgctggtgctgagcagcagaaatgtgaagaagctgggctctgtgaaggaggactacaaccggctgcggcgggaggtggagcaccaggagacagcctatgagacctctgtgaaggagaacaccatgaagtacatggagaccctgaagaacaagctgtgcagctgcaagtgccccctgctgggcaaggtgtgggaggccgacctggaggcctgccgcctgctgatccagagcctgcagctgcaggaggcccggggcagcctgtctgtggaggatgagcggcagatggatgacctggagggcgccgccccacccatccccccccggctgcacagcgaggacaagaggaagacccccctgaaggtgctggaggagtggaagacccacctgatccccagcctgcactgtgccggcggggagcagaaggaggtgtgccccttccacatggccagcagaggagacccctacagcaagggctgcttcggcaccatgctgcagatgggcaccatcaacatcggcaaggccagccactag

SEQ ID NO: 63008 - DNA, 621 bp, Artificial Sequence
  derived and/or modified sequence
tgaaaccacttctggaccgccaaggacctgaccgaggagatccggtcgctgacatcggagagggaaggcttagaagggctcctttcaaagctgctggtcttgtctagcaggaacgtcaagaagctcggcagcgtgaaggaagactataaccgcctccggcgtgaagttgagcaccaggaaacagcttatgagacatccgtcaaggagaacaccatgaagtacatggaaacactcaagaataaactgtgtagctgtaagtgccccctcctaggtaaggtgtgggaagccgaccttgaagcgtgccggttgctcattcagtcccttcagcttcaagaggcaagaggatctctgtcggtcgaagatgagcggcagatggacgaccttgaaggcgcagctccgcctattcctccccgactgcactcggaagacaagagaaaaacaccgctgaaagtgttggaggaatggaaaacacatttaataccaagtctgcactgtgccggtggagagcaaaaagaggtgtgcccattccatatggccagtcggggggacccttactccaagggttgtttcggcaccatgctgcagatgggtacaataaacattggtaaggcatcccactag

SEQ ID NO: 63009 - DNA, 621 bp, Artificial Sequence
  derived and/or modified sequence
tgaaaccatttttggactgccaaggatttgacggaggagatccgttccctaacttccgagagggagggtcttgagggactactctccaagctgctggtcctgagcagcaggaacgtgaagaaactgggctctgttaaggaggattataatcgactgcgccgagaggtggagcatcaggaaacagcctacgaaaccagtgtcaaggaaaatactatgaagtatatggagaccctaaagaataagctttgctcatgtaaatgtccattattgggcaaggtctgggaggcagatcttgaggcatgtaggctcctcatccagtcactgcagctccaggaggcacggggatctctgagtgtcgaagatgagagacagatggatgacctggaaggcgctgctccaccgatcccccctaggcttcactctgaagacaagaggaagacccccctgaaggtgttggaggagtggaagacgcatctgattccttcgctccactgtgccggaggcgagcagaaggaagtgtgcccattccatatggcctcacgtggcgacccctacagcaaagggtgctttggcaccatgctccagatgggaacaattaacatcgggaaagcaagccattag

SEQ ID NO: 63010 - DNA, 621 bp, Artificial Sequence
  derived and/or modified sequence
tgaaaccacttctggaccgccaaggacctgaccgaggagatcagaagcctgaccagcgagagagagggcctggagggcctgctgagcaagctgctggtgctgagcagcagaaacgtgaagaagctgggcagcgtgaaggaggactacaacagactgagaagagaggtggagcaccaggagaccgcctacgagaccagcgtgaaggagaacaccatgaagtacatggagaccctgaagaacaagctgtgcagctgcaagtgccccctgctgggcaaggtgtgggaggccgacctggaggcctgcagactgctgatccagagcctgcagctgcaggaggccagaggcagcctgagcgtggaggacgagagacagatggacgacctggagggcgccgccccccccatcccccccagactgcacagcgaggacaagagaaagacccccctgaaggtgctggaggagtggaagacccacctgatccccagcctgcactgcgccggcggcgagcagaaggaggtgtgccccttccacatggccagcagaggcgacccctacagcaagggctgcttcggcaccatgctgcagatgggcaccatcaacatcggcaaggccagccactag

SEQ ID NO: 63011 - DNA, 1118 bp, Artificial Sequence
  derived and/or modified sequence
gaaaccatttctggacggctaaagacctcaccgaggagattagatcattaacatcagagagagaagggctggagggactcctcagcaagctgttggtgttgagttccaggaatgtcaaaaagctgggaagtgttaaagaagattacaacagactgagaagagaagtggagcaccaggagactgcctatgaaacaagtgtgaaggaaaatactatgaagtacatggaaacacttaagaataaactgtgcagctgcaagtgtccactgcttgggaaagtgtgggaagctgacttggaagcttgtcgattgcttatccagagcctacagctccaggaagccaggggaagcctgtctgtagaagatgagaggcagatggatgacttagagggagctgctcctcctattccccccaggctccactccgaggataaaaggaagacccctttgaaggtattggaagaatggaagactcacctcatcccctctctgcactgtgctggaggtgaacagaaagaggtctgtccttttcacatggcctccagaggggacccttattctaaggggtgctttgggaccatgctccaaatgggaacaataaatattgggaaggcttcccattgagcatataaacttttaaaagtttcaataactcttgaatatgattacaaaataaagtagaatttttgtagaagtttgaaatatagaagagcaaaaaaacccaacttttggcatatttagttccattttcattctaatttagtggctagaattagaatatgcagtctaatatagaattaccatatatagcatacattatatatgtcatatataatatagttattatattcactatagattatatatgccatacatgatatttaacatatatactatacattatgtattgtatgtcatatatgatgtttatatatttagaatctatatattacaatatattattatttatttgaatgaaacattcaaatatatgtatttatcccattaattgtttttaccaaaaccagatcataatgaatgtttataatgttcttctttcataaacacaactaaagtttggcctgagatatatgtattacaaattaaaatatggttttattt

SEQ ID NO: 63012 - protein, 755 aa, Artificial Sequence
  derived and/or modified sequence
MPGGGPQGAPAAAGGGGVSHRAGSRDCLPPAACFRRRRLARRPGYMRSSTGPGIGFLSPAVGTLFRFPGGVSGEESHHSESRARQCGLDSRGLLVRSPVSKSAAAPTVTSVRGTSAHFGIQLRGGTRLPDRLSWPCGPGSAGWQQEFAAMDSSETLDASWEAACSDGARRVRAAGSLPSAELSSNSCSPGCGPEVPPTPPGSHSAFTSSFSFIRLSLGSAGERGEAEGCPPSREAESHCQSPQEMGAKAASLDGPHEDPRCLSRPFSLLATRVSADLAQAARNSSRPERDMHSLPDMDPGSSSSLDPSLAGCGGDGSSGSGDAHSWDTLLRKWEPVLRDCLLRNRRQMEVISLRLKLQKLQEDAVENDDYDKAETLQQRLEDLEQEKISLHFQLPSRQPALSSFLGHLAAQVQAALRRGATQQASGDDTHTPLRMEPRLLEPTAQDSLHVSITRRDWLLQEKQQLQKEIEALQARMFVLEAKDQQLRREIEEQEQQLQWQGCDLTPLVGQLSLGQLQEVSKALQDTLASAGQIPFHAEPPETIRSLQERIKSLNLSLKEITTKVCMSEKFCSTLRKKVNDIETQLPALLEAKMHAISGNHFWTAKDLTEEIRSLTSEREGLEGLLSKLLVLSSRNVKKLGSVKEDYNRLRREVEHQETAYDGVSLCRPVWSAVVRSCSLQPLPPEFKQFSCLSLRSSWDYRCPPPCLANFVFLVEMGFYHVDQTGLKLLTSSDPPSSASQSAGITDMSHCAWPLQ

SEQ ID NO: 63013 - DNA, 761 bp, Artificial Sequence
  derived and/or modified sequence
gattgcggagctgaagttcaggcagcgggagcgaggaggatggactcaccctgtcacccaggttggactgcactggcctcaacctcctgagttcaagtgatcgtcccacctcagcctccccagtagctgggaccatagctgtgcagcatcatgcctggctaattttttaagttttttgttgagatggtggtctcgccctgttgctcaggctggcctcaaactcctgggctgaagcagtcctcccacctcagcctcccaaagtgcttggattagaggcgtgagccaccattcctggctccttggacaatattttattcctcagattaagacacgtccttgggatggggctgcattggataattcaccgaaggcaccgctgaatggagtgggccctcagtaaatacctggaggaatgtgacctggccagtgaggttattttcttttgtaggtgaaaggtgtagcagtcactcggcctacacccacagcatcgaccttgtgaacccagcgacctgactgccttgggagaattgaagcgaatgagagtggggagtgtgagaggtgcgtttggtgcagcatttctggcatgggaacagaactggccaggaggaagtgacgtctgggttctgcccgcacacattcctcgccaccttcttggtgtctgagaacctccagcttcacctccttttctggacccgagggcctggcggagcttccagctgggaccagacctccatggatccactccagaaacggaatccagc

SEQ ID NO: 63014 - DNA, 2929 bp, Artificial Sequence
  derived and/or modified sequence
tcttcccggaaaggcagacagcagccatacctattgggtagggctggccagctagctctgggagcagggcgggcactcagcgggtatcattgctgttaccgcagctcccccatttccagattacgaaactaaggtccggagactcgcctggggccctggggaggtgacaggagacggggtgctccatgtgcagtgggctgcctggggctgctgcctcaggatgggcattgggcgtcctgccccaatgagcgcctgtttgcctgagggctggccatgggctccctggagggctggcgagaagcctggcattgggctttcactgcccagccagccctgttctgccctatgagggcggctggcgcatgggctttgtgatcccaagacagggctcaggtccagtgacgtgccaggcacccagagatccaccagtgcagctgggacttgaccttagggctccatctgcaccgagtgggagggcctgggcagtgacagggcaaggcgggcccccatgctcatggtccacagtgcctcactcgcatgtcctctcctccccacagtggacagacggtccaccccccgtgcagttccaagctcagaatggacccaacaccagcctggccagcctcctgtgaggccttgatggggccatccagctccgcagggcctgcgcgtctccggcttccacccagacggcactcaagcctgcccccgaggcgtgcttccttcctgattgtctctagagcttccaagtcctgggaatgtgcggggccagtccctgccctcccaggaggggtggtagccgttcccacctcgcagcaggacccccagtgcagaggctcacaggtggcacacaggcgctgtctctccagagccatccttcagagtggacctcagtgccagtcctgcctcagcatctgggtcacgtcggccaggagtagggtgcaggcctccagcaggtcctaatcctgtgtgccagggcaggcagtgccccaggggcaccacgcctgactctccatcacccaggccttgatgccgagcgggagtagagtgtttcctctgctcaaggcaatttccagagcccggatgccagtttctggcctgaatttggagggaagaagtaatggcgctagtgtgggacgaagcacagatcccagcacttttcccagctttctctccagcatcagtccctgcagcagctggggcctctggtcaggaaccctcagggacccaggaactcagcttccaaacatctgcaccttgaccggactcgccatcccgccgtgggggtgcaggtgattgtaaacacgggtgtgcatgtggatgcacacgggtgtgcggtgaagatctgtggagatggagctgggagctgaggctcctgttgcaccagccaccttcccccatcttgtggctgctgaggggcaggaagcgggggagtgggctcgtctcctaaatttaagatcacctcctcagctagcttagagtgcgtggcacgggccccccgcccccgagatctggagcccagggactttcttcctggcagatctgtggccttccctgctcagcctcttggtccccccactccctccaccgcctcaccttccctgctgggtctctggggcacagtgtgaaacccgcaccctagccaggccccagggagcctccgctgggcccagacagcagcgtttggttttatccacttttcttggataatcaggaggtgccccagtggtcacagtgtggcattccgagttggggcgggtggtcgggtcaagatagcagcagcaggtgtcagggctcaagacaccaccccctccagcttctggggcccaggagcctctccctgctacagggggtgggggtcctgctcagcagggtaggtggtggttttaggtcttgtcaccctcactcagtggaactgcctctgggagctttggcgtctgtgactaaagggacgctggattgctcaggtcagctgcttggggctcccaggctgggtgtgccttagccacaggcagggctgtcaataacccccttcctcactggccaccacctgacatcagcaccagtgacaggctggtcagagggcggggctggtgagggtttgtcctaagaggaccaccgccatctctgggtctccagggggagagcctggccctgtcctttgctacccagggctgcccccaggcccatgaagccaataggagagcgtgtggcactggcccacaaactgtccctgtcctgtcttcctcccgagccatggcctctgctagctccaccttgaaggagccccccacatcctcccctacatcccagagatgccaccacttgtgtctccacaatgtgctcctgcccacccgggttccgcactgtccgacccctgcacaccactcatgtcaccacggcgtgcatcatgttcatccccatctatttatttaagcctttctttgcttgtagggcattttgtatgtagagcagttgaaaacagaacctcagaacttaacatctgtcctgatgttaaagtgcttttcatgaccaccctgttatctatgtatatgtaaagttaaggatgagatcttaagtttacaattaaaaactcagtactcaatatttaatattctactcgagctttatggaagccaaatcatgtgcatgtgtgtgtgtgcgtgtgtgcaagctttgaacctccttccacagccgcatcttctcatgacacaaagcttttgataagtactttcctgtgggtcgctcagcgcctcatagcatctcattcaattgcaagaatagaggccagacacggtggcgcatgcctgtagtcccagctaactgggaggctgaggcaggaggatcacttgagcccaggagattgaggctgcagtgagcatgatcgcgacactgcactccagcctgggtgacggtgagactttgtctc

SEQ ID NO: 63015 - DNA, 574 bp, Artificial Sequence
  derived and/or modified sequence
tttattaagtgtccatctcaagttgcattatactgagttcgcttcctcaagatgaccatctgaaacaaaacacgtgtgctttctctagtggctgagaactgtgtcttcctggagactaggctggcattttgactttgggacggagtctcgctttgtcgcccaggctggagtgcagtggcacgatctcagctcactgcaagctctacctcttggttcacgccattctcctgccccagcctcccaagtagctgggactacaggtgcccgccaccacacccggataattttttttttgtatttttagtagagatggggtttcaccgtgttagccaggatggtctcaatctcctgacctcgtgtttcacccgcctcagcctcccaaagtgctgggattacaggcgtgagccaccgcacctggccagattttttttgtttttgtttttttctgtcctggtcctgtagaatcagaggaagtggaaaacacatatcaggttgctgaaaagccaggagtcaaaatgactgagcgctttgactgccaccattgcaacgaatctctctttggcaagaagtacat

SEQ ID NO: 63016 - DNA, 2268 bp, Artificial Sequence
  derived and/or modified sequence
atgccaggaggaggcccccagggcgctcccgccgctgccggaggtggaggcgtgagccacagagccgggtccagagactgtctcccgcctgccgcatgctttcgacggcgaagactggcacgacgcccggggtacatgcgatcgtcaaccggaccaggcatcgggtttttgtctcctgctgttggcactctgtttcggttccctgggggagtcagtggggaggaaagccaccactctgaatcaagggcaaggcagtgcggtctcgactctcgtgggctcctggttagatctccggtgtctaagagcgctgcagccccaacagtcaccagcgttcgcggcacctcggcacactttggaatacaactgagaggaggaacccgtttaccagatcgcctgagttggccctgtggtccaggtagcgcagggtggcaacaggagttcgccgcgatggactcatctgaaactttagatgcaagttgggaggccgcttgtagcgatggggcgcgaagggtgcgagccgctgggagcctgccttctgctgagctctcgagtaattcttgctcccccggctgcggacctgaggttccaccgacacctcccgggtcccacagcgcattcactagcagcttttccttcattagactcagcctgggcagtgcgggggaacgcggagaagctgagggatgtccccctagccgagaggcagagagtcactgccagtctccccaggaaatgggagccaaggccgccagcctggacggcccacatgaagaccctcgttgtttaagtcgtcccttttcattgttggcaacccgcgtcagcgctgatctggctcaagctgcacggaattcatctagaccagagcgcgatatgcatagcctacccgacatggatcctggatcttcctcttctctggatccctcactagccggctgcgggggagatggctcatctgggtccggggatgctcattcctgggatacccttctacgaaaatgggagcccgtgcttagagactgtttactgcgcaatcgacgccagatggaagttatttctctccgcctaaagcttcagaagctgcaggaggacgcagtcgagaacgatgattacgacaaggcagagacactccaacagaggttggaagacttagaacaagagaagatttccctacactttcagctgccttccagacaaccagccctgagttcctttttgggacacctcgccgcccaggtacaagcggccctgagaaggggggctacgcagcaggcctcgggtgacgatacccacacacctcttcggatggaacccagactgctggaaccaacggctcaggactctctacacgtgagtatcaccaggagagattggctcctccaggaaaaacagcagctgcagaaagaaatcgaagctctccaggcccgcatgttcgtgctggaagccaaggatcaacagttaagaagggagatcgaggagcaggaacagcagctgcaatggcaaggctgtgacctcaccccattggtgggccaactctcattgggacaactccaagaggtaagcaaggccctgcaagacacattggccagcgccgggcaaattcccttccacgccgagcctccggaaaccatcagaagtttgcaagagcgcataaaatccttgaatctcagtctaaaggaaattacaactaaagtatgcatgtcggaaaagttctgttcaactttaagaaaaaaagtcaatgatattgagacccagctccctgctctgctcgaggcaaaaatgcatgctattagcggaaatcatttttggaccgccaaggacttgacggaagagattagatccctcacatcagagcgagagggtctggaggggctactgagcaagctgttagtgttgagttctcgtaacgtgaaaaagctagggtccgtgaaagaggattacaacagactgagacgcgaggtggagcatcaggagaccgcctacgacggagtgagcctgtgcagacctgtatggtctgccgttgttcgctcttgctccctgcagccattgcctcccgaattcaaacaatttagctgtctgtccctacgcagctcatgggattatcggtgccctcccccatgtttagcaaatttcgtcttcctcgttgagatgggcttctaccatgtggaccagaccgggcttaagctgctcaccagcagcgaccctccttcctccgctagccaatccgccggaattacggatatgtcccattgtgcctggccactgcaatag

SEQ ID NO: 63017 - DNA, 2268 bp, Artificial Sequence
  derived and/or modified sequence
atgcctgggggcggcccccagggcgccccagctgctgctgggggcggcggcgtgagccaccgggccggcagccgggactgcctgcccccagctgcctgcttcagaagaagaaggctggcccggcggcccggctacatgaggagcagcacaggccctggcatcggcttcctgagccctgctgtgggcaccctcttccgcttccctgggggcgtgtctggagaggagagccaccacagcgagagccgggcccggcagtgtggcctggacagccggggcctgctggtgcgcagccctgtgtccaagtctgctgctgcccccaccgtgacctctgtgcggggcaccagcgcccacttcggcatccagctgcggggcggcacccggctgcctgaccggctgtcctggccctgtggccctggcagcgctggctggcagcaggagtttgctgccatggacagcagcgagaccctggatgcctcctgggaggccgcctgcagtgatggagccaggagagtgcgggccgccggcagcctgcccagcgctgagctgagcagcaacagctgcagccctggctgcggccctgaggtgccccccaccccacctggcagccacagcgccttcaccagcagcttctccttcatccggctgagcctgggcagcgctggggagcggggggaggccgagggctgcccccccagccgggaggccgagagccactgccagagcccccaggagatgggcgccaaggccgccagcctggatggcccccatgaggacccccgctgcctgagccggcccttcagcctgctggccaccagggtgtctgctgacctggcccaggccgccaggaacagcagcaggcctgagcgggacatgcacagcctgcctgacatggaccccggcagcagcagcagcctggaccccagcctggccggctgtggaggagatggcagcagcggcagcggagatgcccacagctgggacaccctgctgaggaagtgggagcctgtgctgcgggactgcctgctgaggaacagacggcagatggaggtgatcagcctgcggctgaagctgcagaagctgcaggaggatgctgtggagaatgatgattatgacaaggccgagaccctgcagcagaggctggaggacctggagcaggagaagatcagcctgcacttccagctgcccagccggcagcctgccctgagcagcttcctgggccacctggccgcccaggtgcaggccgccctgcggcggggggccacccagcaggccagcggagatgacacccacacccccctgaggatggagccccggctgctggagcccacagcccaggacagcctgcacgtgtccatcacccggcgggactggctgctgcaggagaagcagcagctgcagaaggagattgaggccctgcaggccaggatgtttgtgctggaggccaaggaccagcagctgcggcgggagattgaggagcaggagcagcagctgcagtggcagggctgtgacctgacccccctggtgggccagctgagcctgggccagctgcaggaggtgtccaaggccctgcaggacaccctggccagcgctggccagatccccttccacgccgagcccccagagaccatccgcagcctgcaggagcgcatcaagagcctgaacctgagcctgaaggagatcaccaccaaggtgtgcatgtctgagaagttctgcagcaccctgaggaagaaggtgaatgacatcgagacccagctgcctgccctgctggaggccaagatgcacgccatcagcggcaaccacttctggacagccaaggacctgacagaggagatccgcagcctgaccagcgagcgggagggcctggagggcctgctgagcaagctgctggtgctgagcagcagaaatgtgaagaagctgggctctgtgaaggaggactacaaccggctgcggcgggaggtggagcaccaggagacagcctatgatggagtgtccctgtgcaggcctgtgtggagcgctgtggtgcgcagctgcagcctgcagcccctgcccccagagttcaagcagttcagctgcctgagcctgcggagctcctgggactaccgctgccccccaccctgcctggccaactttgtgttcctggtggagatgggcttctaccacgtggaccagacaggcctgaagctgctgaccagcagtgacccccccagcagcgccagccagagcgctggcatcacagacatgagccactgtgcctggcccctgcagtag

SEQ ID NO: 63018 - DNA, 2268 bp, Artificial Sequence
  derived and/or modified sequence
atgcccggcggcggcccccagggcgcccccgccgccgccggcggcgggggagtgtctcatcgcgccgggtcccgggattgtcttccaccggcagcctgtttcagaaggagacgtttagctcggagacccggctacatgcgctcaagcaccgggccaggaattggatttttatcaccggctgtggggacacttttccgctttcctggaggcgtgagtggagaggagtcccatcactccgagtctagagcaaggcagtgtggcttggattctaggggactcctggtgcgctctccggtaagcaaatccgccgcagcacctaccgtgactagcgttaggggaacttctgctcatttcgggatccaactccgtggggggacacggttgccagaccgcctgtcatggccttgcggtcccgggtctgctgggtggcagcaggaatttgcggctatggactcctcagagacactagatgccagttgggaggccgcatgttccgacggcgcaaggcgcgtgagggcggccggatccctcccaagtgcggagttgtcgagcaattcgtgctctccaggatgcgggcctgaggtacctcctaccccccctgggtcccattcagcttttaccagcagtttttctttcatccgactatctctgggtagcgctggggagcgcggagaagcagagggttgcccccctagtagagaggctgagtctcactgccagtccccacaggagatgggggccaaagctgcttcccttgatggaccccatgaggacccaaggtgtctatctcggccctttagtttgctggccacccgagtcagcgctgatctagcccaggcggcacgtaactcatcacgtccagagcgggatatgcactccttgcctgatatggatcccggatcgtcatcctccttagacccatccctggcgggttgcggcggagacggtagtagtggctccggagatgcacattcttgggataccctattacgaaaatgggaaccagtgctgcgggattgtctcctcaggaatcggcgtcagatggaggttataagcttgaggctcaagttgcagaagctgcaggaggacgccgtggagaatgacgactatgataaggccgaaaccttgcaacagagactggaggaccttgagcaggaaaaaataagtctgcacttccagctgcctagcaggcagcctgcgctttcatcctttttgggacatctggctgctcaagtgcaggccgccttgcggcggggcgccactcagcaggccagtggcgatgacactcatacccccctacgaatggaaccacggcttcttgagcctacagctcaggactctctacacgtctcaattacgcggcgtgattggttactccaggaaaaacagcagctccaaaaagaaatcgaagccctgcaggctcggatgttcgtcttggaggctaaggaccagcagcttcgccgagagattgaggaacaggagcaacaactgcagtggcaagggtgtgatctgaccccccttgtcggccagctgtcacttggacagcttcaggaggtcagtaaggccttgcaggatacgctcgccagcgcaggtcagattccctttcacgctgagccccccgagactatacgtagcttgcaggagcgcatcaagagcctcaacctcagcctgaaggagatcacaactaaagtgtgcatgagtgaaaagttttgtagcacactaaggaagaaggttaatgacatcgaaacgcagctgcctgcattgctggaagcaaaaatgcatgccattagcggcaaccacttctggacagctaaagacctgactgaggagatcagatctttaacctcagagcgggagggtctggaaggattattatcaaagttgctcgtgctgtctagtcgcaatgtaaagaagctaggaagcgtaaaggaagactataacagattgagacgagaagtcgaacaccaggaaacagcctatgacggggtctcgctgtgccgacctgtttggtccgccgtcgtaaggagctgcagtttgcaacctttgccgccagagttcaaacaattcagctgtctttcgttgagatctagctgggattaccgatgtccccctccctgtttggctaactttgtgttcttagtcgaaatgggattttaccatgtcgaccaaacaggcctgaaactacttacgagctcagacccgccaagttctgccagtcagagcgcaggaattacggatatgagccattgcgcctggccactgcagtag

SEQ ID NO: 63019 - DNA, 2268 bp, Artificial Sequence
  derived and/or modified sequence
atgccaggcggaggccctcagggagctcccgcagcagccggaggcggaggagtaagtcaccgtgcagggtccagggattgtttgccaccagcggcatgcttccggaggaggcgcctggcgaggagaccaggctacatgcgatcaagcaccggtcccggaatcggtttcctgtcaccagccgtcggaaccttattcagattcccgggtggcgttagcggagaagagtcccaccactctgaatccagggctagacaatgcggactggactcccgtgggctgctggtccgctccccagtttcaaagagcgcagctgcccctacagtgacgagcgtacggggtacgtcagctcactttggtatccagttgcgaggcggtacaaggttacccgatcgcctcagttggccatgtggccctggatccgccggttggcagcaggagtttgccgcaatggactcctccgaaacactagatgctagctgggaggcggcttgctctgatggagcccgacgcgtgcgcgctgctggctctttaccatctgctgagcttagcagtaacagctgctcccctggatgtggcccagaggtcccacctacaccacccggatcccactcagcctttaccagctcattctccttcatcagactgtctctgggctctgctggggagcgaggcgaagcagaggggtgccccccaagcagagaggccgagagccactgtcaatcaccacaagagatgggagccaaggcagcgtccctagacgggccacatgaagatcccagatgcctgtcaaggcctttcagtctgctggctacgcgggtttccgcagatctggctcaggccgcacgaaactcttcacggccagagcgtgacatgcattcactgcccgatatggaccccggaagcagctccagtttagacccaagcctcgcaggctgcggcggagatgggagctccggatccggagatgcccacagctgggacaccctgttgcggaagtgggagcccgtgctccgggactgcctgttgaggaacagaaggcagatggaggtaatttctctacggctcaagctgcaaaagttacaggaggatgccgtggagaatgatgattatgataaggccgaaacgcttcagcagcgcctggaagacctggagcaggaaaaaataagcctccacttccagctgccgtcacggcagccggctctgtcaagttttctgggccatctggccgctcaggtgcaggctgccctgaggaggggcgcaacccagcaggcctctggagacgatactcacacaccgttaagaatggaaccgaggttgcttgaacccacagctcaggattctcttcacgtgtctatcacaaggcgcgattggttgctgcaggagaagcagcaattgcagaaagagatcgaggctcttcaggctcgcatgttcgtcctggaggcaaaggatcagcagttgcggagggagatcgaggagcaggagcagcagttgcagtggcagggatgcgatctcacaccactcgtgggacagttatctctgggtcaactgcaggaggtgagtaaggcacttcaggataccctcgccagtgcagggcagattccatttcacgccgagcctccagagactatcagatctttacaggaaagaattaaaagtcttaacctctcgctgaaggaaattacaaccaaagtgtgcatgagcgaaaagttttgctctactctgagaaagaaggtgaacgatatagagacacagctccctgccctcctggaggctaagatgcacgccatcagcgggaaccacttttggaccgccaaagacctgacggaggaaattcgttccctcaccagcgagagagaaggcctagaaggactgctgagtaagttgcttgtgctatcaagcaggaatgttaagaaattgggctcggtaaaggaggattataaccggctccggcgtgaagtggaacaccaggagacagcttatgatggagttagtctctgccgccctgtctggtctgcagtagtgagatcctgctctctgcagccactgccacctgagtttaagcaattctcctgtctctcactgcgttcctcctgggactatcgttgtcccccaccgtgccttgccaattttgtgtttttggttgagatgggattttatcacgtagatcagaccgggctgaagctcctgacatcatccgatccacccagctccgcaagtcagagcgctggaataaccgacatgagtcattgcgcttggcctctgcaatag

SEQ ID NO: 63020 - DNA, 2268 bp, Artificial Sequence
  derived and/or modified sequence
atgcccggcggcggcccccagggcgcccccgccgccgccggcggcggcggcgtgagccacagagccggcagcagagactgcctgccccccgccgcctgcttcagaagaagaagactggccagaagacccggctacatgagaagcagcaccggccccggcatcggcttcctgagccccgccgtgggcaccctgttcagattccccggcggcgtgagcggcgaggagagccaccacagcgagagcagagccagacagtgcggcctggacagcagaggcctgctggtgagaagccccgtgagcaagagcgccgccgcccccaccgtgaccagcgtgagaggcaccagcgcccacttcggcatccagctgagaggcggcaccagactgcccgacagactgagctggccctgcggccccggcagcgccggctggcagcaggagttcgccgccatggacagcagcgagaccctggacgccagctgggaggccgcctgcagcgacggcgccagaagagtgagagccgccggcagcctgcccagcgccgagctgagcagcaacagctgcagccccggctgcggccccgaggtgccccccaccccccccggcagccacagcgccttcaccagcagcttcagcttcatcagactgagcctgggcagcgccggcgagagaggcgaggccgagggctgcccccccagcagagaggccgagagccactgccagagcccccaggagatgggcgccaaggccgccagcctggacggcccccacgaggaccccagatgcctgagcagacccttcagcctgctggccaccagagtgagcgccgacctggcccaggccgccagaaacagcagcagacccgagagagacatgcacagcctgcccgacatggaccccggcagcagcagcagcctggaccccagcctggccggctgcggcggcgacggcagcagcggcagcggcgacgcccacagctgggacaccctgctgagaaagtgggagcccgtgctgagagactgcctgctgagaaacagaagacagatggaggtgatcagcctgagactgaagctgcagaagctgcaggaggacgccgtggagaacgacgactacgacaaggccgagaccctgcagcagagactggaggacctggagcaggagaagatcagcctgcacttccagctgcccagcagacagcccgccctgagcagcttcctgggccacctggccgcccaggtgcaggccgccctgagaagaggcgccacccagcaggccagcggcgacgacacccacacccccctgagaatggagcccagactgctggagcccaccgcccaggacagcctgcacgtgagcatcaccagaagagactggctgctgcaggagaagcagcagctgcagaaggagatcgaggccctgcaggccagaatgttcgtgctggaggccaaggaccagcagctgagaagagagatcgaggagcaggagcagcagctgcagtggcagggctgcgacctgacccccctggtgggccagctgagcctgggccagctgcaggaggtgagcaaggccctgcaggacaccctggccagcgccggccagatccccttccacgccgagccccccgagaccatcagaagcctgcaggagagaatcaagagcctgaacctgagcctgaaggagatcaccaccaaggtgtgcatgagcgagaagttctgcagcaccctgagaaagaaggtgaacgacatcgagacccagctgcccgccctgctggaggccaagatgcacgccatcagcggcaaccacttctggaccgccaaggacctgaccgaggagatcagaagcctgaccagcgagagagagggcctggagggcctgctgagcaagctgctggtgctgagcagcagaaacgtgaagaagctgggcagcgtgaaggaggactacaacagactgagaagagaggtggagcaccaggagaccgcctacgacggcgtgagcctgtgcagacccgtgtggagcgccgtggtgagaagctgcagcctgcagcccctgccccccgagttcaagcagttcagctgcctgagcctgagaagcagctgggactacagatgcccccccccctgcctggccaacttcgtgttcctggtggagatgggcttctaccacgtggaccagaccggcctgaagctgctgaccagcagcgacccccccagcagcgccagccagagcgccggcatcaccgacatgagccactgcgcctggcccctgcagtag

SEQ ID NO: 63021 - DNA, 2676 bp, Artificial Sequence
  derived and/or modified sequence
ggaaggagcaggaggcagcccaggcggagcgggaggagctggcagcggggcgcatgccaggcgggggtcctcagggcgccccagccgccgccggcggcggcggcgtgagccaccgcgcaggcagccgggattgcttaccacctgcagcgtgctttcggaggcggcggctggcacggaggccgggctacatgagaagctcgacagggcctgggatcgggttcctttccccagcagtgggcacactgttccggttcccaggaggggtgtctggcgaggagtcccaccactcggagtccagggccagacagtgtggccttgactcgagaggcctcttggtccggagccctgtttccaagagtgcagcagcccctactgtgacctctgtgagaggaacctcggcgcactttgggattcagctcagaggtggcaccagattgcctgacaggcttagctggccgtgtggccctgggagtgctgggtggcagcaagagtttgcagccatggatagttctgagaccctggacgccagctgggaggcagcctgcagcgatggagcaaggcgtgtccgggcagcaggctctctgccatcagcagagttgagtagcaacagctgcagccctggctgtggccctgaggtccccccaacccctcctggctctcacagtgcctttacctcaagctttagctttattcggctctcgcttggctctgccggggaacgtggagaagcagaaggctgcccaccatccagagaggctgagtcccattgccagagcccccaggagatgggagccaaagctgccagcttggacgggcctcacgaggacccgcgatgtctctctcggcccttcagtctcttggctacacgggtctctgcagacttggcccaggccgcaaggaacagctccaggccagagcgtgacatgcattctttaccagacatggaccctggctcctccagttctctggatccctcactggctggctgtggtggtgatgggagcagcggctcaggggatgcccactcttgggacaccctgctcaggaaatgggagccagtgctgcgggactgcctgctgagaaaccggaggcagatggaggtaatatccttaagattaaaacttcagaaacttcaggaagatgcagttgagaatgatgattatgataaagctgagacgttacaacaaagattagaagacctggaacaagagaaaatcagcctgcactttcaacttccttcaaggcagccagctcttagcagtttcctgggtcacctggcagcacaagtccaggctgccttgcgccgtggggccactcagcaggccagcggagatgacacccacaccccactgagaatggagccgaggctgttggaacccactgctcaggacagcttgcacgtgtccatcacgagacgagactggcttcttcaggaaaagcagcagctacagaaagaaatcgaagctctccaagcaaggatgtttgtgctggaagccaaagatcaacagctgagaagggaaatagaggagcaagagcagcaactccagtggcagggctgcgacctgaccccactggtgggccagctgtccctgggtcagctgcaggaggtcagcaaggccttgcaggacaccctggcctcagccggtcagattcccttccatgcagagccaccggaaaccataaggagcctccaggaaagaataaaatccctcaacttgtcacttaaagaaatcactactaaggtgtgtatgagtgagaaattctgcagcaccctgaggaagaaagttaacgatattgaaacccaactaccagccttgcttgaagccaaaatgcatgccatatcaggaaaccatttctggacggctaaagacctcaccgaggagattagatcattaacatcagagagagaagggctggagggactcctcagcaagctgttggtgttgagttccaggaatgtcaaaaagctgggaagtgttaaagaagattacaacagactgagaagagaagtggagcaccaggagactgcctatgatggagtctcactctgtcgcccagtctggagtgcagtggtacgatcttgctcactgcaacctctgcctcccgagttcaagcaattctcctgcctcagcctccggagtagctgggattacaggtgcccgccaccatgcctggctaattttgtattcttagtagagatggggttttaccatgttgaccagactggtctaaaactcctgacctcaagtgatccaccttcctcagcctcccaaagtgctgggattacagacatgagccactgtgcctggcccctacaataattctttaatgtgaggaaatatcaaatgaaaaataagaaattctaggtaaggaaagaaatttatttagtggaagtataaaagaagtttaaaaagttgaagaaaattttggttttcaatgttgatgcagcgtcctttgtgaatctttaaatttgtgaatgacacttttgaaaacttacaccttattctaagtgtctttgttcactttacactgtactgtaaagaatcacaagagtgtctcataaataactttctatataacatatgtatatttcaaaataacatgttatatatataatacatacaatttttgtcaattaaacagtacattaaaaagacaaaaataactttccataaa

SEQ ID NO: 63022 - protein, 732 aa, Artificial Sequence
  derived and/or modified sequence
MPGGGPQGAPAAAGGGGVSHRAGSRDCLPPAACFRRRRLARRPGYMRSSTGPGIGFLSPAVGTLFRFPGGVSGEESHHSESRARQCGLDSRGLLVRSPVSKSAAAPTVTSVRGTSAHFGIQLRGGTRLPDRLSWPCGPGSAGWQQEFAAMDSSETLDASWEAACSDGARRVRAAGSLPSAELSSNSCSPGCGPEVPPTPPGSHSAFTSSFSFIRLSLGSAGERGEAEGCPPSREAESHCQSPQEMGAKAASLDGPHEDPRCLSRPFSLLATRVSADLAQAARNSSRPERDMHSLPDMDPGSSSSLDPSLAGCGGDGSSGSGDAHSWDTLLRKWEPVLRDCLLRNRRQMEVISLRLKLQKLQEDAVENDDYDKAETLQQRLEDLEQEKISLHFQLPSRQPALSSFLGHLAAQVQAALRRGATQHLQERIKSLNLSLKEITTKVCMSEKFCSTLRKKVNDIETQLPALLEAKMHAISGNHFWTAKDLTEEIRSLTSEREGLEGLLSKLLVLSSRNVKKLGSVKEDYNRLRREVEHQETAYETSVKENTMKYMETLKNKLCSCKCPLLGKVWEADLEACRLLIQSLQLQEARGSLSVEDERQMDDLEGAAPPIPPRLHSEDKRKTPLKVLEEWKTHLIPSLHCAGGEQKEESYILSAELGEKCEDIGKKLLYLEDQLHTAIHSHDEDLIHSLRRELQMVKETLQAMILQLQPAKEAGEREAAASCMTAGVHEAQA

SEQ ID NO: 63023 - DNA, 279 bp, Artificial Sequence
  derived and/or modified sequence
atgaagtatatggagaccttgaagaataagctatgtagttgcaaatgcccattgctgggtaaagtatgggaggccgatctggaagcctgtcgcctccttattcagtcacttcagttgcaagaggcacgcggcagcctctcagtggaagacgagcgacagatggatgacctggaaggggcggcccctcctatccctccaagactgcatagcgaagataagagaaaaactccactgaaggtgctcgaagagtggaaaacacacctgattccctccctgtag

SEQ ID NO: 63024 - DNA, 2199 bp, Artificial Sequence
  derived and/or modified sequence
atgccagggggtgggccacaaggggcgcccgctgcagctggcggggggggggtgtctcacagagctgggagtcgcgattgcttgcctcctgccgcctgctttagaagacgtcggctggcacggaggcccgggtatatgcggagctctacaggcccaggtatcggattcttgagtcccgcggttggcactttgttccggttcccaggtggggtatctggagaggagagccatcactcagagtctagagctcgccagtgtgggcttgactcacgcgggctgctagtgaggtctcccgtgtcaaaaagcgctgcagcacctactgtgacaagtgtgcggggcacctctgctcactttggtattcagctgagaggcggtacccgattgcccgatagactgtcttggccatgtgggcccggatctgcaggttggcagcaagagttcgccgctatggatagttccgagacactggacgcctcttgggaggcggcctgctccgacggtgcacgacgcgtgcgcgcagccggtagcctgccaagcgccgaactctcctcaaattcttgcagtcccgggtgcggccccgaagtaccgcctacccccccgggctcacatagtgccttcacttcctctttctcgttcatccgactgtcccttgggagcgccggcgaacgaggggaggcagagggttgtccgcctagcagggaggcagagtcacattgccagtctcctcaggagatgggcgctaaggctgcctcgctcgatggccctcacgaggatcccaggtgcttaagtcgtcctttcagcctcctcgctaccagggtgagtgctgacctagctcaggctgcacgtaactcaagtagaccagaaagagacatgcactctttacctgacatggatcccggatccagcagtagcctggatccgtctcttgcagggtgcgggggcgatggatcctcgggtagcggggatgcccactcatgggatactctcctgcgtaagtgggagccagtactgcgcgactgtctgcttagaaaccgcaggcagatggaggtgattagtctacgcctgaaactgcagaagctgcaagaagatgcagtggaaaatgacgactatgataaggcagaaactctacagcagcggttggaagacctggaacaggaaaagatcagcctacactttcagctcccaagccgacagcctgctttgagttcattcctggggcatctggctgcccaggtgcaggccgctttaagaaggggggctacccagcacctgcaggagagaatcaagtccctcaacctgtcactcaaagaaatcaccaccaaagtgtgtatgtccgagaagttctgtagcactctcagaaaaaaggtgaacgacattgaaacacaactgcctgctctgctggaggccaagatgcacgccatctctggcaaccacttttggaccgccaaggacctaactgaggagattcgctcactgacctctgagcgcgagggacttgaagggctcctttcaaagctcctagtgctcagtagccgaaatgtaaagaagctcggctcagtgaaggaagattacaaccgcctacgacgggaggtcgaacatcaagaaaccgcctatgagacaagtgtcaaggaaaataccatgaagtatatggagacattaaagaacaagttatgcagttgtaagtgccccctccttggcaaagtgtgggaagctgatttagaggcttgtagactcctgatccagagcctgcagctacaggaagcaagggggtctctgtcagtcgaggatgaacgtcaaatggacgatttggagggcgctgctccaccaatccccccacgcctccactccgaggacaagcggaaaacccctctgaaagtcctcgaggagtggaaaacacatcttatacccagcctccactgcgccgggggtgagcagaaggaagaaagttacattctgtcagccgagctgggggagaagtgcgaagatatcgggaagaagctgctgtacctggaggaccaactgcacacagctatccactcacatgatgaagacctgattcatagtctccgaagggagctccagatggtgaaggaaaccttgcaggctatgatcctccagctacagccggcaaaagaagccggagagagagaagctgcggccagctgtatgacggcaggtgttcacgaggcacaggcatag

SEQ ID NO: 63025 - DNA, 279 bp, Artificial Sequence
  derived and/or modified sequence
atgaagtacatggagaccctgaagaacaagctgtgcagctgcaagtgccccctgctgggcaaggtgtgggaggccgacctggaggcctgccgcctgctgatccagagcctgcagctgcaggaggcccggggcagcctgtctgtggaggatgagcggcagatggatgacctggagggcgccgccccacccatccccccccggctgcacagcgaggacaagaggaagacccccctgaaggtgctggaggagtggaagacccacctgatccccagcctgtag

SEQ ID NO: 63026 - DNA, 2199 bp, Artificial Sequence
  derived and/or modified sequence
atgcctgggggcggcccccagggcgccccagctgctgctgggggcggcggcgtgagccaccgggccggcagccgggactgcctgcccccagctgcctgcttcagaagaagaaggctggcccggcggcccggctacatgaggagcagcacaggccctggcatcggcttcctgagccctgctgtgggcaccctcttccgcttccctgggggcgtgtctggagaggagagccaccacagcgagagccgggcccggcagtgtggcctggacagccggggcctgctggtgcgcagccctgtgtccaagtctgctgctgcccccaccgtgacctctgtgcggggcaccagcgcccacttcggcatccagctgcggggcggcacccggctgcctgaccggctgtcctggccctgtggccctggcagcgctggctggcagcaggagtttgctgccatggacagcagcgagaccctggatgcctcctgggaggccgcctgcagtgatggagccaggagagtgcgggccgccggcagcctgcccagcgctgagctgagcagcaacagctgcagccctggctgcggccctgaggtgccccccaccccacctggcagccacagcgccttcaccagcagcttctccttcatccggctgagcctgggcagcgctggggagcggggggaggccgagggctgcccccccagccgggaggccgagagccactgccagagcccccaggagatgggcgccaaggccgccagcctggatggcccccatgaggacccccgctgcctgagccggcccttcagcctgctggccaccagggtgtctgctgacctggcccaggccgccaggaacagcagcaggcctgagcgggacatgcacagcctgcctgacatggaccccggcagcagcagcagcctggaccccagcctggccggctgtggaggagatggcagcagcggcagcggagatgcccacagctgggacaccctgctgaggaagtgggagcctgtgctgcgggactgcctgctgaggaacagacggcagatggaggtgatcagcctgcggctgaagctgcagaagctgcaggaggatgctgtggagaatgatgattatgacaaggccgagaccctgcagcagaggctggaggacctggagcaggagaagatcagcctgcacttccagctgcccagccggcagcctgccctgagcagcttcctgggccacctggccgcccaggtgcaggccgccctgcggcggggggccacccagcacctgcaggagcgcatcaagagcctgaacctgagcctgaaggagatcaccaccaaggtgtgcatgtctgagaagttctgcagcaccctgaggaagaaggtgaatgacatcgagacccagctgcctgccctgctggaggccaagatgcacgccatcagcggcaaccacttctggacagccaaggacctgacagaggagatccgcagcctgaccagcgagcgggagggcctggagggcctgctgagcaagctgctggtgctgagcagcagaaatgtgaagaagctgggctctgtgaaggaggactacaaccggctgcggcgggaggtggagcaccaggagacagcctatgagacctctgtgaaggagaacaccatgaagtacatggagaccctgaagaacaagctgtgcagctgcaagtgccccctgctgggcaaggtgtgggaggccgacctggaggcctgccgcctgctgatccagagcctgcagctgcaggaggcccggggcagcctgtctgtggaggatgagcggcagatggatgacctggagggcgccgccccacccatccccccccggctgcacagcgaggacaagaggaagacccccctgaaggtgctggaggagtggaagacccacctgatccccagcctgcactgtgccggcggggagcagaaggaggagagctacatcctgtctgctgagctgggggagaagtgtgaagatattggcaagaagctgctgtacctggaggaccagctgcacacagccatccacagccatgatgaagatctcatccacagcctgcggcgggagctgcagatggtgaaggagaccctgcaggccatgatcctgcagctgcagcctgccaaggaggccggggagcgggaggccgccgccagctgcatgacagctggggtgcatgaggcccaggcctag

SEQ ID NO: 63027 - DNA, 279 bp, Artificial Sequence
  derived and/or modified sequence
atgaagtacatggagaccctgaagaacaagctgtgcagctgcaagtgcccgcttcttgggaaggtctgggaggccgacctggaggcatgtcgtctgctcattcagtcactccagctccaggaggctcgcggctcattgagcgttgaagacgagcgtcagatggacgacctagagggagcagctccgccgatcccccctcggctgcattcggaggataaaaggaaaacccccctgaaggtcctggaggagtggaaaactcacctcataccatctctctag

SEQ ID NO: 63028 - DNA, 2199 bp, Artificial Sequence
  derived and/or modified sequence
atgcccggcggcggcccccagggcgcccccgccgccgccggcggcggcggcgttagccatagagctggctctcgggactgtcttcctccagctgcctgctttcgcaggcgtcgtctagcgagaaggccagggtatatgcggagcagcaccggacctgggatcggctttttgagtcctgcagttgggacattattcaggtttccaggcggcgtgtccggggaggagtcacaccattcagagtcacgggccaggcaatgtggattggactctagaggcctgctggtcaggtcaccagtttctaagagcgcagctgcccccaccgtgacctctgtccggggtaccagcgcccatttcggcatccaactgcgcggtgggactcgcctgccggatcggctttcatggccttgcggtccaggttcagcaggctggcaacaggaatttgccgccatggacagttcggagactctggacgcttcgtgggaagctgcatgcagcgacggagctcggcgcgtaagagccgccgggagcctgccaagtgccgaattgtcaagcaacagctgctcacctggctgcggccctgaagtgcctcctaccccgccgggatcacactccgcatttacctcatccttcagtttcatccgcttatccctcggctctgccggagagagaggggaagctgaaggttgtcccccctccagggaagcagagtcccattgccagtcaccccaggaaatgggagccaaggccgccagcctggacggcccacacgaggatccacgctgtctctctcgaccattcagcttgctggccacccgggtgagtgccgatctggcccaagccgcacggaactcttcacggcctgagcgagacatgcacagtctccctgacatggatccgggtagtagtagttccctggatccatccctggcggggtgcggaggcgatggatctagtggtagcggtgatgcccattcttgggacacactgctgcgtaagtgggaacctgtgctgagagactgccttctgagaaacagacgtcagatggaggtgatttctcttagactgaaattgcaaaagctgcaggaagatgcagttgaaaacgacgattatgataaagctgaaacgctccagcaacggttagaggatctggagcaggagaaaatttccctgcacttccagctgccaagcaggcagccagccctaagctccttcctgggccatctggctgcacaggtgcaggcagctctgcgtcggggtgctactcagcacctgcaggagcgcatcaaatcgttgaatctctccctcaaagagatcacaaccaaggtatgcatgtccgagaagttctgtagtacgctccggaaaaaagttaacgatattgagacacagctccccgccctgctggaggctaagatgcatgctatttccgggaatcacttctggacagctaaagatttaacagaagagattcgcagtctgacaagcgaaagagaaggactcgaggggctcctgtccaaactgctagtgttaagttcgaggaacgtcaaaaaactaggaagtgtgaaggaggattacaatcgcctgagacgtgaagtcgagcatcaggagacggcatacgaaacatctgtgaaagaaaataccatgaagtatatggaaactctcaaaaataagctctgctcctgcaaatgtccccttctggggaaggtgtgggaggctgatctcgaagcctgcagacttctaatccagtcgctgcaactccaggaagctagaggcagtttgtccgtcgaagatgagagacagatggatgatttggaaggagccgctcctccaatcccgccacgtctccatagcgaggataagcggaaaacaccattgaaagttcttgaagaatggaaaacacatctcatccccagtctgcactgcgccggcggagagcagaaggaggagagttatattctttctgcagagttaggtgagaagtgtgaggacattggcaaaaaactcctgtatctggaagaccagctgcatacagccatccactctcacgatgaagatcttatacacagtcttagaagggaactccagatggtgaaggaaaccctgcaggcaatgatcctgcaacttcagccagctaaggaggcaggggaaagggaggccgctgcctcttgcatgacagcaggtgtgcacgaagcacaggcctag

SEQ ID NO: 63029 - DNA, 279 bp, Artificial Sequence
  derived and/or modified sequence
atgaaatatatggaaacgctgaaaaataagctgtgtagctgtaagtgtcccttactggggaaagtttgggaggcagacctggaggcctgccggctgctgatccagtccctgcaactgcaggaggcccgtgggtctctcagtgtcgaagacgagcgacaaatggatgatctcgagggggctgctccacccattccaccacggctgcacagcgaggataaacgtaagacacccctcaaggtgctggaggaatggaagacacatcttatcccatccctgtag

SEQ ID NO: 63030 - DNA, 2199 bp, Artificial Sequence
  derived and/or modified sequence
atgcctggcggtggccctcagggcgcacctgccgcagctggcggtggcggagtgagccacagggccggaagccgggactgccttccccctgccgcatgctttagacgccgtcgcctggcacggcgtcctggatatatgcggtcctctaccggccctggaatcggctttttatctcctgctgtgggtactctctttcgtttcccaggcggagtcagtggcgaggagtcacatcattcagagtctcgggcacgccaatgcggacttgactcacgcggactgctcgttaggtctccagttagcaagtcagctgctgcccctactgtgacctcagttcgcggaacatcagcacacttcggaattcagctgcgcggtgggacacggctgccagatcgtctatcttggccttgtggtcctgggagtgccggatggcagcaggagtttgctgctatggactcctccgagaccctggatgcgagttgggaggctgcttgtagcgacggagctagacgtgtgcgtgctgctggtagtttgccatccgccgaactctcttctaattcgtgctcccctggttgtggacctgaagtgcctcctacacctccaggctcccactctgcatttacctcctccttctcctttatcagactgagcctggggtctgcaggggagaggggcgaagcggaagggtgtcctccctctcgcgaggcagagagccactgtcaatccccccaggaaatgggtgcaaaagccgcttctctggacggcccacatgaggacccgcgatgcctgagtcgtccattctctctgctcgccactcgtgtttcggcagaccttgcccaggccgctcgtaacagctcccggcctgagcgcgatatgcacagcctcccagacatggacccaggcagtagctcctccctcgatccctcccttgccggttgcggtggagacggctcctctggctctggcgatgcgcactcatgggatacgctccttagaaagtgggaaccggtcctgagggattgcttattgcgcaacaggcggcagatggaggtgatttccctgcgcctcaaactgcagaaactgcaggaagacgcagtggagaatgatgactacgataaagccgaaacactacagcagcggttagaggatctggaacaggaaaagatctctttgcattttcagttaccgtctaggcagccagctctttctagctttctgggccatctcgccgctcaggtccaggcagccctgagaagaggtgctactcagcacctccaggaaagaatcaagagcttaaacctgtctttgaaagaaataaccacaaaggtgtgcatgtctgagaaattttgttcaacactgcggaagaaggtgaacgatatagagactcaactgcccgcactgctggaagcaaaaatgcacgccatttcaggaaatcacttctggacagctaaagacttgacagaggaaatcagaagcctaacttcagagcgcgagggccttgagggactgctctccaaattactggttctctcttcaaggaacgttaagaaattaggatcggtgaaggaggattataaccggctgcggagagaagttgagcaccaggaaaccgcctacgagactagcgtgaaggaaaatactatgaagtacatggagaccctcaagaataaattatgttcttgtaaatgtcccctgctcggcaaagtgtgggaagccgacctagaagcctgccggcttttaattcaatccctgcagctccaggaagccagaggctcacttagcgtcgaagacgagaggcagatggacgaccttgaaggcgcagccccaccaatcccccctagacttcattccgaggacaagagaaagacaccccttaaagtgctcgaagaatggaagactcatcttatcccctcactgcattgtgccggaggcgaacagaaggaagagtcctacatcctgagtgcagaactcggcgagaaatgcgaagatatcggcaaaaagttactctacttggaggaccagttacacaccgccattcactcccacgatgaagatctcattcactctctccgacgagagctacaaatggtaaaagaaacattgcaggccatgatcttgcagttacagcctgcaaaggaggcgggagagagagaggcagctgcgagttgtatgacggccggagtgcatgaggcccaagcttag

SEQ ID NO: 63031 - DNA, 279 bp, Artificial Sequence
  derived and/or modified sequence
atgaagtacatggagaccctgaagaacaagctgtgcagctgcaagtgccccctgctgggcaaggtgtgggaggccgacctggaggcctgcagactgctgatccagagcctgcagctgcaggaggccagaggcagcctgagcgtggaggacgagagacagatggacgacctggagggcgccgccccccccatcccccccagactgcacagcgaggacaagagaaagacccccctgaaggtgctggaggagtggaagacccacctgatccccagcctgtag

SEQ ID NO: 63032 - DNA, 2199 bp, Artificial Sequence
  derived and/or modified sequence
atgcccggcggcggcccccagggcgcccccgccgccgccggcggcggcggcgtgagccacagagccggcagcagagactgcctgccccccgccgcctgcttcagaagaagaagactggccagaagacccggctacatgagaagcagcaccggccccggcatcggcttcctgagccccgccgtgggcaccctgttcagattccccggcggcgtgagcggcgaggagagccaccacagcgagagcagagccagacagtgcggcctggacagcagaggcctgctggtgagaagccccgtgagcaagagcgccgccgcccccaccgtgaccagcgtgagaggcaccagcgcccacttcggcatccagctgagaggcggcaccagactgcccgacagactgagctggccctgcggccccggcagcgccggctggcagcaggagttcgccgccatggacagcagcgagaccctggacgccagctgggaggccgcctgcagcgacggcgccagaagagtgagagccgccggcagcctgcccagcgccgagctgagcagcaacagctgcagccccggctgcggccccgaggtgccccccaccccccccggcagccacagcgccttcaccagcagcttcagcttcatcagactgagcctgggcagcgccggcgagagaggcgaggccgagggctgcccccccagcagagaggccgagagccactgccagagcccccaggagatgggcgccaaggccgccagcctggacggcccccacgaggaccccagatgcctgagcagacccttcagcctgctggccaccagagtgagcgccgacctggcccaggccgccagaaacagcagcagacccgagagagacatgcacagcctgcccgacatggaccccggcagcagcagcagcctggaccccagcctggccggctgcggcggcgacggcagcagcggcagcggcgacgcccacagctgggacaccctgctgagaaagtgggagcccgtgctgagagactgcctgctgagaaacagaagacagatggaggtgatcagcctgagactgaagctgcagaagctgcaggaggacgccgtggagaacgacgactacgacaaggccgagaccctgcagcagagactggaggacctggagcaggagaagatcagcctgcacttccagctgcccagcagacagcccgccctgagcagcttcctgggccacctggccgcccaggtgcaggccgccctgagaagaggcgccacccagcacctgcaggagagaatcaagagcctgaacctgagcctgaaggagatcaccaccaaggtgtgcatgagcgagaagttctgcagcaccctgagaaagaaggtgaacgacatcgagacccagctgcccgccctgctggaggccaagatgcacgccatcagcggcaaccacttctggaccgccaaggacctgaccgaggagatcagaagcctgaccagcgagagagagggcctggagggcctgctgagcaagctgctggtgctgagcagcagaaacgtgaagaagctgggcagcgtgaaggaggactacaacagactgagaagagaggtggagcaccaggagaccgcctacgagaccagcgtgaaggagaacaccatgaagtacatggagaccctgaagaacaagctgtgcagctgcaagtgccccctgctgggcaaggtgtgggaggccgacctggaggcctgcagactgctgatccagagcctgcagctgcaggaggccagaggcagcctgagcgtggaggacgagagacagatggacgacctggagggcgccgccccccccatcccccccagactgcacagcgaggacaagagaaagacccccctgaaggtgctggaggagtggaagacccacctgatccccagcctgcactgcgccggcggcgagcagaaggaggagagctacatcctgagcgccgagctgggcgagaagtgcgaggacatcggcaagaagctgctgtacctggaggaccagctgcacaccgccatccacagccacgacgaggacctgatccacagcctgagaagagagctgcagatggtgaaggagaccctgcaggccatgatcctgcagctgcagcccgccaaggaggccggcgagagagaggccgccgccagctgcatgaccgccggcgtgcacgaggcccaggcctag

SEQ ID NO: 63033 - DNA, 545 bp, Artificial Sequence
  derived and/or modified sequence
gagaaaattgagggaagaccataaagtggctcttctatgtgtggacttttctgagagcttctttccccaggaaggatgatgtagaagatgtgaatgccgccttagccaaagtgtctgcttgtcagaggagttcaagtgttcctgtgttctttccttttccagtcgttaggagtaactgagcttactctgagatttgcacccagagggatggtctcagaagacgctggttcagtgcaaattgagatgaaacaagtgtgaaggaaaatactatgaagtacatggaaacacttaagaataaactgtgcagctgcaagtgtccactgcttgggaaagtgtgggaagctgacttggaagcttgtcgattgcttatccagagcctacagctccaggaagccaggggaagcctgtctgtagaagatgagaggcagatggatgacttagagggagctgctcctcctattccccccaggctccactccgaggataaaaggaagacccctttgaaggtattggaagaatggaagactcacctcatcccctctctg

SEQ ID NO: 63034 - DNA, 6689 bp, Artificial Sequence
  derived and/or modified sequence
ggaaggagcaggaggcagcccaggcggagcgggaggagctggcagcggggcgcatgccaggcgggggtcctcagggcgccccagccgccgccggcggcggcggcgtgagccaccgcgcaggcagccgggattgcttaccacctgcagcgtgctttcggaggcggcggctggcacggaggccgggctacatgagaagctcgacagggcctgggatcgggttcctttccccagcagtgggcacactgttccggttcccaggaggggtgtctggcgaggagtcccaccactcggagtccagggccagacagtgtggccttgactcgagaggcctcttggtccggagccctgtttccaagagtgcagcagcccctactgtgacctctgtgagaggaacctcggcgcactttgggattcagctcagaggtggcaccagattgcctgacaggcttagctggccgtgtggccctgggagtgctgggtggcagcaagagtttgcagccatggatagttctgagaccctggacgccagctgggaggcagcctgcagcgatggagcaaggcgtgtccgggcagcaggctctctgccatcagcagagttgagtagcaacagctgcagccctggctgtggccctgaggtccccccaacccctcctggctctcacagtgcctttacctcaagctttagctttattcggctctcgcttggctctgccggggaacgtggagaagcagaaggctgcccaccatccagagaggctgagtcccattgccagagcccccaggagatgggagccaaagctgccagcttggacgggcctcacgaggacccgcgatgtctctctcggcccttcagtctcttggctacacgggtctctgcagacttggcccaggccgcaaggaacagctccaggccagagcgtgacatgcattctttaccagacatggaccctggctcctccagttctctggatccctcactggctggctgtggtggtgatgggagcagcggctcaggggatgcccactcttgggacaccctgctcaggaaatgggagccagtgctgcgggactgcctgctgagaaaccggaggcagatggaggtaatatccttaagattaaaacttcagaaacttcaggaagatgcagttgagaatgatgattatgataaagctgagacgttacaacaaagattagaagacctggaacaagagaaaatcagcctgcactttcaacttccttcaaggcagccagctcttagcagtttcctgggtcacctggcagcacaagtccaggctgccttgcgccgtggggccactcagcacctccaggaaagaataaaatccctcaacttgtcacttaaagaaatcactactaaggtgtgtatgagtgagaaattctgcagcaccctgaggaagaaagttaacgatattgaaacccaactaccagccttgcttgaagccaaaatgcatgccatatcaggaaaccatttctggacggctaaagacctcaccgaggagattagatcattaacatcagagagagaagggctggagggactcctcagcaagctgttggtgttgagttccaggaatgtcaaaaagctgggaagtgttaaagaagattacaacagactgagaagagaagtggagcaccaggagactgcctatgaaacaagtgtgaaggaaaatactatgaagtacatggaaacacttaagaataaactgtgcagctgcaagtgtccactgcttgggaaagtgtgggaagctgacttggaagcttgtcgattgcttatccagagcctacagctccaggaagccaggggaagcctgtctgtagaagatgagaggcagatggatgacttagagggagctgctcctcctattccccccaggctccactccgaggataaaaggaagacccctttgaaggtattggaagaatggaagactcacctcatcccctctctgcactgtgctggaggtgaacagaaagaggaatcttacatcctttctgcagaacttggagaaaagtgtgaagacataggcaagaagctattgtacttggaagatcaacttcacacagcaatccacagtcatgatgaagatctcattcattctctcaggagggagctccagatggtgaaggaaactctgcaggccatgatcctgcagctccagccagcaaaggaggcgggagaaagagaagctgcagcttcctgcatgacagctggtgtccacgaagcacaagcctgaggagtgacgggatgggggagggaggtgggccaccatgtttggacccggggggctgctcttccctcccccgccatagctaagatgcctgaatcaattacggagatacagagccttgaggtctttcagtggaaaggtggttcatgttcattctcatcagtgtgaaactgaggagtctgcaatttggaatatggagagagagactgatttgctgaatttccttctaaatgtcactcaaaaatttcttttccatgtcattcttgggaatgtcttccacaggatttgagaatagtttcatctcagcccccattagagagaagttggggtgaattctggaaaaatgtctctttttcctgtgccatttgccttctgctgcaacgaaaatatttcctgattcaagattctataaaaaggaaaccaagcataagactctgtcatcatacctgttacacgttcctacaggtgcacaatctaagagagctaattaacctcagagtctggagttaacagcttttcaccttacttctcctgtgatctaatattatcttagaaaaattaatatgcaatttccaaaagatattttggtaagacaacaacctcccagtgatatgccacctttcaattttccttttgtggcaatgattgcatctgaagaaaggatccctgagagtctctgtttcatcaggacattctgaaatttacccacagtgaggctgtggatggatcaggggacctgtataaaatgtttgagcctgttccattttcccgtggaacctgtttcactcaatgccaggcagtgcagcatttaggaaagcagtgcagtactcagtaaggcagtgcagtactcagtaacacaatacagtactcaggcagtgcagtactcagtaagacagtgcagtgctcagtaaggcagtgcaatactcagtaacagtgtagtactcagtaacagtgaagtactcagtaatacagtacagtattcagtaaggcagtgaagtactcagtaatacaatacagtactcagttaggcagtgcagtactcaggaatgcagcacagtactcaggcagtgcaatactcagtgcggtactcagtaacacagtgcagtactcagtaacagtgcagtactcagtaacagtgcagtactcagtaaggcagtgcagtactcagtaacacagtgcagtactcagtaatacagtacagtactcagtaaggcagtatggtactcagtaaagcaatgcaatgctcagtaacacagtgcagtgctcaataaggcagtgcagtgctcagtaaggcagtgaattgcttagtaacacagtgtagtgctcagtaggacagcatagtactcagtaacacagggcagctagtactcagtactataagtactgagtacttatataggcaatgtagtactcagtaaatcagtgcagtactcagtaatgcaagggcatttcaggctcctgctgggctgcttctttggcccagctgggactcctattgagacagctgcaaaacaggctgatttcaattaggcagcacttcccaaagtgcactgaggaaggtggccccaagagaagctctctaaacaaaggagtaccctctctggtcaagtacctttggtaaatacaccataccataatatctgcttggagaaccacaatgcacattagcatattagtctgagagagaacttatagtaaggaaactcacttgattttatctaacctcaaactttccaagtttaatggatcgtgaatttttttcatgtaactcctattcatatcccatagatctagtattgtacagcactgcattctctgaggaagtcccagtccaaactctgatttacatcactttagaaaccacactcacacttttgcagagtgttgagcttaataactacctgccacagattggtaaatttaatccagtggttgttctgtttgtgcttctgttctcatttatgtgtttagggatagtgaggttcctgccttcactaggatccacggatatgagaccatttttgtcatttcctgaagtcacactggcgtttccagaaggcatctggtgctttgctcagccttccatgctgtgcagcacttctgtcctcagtcaaggagatggccatgcttaagccagcaattggctggggtccaggaaacaaagcaaaagcacaatatgtgaatgtgctgattgtgttccctatggctttatctcgagcaaaatacactctacatattttaataataagtataattagcttgttcctggacttcattttcaatgatgaaccaaattcctgaattatttataattgtgtctaaagaaaattatgaactggtcacatggcacttggaatccttgagttaattccagtgaagcaaaacttgggaagagtcaggattggccacattgccaataacaaattcctacttcgacatatgtcttttcaaaaagcctcccagacacaagacatcttaaccgtcactagcccaagtgttttgtattactcagacaccatcatgaaataattctgtgaggtcatgatgtatttgaaaattctgcaagttaataactgccttgaattgtttgaacccgaaataagggttctttggtacctctagtagatagtgtgttcatttccctgctgcaaattttgaagtatttgggcaggtgagtcatgttttaaccacaagccataactcatctgttgtctttgcttggtcttagagtatcattcagaaagtccgctaagggccagcgtgcttcttctggctacacaaccttctcaggacaagcccactgtcttaagccactttgaccctgggagacacaggactgtgtatcctcaatcatactatacagcagtttttgtcaggggaacataaaaatatccaagagaggttagggcttagatttaaaagcatcaaaacaacaacaatggaaatttatgttggcgatagccaagaccacaagcaaaagcacatactggaaatgatgagttagaatctgatttgactgggatgttttatgagaatgtaagtgtgatattatactgtctgccttgctggaatgctggctttcaaatggtcacccatttttctttcactggcctgagttaggacatgctatcagtaatagtcccagttccatccaactttctgaaatttcatttttttttttgagatggagtctctctctgtcacccaagttggagtgcagtggccccgcaatctcggctcactgcaacctctacctcccaggttcaagctattctactgcctcagcctcccaagtagctggggttacaggcatttgccaccgggccctgatgatttttgtatttttagtagagacagggcttcaccatgttggctaggagggtctcaaactcctgacctcaggcgatccacccccacctcggcttcccaaagtgctgagattacaggtgtgagccaccgcacccggccaactttctgaaatttcaaaactgaattgatccttctccaaattagtatatactattggaaacttgtctttccctgcagtaaggctggtttccccaccccagaaacatgtaacggttggtaccatgctaagcccttgccatgctaagccctttacagtcatatcctataatccccatatcaaccttataaggaaggtgtttgtagatgatgcaactgagccttaagaggactaattccctttttctaaggcacagagctggtaaaatgtgaagtaatagtgaacctaacagtcagagacaggcagcatgctcttaactagtgctcttcctaaagttcctttaatgtccttttgagattttgagccatggaacttacttgttcacctggctaagaactcatggccactgtggaaatcttggttagggagtcaaagaaactgagcctggggcaaacgaggcttcccacactgccaggggagcctcactgtgaagtctaggctcagacaggcatcaacaaacctattcaccccaccatcatcctgatctaaccattccccagtcatcccaggaaaaccactcacagcctgacactgggctgactttcttgaagatcctcatccaattggtgtttttcagaagtgttccaatattatgaattctgtgttgtggagaaaagcaaccatgcatttactggtcaatgccttcttgtatatgtaattcaatacttttacttttaatatcctcaccttatctaatctttgaattttgtcatgtaatttattgcttcattaaggttactttttgttatacaaaataaaagctgatatccaaggcatggtgcatcttgatgattttttgtcctttgaagtatggatgatagaaaaatgtatcaggtttattcatctcatctttctgttacaggatgattaattgtacagttacatcacacgaaacatttataataaagtcatgcttt

SEQ ID NO: 63035 - protein, 695 aa, Artificial Sequence
  derived and/or modified sequence
MPGGGPQGAPAAAGGGGVSHRAGSRDCLPPAACFRRRRLARRPGYMRSSTGPGIGFLSPAVGTLFRFPGGVSGEESHHSESRARQCGLDSRGLLVRSPVSKSAAAPTVTSVRGTSAHFGIQLRGGTRLPDRLSWPCGPGSAGWQQEFAAMDSSETLDASWEAACSDGARRVRAAGSLPSAELSSNSCSPGCGPEVPPTPPGSHSAFTSSFSFIRLSLGSAGERGEAEGCPPSREAESHCQSPQEMGAKAASLDGPHEDPRCLSRPFSLLATRVSADLAQAARNSSRPERDMHSLPDMDPGSSSSLDPSLAGCGGDGSSGSGDAHSWDTLLRKWEPVLRDCLLRNRRQMEVISLRLKLQKLQEDAVENDDYDKAETLQQRLEDLEQEKISLHFQLPSRQPALSSFLGHLAAQVQAALRRGATQQASGDDTHTPLRMEPRLLEPTAQDSLHVSITRRDWLLQEKQQLQKEIEALQARMFVLEAKDQQLRREIEEQEQQLQWQGCDLTPLVGQLSLGQLQEVSKALQDTLASAGQIPFHAEPPETIRSLQERIKSLNLSLKEITTKVCMSEKFCSTLRKKVNDIETQLPALLEAKMHAISGNHFWTAKDLTEEIRSLTSEREGLEGLLSKLLVLSSRNVKKLGSVKEDYNRLRREVEHQETAYAASVHCLGKCGKLTWKLVDCLSRAYSSRKPGEACL

SEQ ID NO: 63036 - DNA, 2088 bp, Artificial Sequence
  derived and/or modified sequence
atgcctggtggcggaccgcagggcgcccccgctgcagcgggaggaggtggagtatcacacagggcaggttccagagactgcctgccacccgctgcttgttttagaaggcgtaggctggctcgacgacccggctacatgcggtccagtaccggcccaggcataggatttctgtcccctgctgtggggacattgttccggtttccgggtggcgtctcaggggaggaatctcatcacagcgaaagtcgcgcacgccagtgcgggctggacagccgcgggctactggtgcgcagccccgtaagcaaatccgccgctgccccaacagtcacgtccgtgcgcgggacttcagcacacttcgggatacagttgagaggcgggacccggttgcccgaccggctgagctggccatgcggtcctgggtcggcggggtggcagcaagaatttgctgcaatggatagttccgaaactctagacgcgtcctgggaggcagcttgttcagacggagctagaagggtgcgtgccgcgggcagcttgccctctgcagagctgagcagtaatagctgtagcccagggtgcggaccagaagtaccacccactccacctggctcccacagcgccttcacttccagtttctccttcatcaggttgtcattgggctccgccggcgagaggggagaagccgagggatgccccccaagccgagaggccgagtcgcactgccagagcccccaagaaatgggcgcaaaagcagctagtttggatggaccccacgaggatccccggtgtctgtctagaccattcagccttctagccacacgcgtgtccgccgatctggcccaggcagccagaaatagcagccgcccggagagagacatgcactccctgccagacatggacccaggctcctcctcatccctggacccctctcttgccggttgcgggggcgacgggagttcagggtccggagacgcccattcttgggacacgttgctacggaagtgggagccggtgttacgagattgtctgttgcggaacagacgtcagatggaggttataagcctgcggcttaagctgcagaagctccaagaggatgccgtggagaacgatgattatgacaaagcagaaacattgcaacaaaggctcgaggatctggaacaggagaaaatcagcttacactttcagctcccgtccagacagccagctctttcttccttcctgggacacctggctgcccaggtccaggcggctctgaggcgaggggctacccagcaggcttccggagatgacactcacacaccattgaggatggaaccccggctgctggagcccacggcgcaggatagcctccatgtgtctatcacccgcagagactggctcctgcaagagaagcagcaactgcagaaagagattgaagctctgcaggcccggatgttcgttctcgaagcaaaggaccagcagctcagacgggagatcgaggagcaggaacagcagttgcaatggcagggatgcgatctgacaccactggtgggccaactttctctggggcagctgcaagaagtgtcaaaggcattgcaggatactctcgcctctgcagggcagattccattccatgctgaaccacctgaaacaattcggtctctccaggagaggatcaagtccctcaatcttagcctgaaagagattactaccaaggtatgcatgtctgagaagttttgtagcacccttcggaagaaggtgaatgatatcgagacgcagcttccagcccttctcgaggcaaagatgcatgcgattagtgggaatcacttctggactgcaaaagatctgactgaagagattcggtcattgacctccgaacgcgagggactcgaaggactgctgtcgaagcttctcgtactctcttccagaaacgtgaaaaaactgggttcagttaaggaggattataacagactgaggcgtgaagttgaacaccaggagactgcctatgcagcctcagtgcattgtctggggaagtgcggcaaacttacatggaagctagttgactgtctgtcgagggcctattcaagcaggaaaccaggagaggcgtgtctgtag

SEQ ID NO: 63037 - DNA, 2088 bp, Artificial Sequence
  derived and/or modified sequence
atgcctgggggcggcccccagggcgccccagctgctgctgggggcggcggcgtgagccaccgggccggcagccgggactgcctgcccccagctgcctgcttcagaagaagaaggctggcccggcggcccggctacatgaggagcagcacaggccctggcatcggcttcctgagccctgctgtgggcaccctcttccgcttccctgggggcgtgtctggagaggagagccaccacagcgagagccgggcccggcagtgtggcctggacagccggggcctgctggtgcgcagccctgtgtccaagtctgctgctgcccccaccgtgacctctgtgcggggcaccagcgcccacttcggcatccagctgcggggcggcacccggctgcctgaccggctgtcctggccctgtggccctggcagcgctggctggcagcaggagtttgctgccatggacagcagcgagaccctggatgcctcctgggaggccgcctgcagtgatggagccaggagagtgcgggccgccggcagcctgcccagcgctgagctgagcagcaacagctgcagccctggctgcggccctgaggtgccccccaccccacctggcagccacagcgccttcaccagcagcttctccttcatccggctgagcctgggcagcgctggggagcggggggaggccgagggctgcccccccagccgggaggccgagagccactgccagagcccccaggagatgggcgccaaggccgccagcctggatggcccccatgaggacccccgctgcctgagccggcccttcagcctgctggccaccagggtgtctgctgacctggcccaggccgccaggaacagcagcaggcctgagcgggacatgcacagcctgcctgacatggaccccggcagcagcagcagcctggaccccagcctggccggctgtggaggagatggcagcagcggcagcggagatgcccacagctgggacaccctgctgaggaagtgggagcctgtgctgcgggactgcctgctgaggaacagacggcagatggaggtgatcagcctgcggctgaagctgcagaagctgcaggaggatgctgtggagaatgatgattatgacaaggccgagaccctgcagcagaggctggaggacctggagcaggagaagatcagcctgcacttccagctgcccagccggcagcctgccctgagcagcttcctgggccacctggccgcccaggtgcaggccgccctgcggcggggggccacccagcaggccagcggagatgacacccacacccccctgaggatggagccccggctgctggagcccacagcccaggacagcctgcacgtgtccatcacccggcgggactggctgctgcaggagaagcagcagctgcagaaggagattgaggccctgcaggccaggatgtttgtgctggaggccaaggaccagcagctgcggcgggagattgaggagcaggagcagcagctgcagtggcagggctgtgacctgacccccctggtgggccagctgagcctgggccagctgcaggaggtgtccaaggccctgcaggacaccctggccagcgctggccagatccccttccacgccgagcccccagagaccatccgcagcctgcaggagcgcatcaagagcctgaacctgagcctgaaggagatcaccaccaaggtgtgcatgtctgagaagttctgcagcaccctgaggaagaaggtgaatgacatcgagacccagctgcctgccctgctggaggccaagatgcacgccatcagcggcaaccacttctggacagccaaggacctgacagaggagatccgcagcctgaccagcgagcgggagggcctggagggcctgctgagcaagctgctggtgctgagcagcagaaatgtgaagaagctgggctctgtgaaggaggactacaaccggctgcggcgggaggtggagcaccaggagacagcctatgctgcctctgtgcactgcctgggcaaatgtgggaagctgacctggaagctggtggactgcctgagccgggcctacagcagcaggaagccaggagaggcctgcctgtag

SEQ ID NO: 63038 - DNA, 2088 bp, Artificial Sequence
  derived and/or modified sequence
atgcccggcggcggcccccagggcgcccccgccgccgccggcggcggcggggtaagtcaccgagctgggtctcgagattgtctgcctcccgctgcttgttttaggcgccgccgactggcccggaggcctgggtacatgaggagttctacaggtccaggtatagggttcctgagtccagcagtgggcacactctttcggttccccggcggagtttccggggaagaatcccaccattcagagtcccgtgcgaggcaatgtggacttgatagccggggactccttgtgaggtccccggtgtctaaaagcgccgctgcccctactgtcacctctgtgcgagggacaagcgctcactttgggattcagctgcgggggggcacccgtctgcccgaccggctgtcttggccatgtgggcccggtagtgccggctggcaacaggagttcgctgcgatggattcttcggagacacttgacgcctcatgggaggcagcctgcagcgacggtgccagacgggtgcgggcggctggctccctaccatctgccgaattgagttccaactcttgctctccaggatgcggaccagaagttccccctacaccccctgggtcccactcggcattcactagctcattttctttcataaggcttagccttggctctgcaggcgagagaggagaagctgaagggtgtcctccctctagggaggccgagagccactgtcagagtccccaggagatgggagccaaggccgcgtctctggacggcccacacgaagacccacgatgcttgtctcgacccttcagcctccttgctactcgggtgtcggccgacttagcccaggcggcccggaatagctctcgtccagagagagatatgcatagtctgcccgatatggatccgggcagctcttcatcactggacccatcactggctgggtgcggaggcgatggctcctccggcagcggtgatgctcattcatgggacaccctactacggaaatgggaacctgtgctcagagactgtttgttacgcaacagaaggcagatggaagttattagccttaggctgaaactccagaaactgcaggaagatgcagttgaaaacgacgactatgacaaagccgaaactctacagcagcgcctcgaggatctggaacaagaaaagatctctctgcactttcagttaccctcccgccagcctgctctctcctctttcctgggtcacctagccgcccaggtccaggcagcgcttcggagaggtgccacccagcaggctagtggcgacgatacacatacccctcttcggatggaacctcgattgctggaacccaccgcgcaggacagcctgcacgtgtccattacccgtagggactggctgctgcaggagaagcagcagcttcagaaggaaattgaagcgctgcaggctcgaatgttcgtcttagaagccaaggaccagcaactcagacgggagatcgaggaacaggaacagcaattgcagtggcagggatgcgatctcacacccctggttgggcagctttcattaggtcagctgcaagaagtgtctaaagcactgcaggataccctggcctccgctggtcaaattccgttccacgcagaacctccagagacgatacgcagtctccaagagcggatcaagtcgctgaacctgtctttaaaggaaattactaccaaagtctgtatgtcggagaagttttgcagcacattacggaagaaggtgaatgacatcgaaacccagctcccagcacttcttgaggcaaaaatgcacgctatcagcggcaaccatttttggacggcaaaagatctgaccgaagagattagatcactcacctccgagagagaggggttggaggggctactctccaagctgctggtactgtcatcccgtaacgttaaaaagctaggttccgtgaaagaggactacaaccgcctgagacgggaggtggaacaccaggagacagcctacgctgcctctgtgcactgtctgggcaagtgcggtaaattgacgtggaaacttgtggactgtctttctagggcttactccagccgtaagcctggagaagcttgcctgtag

SEQ ID NO: 63039 - DNA, 2088 bp, Artificial Sequence
  derived and/or modified sequence
atgccgggaggtggacctcagggcgcacccgctgcagctggtgggggaggtgtctcacaccgggcagggtctcgggattgcttgcccccagcggcttgctttagaaggaggcgcttagcacggagacccggttacatgcgaagcagcacgggaccaggaataggattcctgtcaccggctgtgggtaccctgttcaggtttcccggaggcgtgagcggcgaagagtcacatcattctgaatctcgagcgagacagtgtgggctggacagccgcggactcctggtcagatcccctgtgagtaagtctgctgcagccccaaccgtcacttctgtgagaggtacttctgcgcactttggcatccagctgagggggggaactcgacttccagaccggttgtcctggccctgcggccctggatctgccggatggcagcaggaattcgcggctatggattctagcgaaacgctggacgcgtcatgggaggccgcttgttccgacggagcaagacgtgtgagagcagctggatccctgcctagcgcagagttgtcctccaactcttgcagcccaggctgcggacctgaagtcccacctacccctccaggttctcatagcgctttcacatcgtccttcagtttcatccggttgtcactaggctcagctggggaaagaggtgaagctgagggttgcccccctagccgcgaagctgagagccattgtcagtctccacaggagatgggtgcaaaagcggcttctcttgatggaccccacgaggacccacggtgtttgtctcggccattctcactgcttgcaacaagagtatccgcagacctcgcccaggccgctagaaacagcagccgaccagagcgagatatgcattctctcccagacatggatcctggctccagctctagtctggacccatccctggctgggtgtggcggagacggaagctctggaagcggtgatgcacatagctgggacaccctcctcagaaaatgggaaccagtgctcagagactgcctcctcagaaatagaaggcaaatggaagttatcagtctgagattgaaacttcagaagctgcaggaggacgcggtggagaatgacgattacgataaagctgagaccctccaacaaagactggaagatctggaacaggagaagatctccttgcactttcagctcccctctcgccagcctgcgctgagtagctttctgggccatttggccgcacaggtccaggcagctttgagaagaggagctacccagcaggcttcaggggacgacacacacacaccgctgagaatggaaccacggctgctggagcctactgcccaggattctcttcatgtgtccatcacacggagggattggcttcttcaggagaagcaacagctgcaaaaagagatcgaggctttacaggctcggatgtttgttttggaggctaaagaccagcagctcaggagggagatcgaagagcaggagcagcagctgcagtggcagggctgtgatttgacgcccctcgtagggcaactgagtcttggtcagctacaggaagtaagcaaggcactgcaagataccctggccagtgctggtcaaattccatttcatgcggaaccacctgagaccatccgaagcctccaggagcgtataaaaagcctgaacttatcactgaaggaaattaccactaaggtctgtatgtctgaaaaattttgcagtacactgcgcaaaaaggtgaacgatatagagacacagctgccagccctgcttgaggcaaagatgcacgcaatctccggaaaccatttttggacagccaaggatctcactgaagaaattcgctcactcacatcagaacgcgaggggttggagggcctgctgagtaagcttctagtgttatccagtcgaaacgtgaagaagctcggcagcgtgaaagaggattacaatagactgcgccgagaagtggaacatcaggagacggcatacgccgcatccgtgcactgtctcggcaagtgtgggaagttgacgtggaagctagtggactgtttgtcgcgggcttattcaagccgcaaacctggcgaagcctgtttgtag

SEQ ID NO: 63040 - DNA, 2088 bp, Artificial Sequence
  derived and/or modified sequence
atgcccggcggcggcccccagggcgcccccgccgccgccggcggcggcggcgtgagccacagagccggcagcagagactgcctgccccccgccgcctgcttcagaagaagaagactggccagaagacccggctacatgagaagcagcaccggccccggcatcggcttcctgagccccgccgtgggcaccctgttcagattccccggcggcgtgagcggcgaggagagccaccacagcgagagcagagccagacagtgcggcctggacagcagaggcctgctggtgagaagccccgtgagcaagagcgccgccgcccccaccgtgaccagcgtgagaggcaccagcgcccacttcggcatccagctgagaggcggcaccagactgcccgacagactgagctggccctgcggccccggcagcgccggctggcagcaggagttcgccgccatggacagcagcgagaccctggacgccagctgggaggccgcctgcagcgacggcgccagaagagtgagagccgccggcagcctgcccagcgccgagctgagcagcaacagctgcagccccggctgcggccccgaggtgccccccaccccccccggcagccacagcgccttcaccagcagcttcagcttcatcagactgagcctgggcagcgccggcgagagaggcgaggccgagggctgcccccccagcagagaggccgagagccactgccagagcccccaggagatgggcgccaaggccgccagcctggacggcccccacgaggaccccagatgcctgagcagacccttcagcctgctggccaccagagtgagcgccgacctggcccaggccgccagaaacagcagcagacccgagagagacatgcacagcctgcccgacatggaccccggcagcagcagcagcctggaccccagcctggccggctgcggcggcgacggcagcagcggcagcggcgacgcccacagctgggacaccctgctgagaaagtgggagcccgtgctgagagactgcctgctgagaaacagaagacagatggaggtgatcagcctgagactgaagctgcagaagctgcaggaggacgccgtggagaacgacgactacgacaaggccgagaccctgcagcagagactggaggacctggagcaggagaagatcagcctgcacttccagctgcccagcagacagcccgccctgagcagcttcctgggccacctggccgcccaggtgcaggccgccctgagaagaggcgccacccagcaggccagcggcgacgacacccacacccccctgagaatggagcccagactgctggagcccaccgcccaggacagcctgcacgtgagcatcaccagaagagactggctgctgcaggagaagcagcagctgcagaaggagatcgaggccctgcaggccagaatgttcgtgctggaggccaaggaccagcagctgagaagagagatcgaggagcaggagcagcagctgcagtggcagggctgcgacctgacccccctggtgggccagctgagcctgggccagctgcaggaggtgagcaaggccctgcaggacaccctggccagcgccggccagatccccttccacgccgagccccccgagaccatcagaagcctgcaggagagaatcaagagcctgaacctgagcctgaaggagatcaccaccaaggtgtgcatgagcgagaagttctgcagcaccctgagaaagaaggtgaacgacatcgagacccagctgcccgccctgctggaggccaagatgcacgccatcagcggcaaccacttctggaccgccaaggacctgaccgaggagatcagaagcctgaccagcgagagagagggcctggagggcctgctgagcaagctgctggtgctgagcagcagaaacgtgaagaagctgggcagcgtgaaggaggactacaacagactgagaagagaggtggagcaccaggagaccgcctacgccgccagcgtgcactgcctgggcaagtgcggcaagctgacctggaagctggtggactgcctgagcagagcctacagcagcagaaagcccggcgaggcctgcctgtag

SEQ ID NO: 63041 - DNA, 2902 bp, Artificial Sequence
  derived and/or modified sequence
ggaaggagcaggaggcagcccaggcggagcgggaggagctggcagcggggcgcatgccaggcgggggtcctcagggcgccccagccgccgccggcggcggcggcgtgagccaccgcgcaggcagccgggattgcttaccacctgcagcgtgctttcggaggcggcggctggcacggaggccgggctacatgagaagctcgacagggcctgggatcgggttcctttccccagcagtgggcacactgttccggttcccaggaggggtgtctggcgaggagtcccaccactcggagtccagggccagacagtgtggccttgactcgagaggcctcttggtccggagccctgtttccaagagtgcagcagcccctactgtgacctctgtgagaggaacctcggcgcactttgggattcagctcagaggtggcaccagattgcctgacaggcttagctggccgtgtggccctgggagtgctgggtggcagcaagagtttgcagccatggatagttctgagaccctggacgccagctgggaggcagcctgcagcgatggagcaaggcgtgtccgggcagcaggctctctgccatcagcagagttgagtagcaacagctgcagccctggctgtggccctgaggtccccccaacccctcctggctctcacagtgcctttacctcaagctttagctttattcggctctcgcttggctctgccggggaacgtggagaagcagaaggctgcccaccatccagagaggctgagtcccattgccagagcccccaggagatgggagccaaagctgccagcttggacgggcctcacgaggacccgcgatgtctctctcggcccttcagtctcttggctacacgggtctctgcagacttggcccaggccgcaaggaacagctccaggccagagcgtgacatgcattctttaccagacatggaccctggctcctccagttctctggatccctcactggctggctgtggtggtgatgggagcagcggctcaggggatgcccactcttgggacaccctgctcaggaaatgggagccagtgctgcgggactgcctgctgagaaaccggaggcagatggaggtaatatccttaagattaaaacttcagaaacttcaggaagatgcagttgagaatgatgattatgataaagctgagacgttacaacaaagattagaagacctggaacaagagaaaatcagcctgcactttcaacttccttcaaggcagccagctcttagcagtttcctgggtcacctggcagcacaagtccaggctgccttgcgccgtggggccactcagcaggccagcggagatgacacccacaccccactgagaatggagccgaggctgttggaacccactgctcaggacagcttgcacgtgtccatcacgagacgagactggcttcttcaggaaaagcagcagctacagaaagaaatcgaagctctccaagcaaggatgtttgtgctggaagccaaagatcaacagctgagaagggaaatagaggagcaagagcagcaactccagtggcagggctgcgacctgaccccactggtgggccagctgtccctgggtcagctgcaggaggtcagcaaggccttgcaggacaccctggcctcagccggtcagattcccttccatgcagagccaccggaaaccataaggagcctccaggaaagaataaaatccctcaacttgtcacttaaagaaatcactactaaggtgtgtatgagtgagaaattctgcagcaccctgaggaagaaagttaacgatattgaaacccaactaccagccttgcttgaagccaaaatgcatgccatatcaggaaaccatttctggacggctaaagacctcaccgaggagattagatcattaacatcagagagagaagggctggagggactcctcagcaagctgttggtgttgagttccaggaatgtcaaaaagctgggaagtgttaaagaagattacaacagactgagaagagaagtggagcaccaggagactgcctatgctgcaagtgtccactgcttgggaaagtgtgggaagctgacttggaagcttgtcgattgcttatccagagcctacagctccaggaagccaggggaagcctgtctgtagaagatgagaggcagatggatgacttagagggagctgctcctcctattccccccaggctccactccgaggataaaaggaagacccctttgaaggtattggaagaatggaagactcacctcatcccctctctgcactgtgctggaggtgaacagaaagaggtctgtccttttcacatggcctccagaggggacccttattctaaggggtgctttgggaccatgctccaaatgggaacaataaatattgggaaggcttcccattgagcatataaacttttaaaagtttcaataactcttgaatatgattacaaaataaagtagaatttttgtagaagtttgaaatatagaagagcaaaaaaacccaacttttggcatatttagttccattttcattctaatttagtggctagaattagaatatgcagtctaatatagaattaccatatatagcatacattatatatgtcatatataatatagttattatattcactatagattatatatgccatacatgatatttaacatatatactatacattatgtattgtatgtcatatatgatgtttatatatttagaatctatatattacaatatattattatttatttgaatgaaacattcaaatatatgtatttatcccattaattgtttttaccaaaaccagatcataatgaatgtttataatgttcttctttcataaacacaactaaagtttggcctgagatatatgtattacaaattaaaatatggttttattt

SEQ ID NO: 63042 - protein, 579 aa, Artificial Sequence
  derived and/or modified sequence
MPGGGPQGAPAAAGGGGVSHRAGSRDCLPPAACFRRRRLARRPGYMRSSTGPGIGFLSPAVGTLFRFPGGVSGEESHHSESRARQCGLDSRGLLVRSPVSKSAAAPTVTSVRGTSAHFGIQLRGGTRLPDRLSWPCGPGSAGWQQEFAAMDSSETLDASWEAACSDGARRVRAAGSLPSAELSSNSCSPGCGPEVPPTPPGSHSAFTSSFSFIRLSLGSAGERGEAEGCPPSREAESHCQSPQEMGAKAASLDGPHEDPRCLSRPFSLLATRVSADLAQAARNSSRPERDMHSLPDMDPGSSSSLDPSLAGCGGDGSSGSGDAHSWDTLLRKWEPVLRDCLLRNRRQMEVISLRLKLQKLQEDAVENDDYDKAETLQQRLEDLEQEKISLHFQLPSRQPALSSFLGHLAAQVQAALRRGATQQASGDDTHTPLRMEPRLLEPTAQDSLHVSITRRDWLLQEKQQLQKEIEALQARMFVLEAKDQQLRREIEEQEQQLQWQGCDLTPLVGQLSLGQLQEVSKALQDTLASAGQIPFHAEPPETIRSLQERIKSLNLSLKEITTKETISGRLKTSPRRLDH

SEQ ID NO: 63043 - DNA, 1740 bp, Artificial Sequence
  derived and/or modified sequence
atgcctggcggcggcccgcagggggctcctgccgcagccggaggaggaggggtgagtcatcgtgctggcagcagggactgcctgccgcctgccgcctgtttcaggcgaagacgcttggccaggcgacctggatatatgagatcctcaactgggccagggatcgggtttctgagccccgcagtcggcacgctgttcagatttcctggcggggtttcaggcgaggaatcgcaccactcagaaagtagggccaggcagtgcggcttggacagtcggggtcttttagtgcgatctccagtgagcaagtcagcggctgcacctactgtcacttctgttcggggaacgtctgctcacttcggaattcaactgagaggtggcactagactacccgacagattgtcctggccatgcggtcccggatccgctggatggcaacaagaattcgccgccatggattcatctgagactcttgacgcctcctgggaggcggcctgttccgacggtgctagacgagtcagagctgccggttccctgcctagcgcagagttatcctctaattcttgttcacccggatgtggccccgaggtgcctccaacaccgccgggaagccactccgccttcacaagcagtttctcctttattcgcctgagcctaggctctgcgggggagcgaggcgaggcggagggatgccccccctcaagagaggctgaatcccattgtcagtctccccaagaaatgggcgcgaaagctgcctccctagacggccctcatgaggaccctagatgcctgagtagacccttttccttgctggcaacaagagtgtccgcagacctggctcaggccgcccggaatagctccagacccgagcgcgacatgcatagccttcccgacatggacccgggcagctccagctcattggacccttccttagccggctgtggtggggatggatccagcggctcaggggacgcacattcatgggatacactgctccgcaagtgggagcctgttctccgcgactgcctcctgaggaacaggcggcaaatggaagtgatcagcctcagactgaagctgcagaaactgcaggaagacgcggtcgagaacgatgactatgataaggccgagaccctccagcagcggctagaggacctggagcaagaaaaaatcagcctccattttcagcttccaagtcgccagccagcgctatctagtttcctggggcacctcgcagcgcaggtccaggcagccctgagacggggcgccacccagcaggcctccggtgacgacactcacaccccattgcggatggaacctaggttattagagcccacagcacaagactctctccacgtgagcattacacggagagactggctcttacaggagaagcagcaactccaaaaagagatagaggccctgcaggcacgtatgttcgtgctggaggctaaggaccaacagctgcgcagggaaattgaagagcaggaacagcagctccagtggcaaggttgcgacctgacgccgctcgtaggacaactgtcactgggtcagctccaggaggtttccaaggctctccaagacacgctagcaagcgcaggccagatcccttttcacgctgagccaccggagaccattcggagcttacaggaaagaattaagagtctgaacttgtccctgaaggagatcactacaaaggagactatttccgggagactcaaaacctccccaagacgtctggaccactag

SEQ ID NO: 63044 - DNA, 1740 bp, Artificial Sequence
  derived and/or modified sequence
atgcctgggggcggcccccagggcgccccagctgctgctgggggcggcggcgtgagccaccgggccggcagccgggactgcctgcccccagctgcctgcttcagaagaagaaggctggcccggcggcccggctacatgaggagcagcacaggccctggcatcggcttcctgagccctgctgtgggcaccctcttccgcttccctgggggcgtgtctggagaggagagccaccacagcgagagccgggcccggcagtgtggcctggacagccggggcctgctggtgcgcagccctgtgtccaagtctgctgctgcccccaccgtgacctctgtgcggggcaccagcgcccacttcggcatccagctgcggggcggcacccggctgcctgaccggctgtcctggccctgtggccctggcagcgctggctggcagcaggagtttgctgccatggacagcagcgagaccctggatgcctcctgggaggccgcctgcagtgatggagccaggagagtgcgggccgccggcagcctgcccagcgctgagctgagcagcaacagctgcagccctggctgcggccctgaggtgccccccaccccacctggcagccacagcgccttcaccagcagcttctccttcatccggctgagcctgggcagcgctggggagcggggggaggccgagggctgcccccccagccgggaggccgagagccactgccagagcccccaggagatgggcgccaaggccgccagcctggatggcccccatgaggacccccgctgcctgagccggcccttcagcctgctggccaccagggtgtctgctgacctggcccaggccgccaggaacagcagcaggcctgagcgggacatgcacagcctgcctgacatggaccccggcagcagcagcagcctggaccccagcctggccggctgtggaggagatggcagcagcggcagcggagatgcccacagctgggacaccctgctgaggaagtgggagcctgtgctgcgggactgcctgctgaggaacagacggcagatggaggtgatcagcctgcggctgaagctgcagaagctgcaggaggatgctgtggagaatgatgattatgacaaggccgagaccctgcagcagaggctggaggacctggagcaggagaagatcagcctgcacttccagctgcccagccggcagcctgccctgagcagcttcctgggccacctggccgcccaggtgcaggccgccctgcggcggggggccacccagcaggccagcggagatgacacccacacccccctgaggatggagccccggctgctggagcccacagcccaggacagcctgcacgtgtccatcacccggcgggactggctgctgcaggagaagcagcagctgcagaaggagattgaggccctgcaggccaggatgtttgtgctggaggccaaggaccagcagctgcggcgggagattgaggagcaggagcagcagctgcagtggcagggctgtgacctgacccccctggtgggccagctgagcctgggccagctgcaggaggtgtccaaggccctgcaggacaccctggccagcgctggccagatccccttccacgccgagcccccagagaccatccgcagcctgcaggagcgcatcaagagcctgaacctgagcctgaaggagatcaccaccaaggagaccatcagcggccgcctgaagaccagcccccggcggctggaccactag

SEQ ID NO: 63045 - DNA, 1740 bp, Artificial Sequence
  derived and/or modified sequence
atgcccggcggcggcccccagggcgcccccgccgccgccggcggcggcggtgtgtctcaccgcgccgggtccagggactgtctgcctccagccgcatgctttcgacgtagacgacttgctaggaggcccggatacatgcgcagctccacgggaccaggaattgggtttctgtccccagctgtcggcaccctcttccggtttccaggtggcgttagcggcgaggagtctcatcattccgaatccagggcgagacagtgcgggctcgattcccggggcctgctggtgagatcgcccgtctccaagagcgctgctgctccaacagtcacaagcgtcagagggacttccgcccactttggaatccagctgcgcggtggtaccagactccctgaccgcctttcttggccatgcggacctggcagcgccggatggcaacaagagttcgcagccatggatagctctgaaaccctcgacgcttcatgggaagccgcctgtagtgatggagcccgccgcgtgcgtgcggctggtagtctcccatccgccgaattgagttccaatagttgctctcctggatgcggtcccgaggtgccccccacccctccaggcagccatagcgcctttacctctagtttttctttcatccgattaagcctcgggtctgctggagaaaggggcgaggcggaaggttgcccgccttcaagggaggccgaaagccattgccaaagtccacaagaaatgggggccaaggctgcttccctggacgggccgcacgaggacccacgttgtctgagccgccccttcagccttttagcaacaagggtgagcgccgatttggcacaagcggctcgtaattctagcagacccgagcgggatatgcatagtctgcccgatatggaccccggcagttctagctccctggatccttcgcttgccgggtgtggaggtgacggatcatctggatcaggcgacgcccattcctgggatacactgctgcgcaagtgggaacccgtattaagggactgtctcctgaggaatcgccggcagatggaagtgatatctcttcgcctgaaattacagaaattgcaggaggatgcagtcgagaacgatgactatgataaggcagagaccctgcagcagcgcttggaagacctcgaacaggaaaagatctctctccactttcagctgccctctcggcagcctgcactgagctcgtttctgggtcacctggccgctcaggtgcaggctgctcttcggcggggagccacccagcaagccagcggagatgacacccacactcccttgcggatggagcccaggctgttagaacctaccgcccaggacagcctacatgtctctatcaccagacgggactggttgctacaggagaaacagcaacttcagaaggagatcgaagctctgcaagccagaatgtttgtgttggaggccaaagaccagcagcttagacgggaaatcgaggagcaggaacagcagctccaatggcagggctgtgacctgacccccctcgtgggacaattgagcctgggtcagttgcaggaggtgagtaaagctttgcaggacaccctggcatccgccggacagatcccatttcacgccgagcctcctgagacgatacggagcttgcaggaacggataaaatccctgaacttgtctctcaaagaaataaccacaaaggaaacgatttctggaagactgaagacttcccccaggaggctcgatcactag

SEQ ID NO: 63046 - DNA, 1740 bp, Artificial Sequence
  derived and/or modified sequence
atgcctggaggcggtcctcagggggcacctgctgcagccggagggggaggtgtatcacatcgcgctggcagtagggactgtcttcctccagccgcttgcttcagaaggaggagactggccaggcgtcccggatacatgcggtcctccactggccctgggatagggtttctcagccccgcagtcggaaccctgttcagattcccgggaggagtgtcaggtgaggaatctcatcattctgagagcagggccagacagtgtggcctggattcacgaggtctcctggtcaggagccctgtctctaaatctgccgctgcccctacagtgacctcggttaggggaacgtcagcccactttggtatccagctcaggggtggcacccgcctgccagacagactgtcatggccatgtgggccagggtctgcaggatggcagcaggaattcgcagccatggacagttctgaaactctagacgcctcttgggaggcagcatgtagtgacggggcaagacgcgtgcgggctgcgggaagtctgcccagcgctgaactgtccagcaattcgtgtagccctggttgtggacctgaagtgccacccaccccacctgggagccactccgcctttaccagtagcttcagttttatccggttgtcactcggatccgccggtgagcggggagaagctgaagggtgcccacctagccgcgaagccgaaagccactgccagagcccacaggagatgggagccaaagcagcctccctagacggcccacatgaggatcctcgttgtcttagccgccctttctctcttctggctactagagtgtccgccgacttggctcaagccgctcggaacagttcgagaccagaacgggacatgcactccctccctgatatggaccctggtagcagttcatctcttgatccgtctctggcaggttgtggcggagatggttccagcgggagcggcgacgcccacagctgggacaccctcctgcggaaatgggagcccgtcctcagggattgtctgctgcgtaataggagacagatggaggtcatctcactgagacttaaattgcagaagcttcaagaggacgcagtcgaaaacgatgactacgataaagctgaaactcttcagcagagactcgaagaccttgaacaagagaaaatctccctgcattttcagcttccctcaagacagccagcattgagttcattcctcgggcatttggccgctcaggttcaagctgcgctccggagaggggctacccaacaagccagcggggatgatacccacactccactgcgcatggaacccaggttgctggagccaacagcacaggacagtctccacgtgtccatcacgaggagagattggttgctgcaggagaaacagcaattacagaaagaaattgaggctctccaagcacgtatgttcgtcctggaagcaaaggatcaacagttacgccgagaaatcgaagaacaggagcagcagctacagtggcaggggtgcgatctcactccactggtggggcagctttcactgggccaactgcaggaagtctcaaaggcactacaggacaccctcgcctctgcaggccagatcccatttcacgcagagcctcccgagacaattagatccctacaggagcgcattaaaagcctgaatttatctctaaaagaaatcaccactaaagaaacaatttcagggcgactcaaaacatcccctaggagacttgatcactag

SEQ ID NO: 63047 - DNA, 1740 bp, Artificial Sequence
  derived and/or modified sequence
atgcccggcggcggcccccagggcgcccccgccgccgccggcggcggcggcgtgagccacagagccggcagcagagactgcctgccccccgccgcctgcttcagaagaagaagactggccagaagacccggctacatgagaagcagcaccggccccggcatcggcttcctgagccccgccgtgggcaccctgttcagattccccggcggcgtgagcggcgaggagagccaccacagcgagagcagagccagacagtgcggcctggacagcagaggcctgctggtgagaagccccgtgagcaagagcgccgccgcccccaccgtgaccagcgtgagaggcaccagcgcccacttcggcatccagctgagaggcggcaccagactgcccgacagactgagctggccctgcggccccggcagcgccggctggcagcaggagttcgccgccatggacagcagcgagaccctggacgccagctgggaggccgcctgcagcgacggcgccagaagagtgagagccgccggcagcctgcccagcgccgagctgagcagcaacagctgcagccccggctgcggccccgaggtgccccccaccccccccggcagccacagcgccttcaccagcagcttcagcttcatcagactgagcctgggcagcgccggcgagagaggcgaggccgagggctgcccccccagcagagaggccgagagccactgccagagcccccaggagatgggcgccaaggccgccagcctggacggcccccacgaggaccccagatgcctgagcagacccttcagcctgctggccaccagagtgagcgccgacctggcccaggccgccagaaacagcagcagacccgagagagacatgcacagcctgcccgacatggaccccggcagcagcagcagcctggaccccagcctggccggctgcggcggcgacggcagcagcggcagcggcgacgcccacagctgggacaccctgctgagaaagtgggagcccgtgctgagagactgcctgctgagaaacagaagacagatggaggtgatcagcctgagactgaagctgcagaagctgcaggaggacgccgtggagaacgacgactacgacaaggccgagaccctgcagcagagactggaggacctggagcaggagaagatcagcctgcacttccagctgcccagcagacagcccgccctgagcagcttcctgggccacctggccgcccaggtgcaggccgccctgagaagaggcgccacccagcaggccagcggcgacgacacccacacccccctgagaatggagcccagactgctggagcccaccgcccaggacagcctgcacgtgagcatcaccagaagagactggctgctgcaggagaagcagcagctgcagaaggagatcgaggccctgcaggccagaatgttcgtgctggaggccaaggaccagcagctgagaagagagatcgaggagcaggagcagcagctgcagtggcagggctgcgacctgacccccctggtgggccagctgagcctgggccagctgcaggaggtgagcaaggccctgcaggacaccctggccagcgccggccagatccccttccacgccgagccccccgagaccatcagaagcctgcaggagagaatcaagagcctgaacctgagcctgaaggagatcaccaccaaggagaccatcagcggcagactgaagaccagccccagaagactggaccactag

SEQ ID NO: 63048 - DNA, 2706 bp, Artificial Sequence
  derived and/or modified sequence
ggaaggagcaggaggcagcccaggcggagcgggaggagctggcagcggggcgcatgccaggcgggggtcctcagggcgccccagccgccgccggcggcggcggcgtgagccaccgcgcaggcagccgggattgcttaccacctgcagcgtgctttcggaggcggcggctggcacggaggccgggctacatgagaagctcgacagggcctgggatcgggttcctttccccagcagtgggcacactgttccggttcccaggaggggtgtctggcgaggagtcccaccactcggagtccagggccagacagtgtggccttgactcgagaggcctcttggtccggagccctgtttccaagagtgcagcagcccctactgtgacctctgtgagaggaacctcggcgcactttgggattcagctcagaggtggcaccagattgcctgacaggcttagctggccgtgtggccctgggagtgctgggtggcagcaagagtttgcagccatggatagttctgagaccctggacgccagctgggaggcagcctgcagcgatggagcaaggcgtgtccgggcagcaggctctctgccatcagcagagttgagtagcaacagctgcagccctggctgtggccctgaggtccccccaacccctcctggctctcacagtgcctttacctcaagctttagctttattcggctctcgcttggctctgccggggaacgtggagaagcagaaggctgcccaccatccagagaggctgagtcccattgccagagcccccaggagatgggagccaaagctgccagcttggacgggcctcacgaggacccgcgatgtctctctcggcccttcagtctcttggctacacgggtctctgcagacttggcccaggccgcaaggaacagctccaggccagagcgtgacatgcattctttaccagacatggaccctggctcctccagttctctggatccctcactggctggctgtggtggtgatgggagcagcggctcaggggatgcccactcttgggacaccctgctcaggaaatgggagccagtgctgcgggactgcctgctgagaaaccggaggcagatggaggtaatatccttaagattaaaacttcagaaacttcaggaagatgcagttgagaatgatgattatgataaagctgagacgttacaacaaagattagaagacctggaacaagagaaaatcagcctgcactttcaacttccttcaaggcagccagctcttagcagtttcctgggtcacctggcagcacaagtccaggctgccttgcgccgtggggccactcagcaggccagcggagatgacacccacaccccactgagaatggagccgaggctgttggaacccactgctcaggacagcttgcacgtgtccatcacgagacgagactggcttcttcaggaaaagcagcagctacagaaagaaatcgaagctctccaagcaaggatgtttgtgctggaagccaaagatcaacagctgagaagggaaatagaggagcaagagcagcaactccagtggcagggctgcgacctgaccccactggtgggccagctgtccctgggtcagctgcaggaggtcagcaaggccttgcaggacaccctggcctcagccggtcagattcccttccatgcagagccaccggaaaccataaggaggtgtgtatgagtgagaaattctgcagcaccctgaggaagaaagttaacgatattgaaacccaactaccagccttgcttgaagccaaaatgcatgccatatcaggaaaccatttctggacggctaaagacctcaccgaggagattagatcattaacatcagagagagaagggctggagggactcctcagcaagctgttggtgttgagttccaggaatgtcaaaaagctgggaagtgttaaagaagattacaacagactgagaagagaagtggagcaccaggagactgcctatggtaggtagtgcacaactgttccccggcaagatattgatgatatttgttgtgttttgtggccaggcagaatgttctgtgccttatgtgaacgtcactgtgaagagcgtcatggagcacatggcccttttccttggggacatttttggcaggtgccttggcaaaccgaatggaattacttgtcagcttttgttttcatattcacatgtgacatcttttctttttctgttccctgtctcaacctgtgtttgctaatagccttgttattatttagagcagtctctcccttggcaaggtcttgagcattttctttgtgtgacaattatcttccttttgtcccttggctccgtctccttgtctgcacaatcatagactaaatcaggctgatctgagaaaattgagggaagaccataaagtggctcttctatgtgtggacttttctgagagcttctttccccaggaaggatgatgtagaagatgtgaatgccgccttagccaaagtgtctgcttgtcagaggagttcaagtgttcctgtgttctttccttttccagtcgttaggagtaactgagcttactctgagatttgcacccagagggatggtctcagaagacgctggttcagtgcaaattgagatggtaaaaacttatttcttaaaaaatggttcctaaataaatgtcatttactaaaacaaatgaaagaaatatatatatgaataaatggctatatttt

SEQ ID NO: 63049 - DNA, 2658 bp, Artificial Sequence
  derived and/or modified sequence
ggaaggagcaggaggcagcccaggcggagcgggaggagctggcagcggggcgcatgccaggcgggggtcctcagggcgccccagccgccgccggcggcggcggcgtgagccaccgcgcaggcagccgggattgcttaccacctgcagcgtgctttcggaggcggcggctggcacggaggccgggctacatgagaagctcgacagggcctgggatcgggttcctttccccagcagtgggcacactgttccggttcccaggaggggtgtctggcgaggagtcccaccactcggagtccagggccagacagtgtggccttgactcgagaggcctcttggtccggagccctgtttccaagagtgcagcagcccctactgtgacctctgtgagaggaacctcggcgcactttgggattcagctcagaggtggcaccagattgcctgacaggcttagctggccgtgtggccctgggagtgctgggtggcagcaagagtttgcagccatggatagttctgagaccctggacgccagctgggaggcagcctgcagcgatggagcaaggcgtgtccgggcagcaggctctctgccatcagcagagttgagtagcaacagctgcagccctggctgtggccctgaggtccccccaacccctcctggctctcacagtgcctttacctcaagctttagctttattcggctctcgcttggctctgccggggaacgtggagaagcagaaggctgcccaccatccagagaggctgagtcccattgccagagcccccaggagatgggagccaaagctgccagcttggacgggcctcacgaggacccgcgatgtctctctcggcccttcagtctcttggctacacgggtctctgcagacttggcccaggccgcaaggaacagctccaggccagagcgtgacatgcattctttaccagacatggaccctggctcctccagttctctggatccctcactggctggctgtggtggtgatgggagcagcggctcaggggatgcccactcttgggacaccctgctcaggaaatgggagccagtgctgcgggactgcctgctgagaaaccggaggcagatggaggtaatatccttaagattaaaacttcagaaacttcaggaagatgcagttgagaatgatgattatgataaagctgagacgttacaacaaagattagaagacctggaacaagagaaaatcagcctgcactttcaacttccttcaaggcagccagctcttagcagtttcctgggtcacctggcagcacaagtccaggctgccttgcgccgtggggccactcagcaggccagcggagatgacacccacaccccactgagaatggagccgaggctgttggaacccactgctcaggacagcttgcacgtgtccatcacgagacgagactggcttcttcaggaaaagcagcagctacagaaagaaatcgaagctctccaagcaaggatgtttgtgctggaagccaaagatcaacagctgagaagggaaatagaggagcaagagcagcaactccagtggcagggctgcgacctgaccccactggtgggccagctgtccctgggtcagctgcaggaggtcagcaaggccttgcaggacaccctggcctcagccggtcagattcccttccatgcagagccaccggaaaccataaggagcctccaggaaagaataaaatccctcaacttgtcacttaaagaaatcactactaaggaaaccatttctggacggctaaagacctcaccgaggagattagatcattaacatcagagagagaagggctggagggactcctcagcaagctgttggtgttgagttccaggaatgtcaaaaagctgggaagtgttaaagaagattacaacagactgagaagagaagtggagcaccaggagactgcctatggtaggtagtgcacaactgttccccggcaagatattgatgatatttgttgtgttttgtggccaggcagaatgttctgtgccttatgtgaacgtcactgtgaagagcgtcatggagcacatggcccttttccttggggacatttttggcaggtgccttggcaaaccgaatggaattacttgtcagcttttgttttcatattcacatgtgacatcttttctttttctgttccctgtctcaacctgtgtttgctaatagccttgttattatttagagcagtctctcccttggcaaggtcttgagcattttctttgtgtgacaattatcttccttttgtcccttggctccgtctccttgtctgcacaatcatagactaaatcaggctgatctgagaaaattgagggaagaccataaagtggctcttctatgtgtggacttttctgagagcttctttccccaggaaggatgatgtagaagatgtgaatgccgccttagccaaagtgtctgcttgtcagaggagttcaagtgttcctgtgttctttccttttccagtcgttaggagtaactgagcttactctgagatttgcacccagagggatggtctcagaagacgctggttcagtgcaaattgagatggtaaaaacttatttcttaaaaaatggttcctaaataaatgtcatttactaaaacaaatgaaagaaatatatatatgaataaatggctatatttt

SEQ ID NO: 63050 - protein, 559 aa, Artificial Sequence
  derived and/or modified sequence
MPGGGPQGAPAAAGGGGVSHRAGSRDCLPPAACFRRRRLARRPGYMRSSTGPGIGFLSPAVGTLFRFPGGVSGEESHHSESRARQCGLDSRGLLVRSPVSKSAAAPTVTSVRGTSAHFGIQLRGGTRLPDRLSWPCGPGSAGWQQEFAAMDSSETLDASWEAACSDGARRVRAAGSLPSAELSSNSCSPGCGPEVPPTPPGSHSAFTSSFSFIRLSLGSAGERGEAEGCPPSREAESHCQSPQEMGAKAASLDGPHEDPRCLSRPFSLLATRVSADLAQAARNSSRPERDMHSLPDMDPGSSSSLDPSLAGCGGDGSSGSGDAHSWDTLLRKWEPVLRDCLLRNRRQMEVISLRLKLQKLQEDAVENDDYDKAETLQQRLEDLEQEKISLHFQLPSRQPALSSFLGHLAAQVQAALRRGATQQASGDDTHTPLRMEPRLLEPTAQDSLHVSITRRDWLLQEKQQLQKEIEALQARMFVLEAKDQQLRREIEEQEQQLQWQGCDLTPLVGQLSLGQLQEVSKALQDTLASAGQIPFHAEPPETIRRNKCEGKYYEVHGNT

SEQ ID NO: 63051 - DNA, 1680 bp, Artificial Sequence
  derived and/or modified sequence
atgcccggcggcgggcctcagggggcacccgccgctgcaggaggaggcggggtatctcatcgggcaggaagtagggactgtctccccccagctgcgtgttttcgtcgccgtcggctcgcaagacgtcccggctacatgagaagcagtacagggcctggcatcgggtttctcagcccggccgtgggtaccctcttccggttccccggcggggtgagtggagaagaatcacatcacagcgagagtagggcaaggcaatgtggtcttgattcacggggattgcttgtaagatctcccgtatctaaatccgcggcggccccaaccgtgacctcagtgaggggcacatccgcccattttggaatccagcttcgcggcggcactcgcctcccggatcggctgtcctggccatgcggacccggtagcgccggatggcagcaggagttcgcagcaatggattcctccgagactttggatgccagttgggaggccgcctgttctgacggcgcccgccgtgtgcgagctgcgggctcactgccgtccgctgaattgtccagcaatagctgctcccccggctgtgggcccgaggttccgcccacccctcctggatcacatagcgcttttacttcctcattcagctttatccgacttagcctcgggtcagcgggagagcggggtgaggccgaggggtgtccgccgtcgagagaagccgaaagtcactgccagtcaccccaggagatgggggcaaaggccgcaagtctggacgggcctcacgaagaccctcgctgcctgtcgcggccattttcacttttagcgactagagtgagcgccgatctggcacaggcagccaggaatagcagtaggcccgaaagagacatgcattccctgccagacatggaccccggatcaagttcaagccttgacccttccttagccggatgtggaggagatggatccagcggcagtggtgacgcccattcatgggacacccttcttcggaaatgggagcccgtcctgagagattgtctactgagaaacaggaggcaaatggaggttatctccttgcggctgaagcttcagaagttgcaagaagacgctgtggagaacgacgactacgacaaggccgaaacattgcagcagcgacttgaagatttggagcaggaaaaaatcagtcttcactttcagctgccatcacgccaacccgctttgtctagctttcttgggcatttagctgcgcaggtgcaggcagccctccgcaggggggcaacccagcaggccagcggtgatgacacgcacacccctttgcgcatggagccccgactcctcgagccaaccgcgcaggactcgttgcatgtatctataacccgaagagattggctccttcaagagaagcagcagctgcagaaggagatagaggctctccaggcccgcatgttcgtgctggaggcaaaagatcagcagcttcgccgggagatcgaggagcaggaacagcaactgcaatggcagggatgtgatctcaccccactcgttggccagctctcactcggccagctgcaagaggtgagcaaggctctgcaagatactctcgcttctgctggacagatcccatttcacgcagaaccacctgagacaatacgccggaataaatgtgaaggaaaatactatgaagtgcacggtaacacatag

SEQ ID NO: 63052 - DNA, 1680 bp, Artificial Sequence
  derived and/or modified sequence
atgcctgggggcggcccccagggcgccccagctgctgctgggggcggcggcgtgagccaccgggccggcagccgggactgcctgcccccagctgcctgcttcagaagaagaaggctggcccggcggcccggctacatgaggagcagcacaggccctggcatcggcttcctgagccctgctgtgggcaccctcttccgcttccctgggggcgtgtctggagaggagagccaccacagcgagagccgggcccggcagtgtggcctggacagccggggcctgctggtgcgcagccctgtgtccaagtctgctgctgcccccaccgtgacctctgtgcggggcaccagcgcccacttcggcatccagctgcggggcggcacccggctgcctgaccggctgtcctggccctgtggccctggcagcgctggctggcagcaggagtttgctgccatggacagcagcgagaccctggatgcctcctgggaggccgcctgcagtgatggagccaggagagtgcgggccgccggcagcctgcccagcgctgagctgagcagcaacagctgcagccctggctgcggccctgaggtgccccccaccccacctggcagccacagcgccttcaccagcagcttctccttcatccggctgagcctgggcagcgctggggagcggggggaggccgagggctgcccccccagccgggaggccgagagccactgccagagcccccaggagatgggcgccaaggccgccagcctggatggcccccatgaggacccccgctgcctgagccggcccttcagcctgctggccaccagggtgtctgctgacctggcccaggccgccaggaacagcagcaggcctgagcgggacatgcacagcctgcctgacatggaccccggcagcagcagcagcctggaccccagcctggccggctgtggaggagatggcagcagcggcagcggagatgcccacagctgggacaccctgctgaggaagtgggagcctgtgctgcgggactgcctgctgaggaacagacggcagatggaggtgatcagcctgcggctgaagctgcagaagctgcaggaggatgctgtggagaatgatgattatgacaaggccgagaccctgcagcagaggctggaggacctggagcaggagaagatcagcctgcacttccagctgcccagccggcagcctgccctgagcagcttcctgggccacctggccgcccaggtgcaggccgccctgcggcggggggccacccagcaggccagcggagatgacacccacacccccctgaggatggagccccggctgctggagcccacagcccaggacagcctgcacgtgtccatcacccggcgggactggctgctgcaggagaagcagcagctgcagaaggagattgaggccctgcaggccaggatgtttgtgctggaggccaaggaccagcagctgcggcgggagattgaggagcaggagcagcagctgcagtggcagggctgtgacctgacccccctggtgggccagctgagcctgggccagctgcaggaggtgtccaaggccctgcaggacaccctggccagcgctggccagatccccttccacgccgagcccccagagaccatcagaagaaataaatgtgagggcaagtactatgaggtgcacggcaacacctag

SEQ ID NO: 63053 - DNA, 1680 bp, Artificial Sequence
  derived and/or modified sequence
atgcccggcggcggcccccagggcgcccccgccgccgccggcggcggcggcgtgtcccacagggctgggagcagggactgtctgccacctgctgcatgtttccggagacggcggcttgcaaggcgcccgggatatatgcggtcatccactggacccggtattggcttcctcagccctgccgtcggcaccctgttccgatttccggggggggtctcaggggaggagagtcaccattcagagagccgcgcaagacagtgcggccttgatagcaggggactcttagtacgctctcctgtctccaaaagcgcagccgcccctactgtgacatcagtgagggggacttcagctcacttcgggatccagctccgggggggcacgcgcctcccggaccgcctttcttggccgtgtggaccggggtccgccggatggcagcaggagtttgcggccatggattccagcgagacccttgacgcatcctgggaggccgcatgcagtgatggggcaaggagggttcgggcggccggcagcttaccttcagcggagctgtcgtccaacagctgtagtccaggctgtggccccgaagtaccacctactcctcctggtagtcacagcgcctttaccagcagtttttcgtttatcagactgagtcttggttctgctggcgaaaggggcgaagccgaaggttgtcctcctagcagagaggctgaatctcactgccagtcacctcaggaaatgggggccaaagctgcttctctggatggtccccacgaggatcctaggtgcttgtccagaccgttctctcttctggccactcgtgtgtccgccgacctggcacaggcagctaggaactccagcaggcccgaacgcgatatgcattccttaccagacatggatcctgggtcttcttccagtctggaccccagcctggcaggatgcggaggtgacggctccagtgggagcggagatgcccatagttgggacacactgctccgtaaatgggagcctgtcttgcgggactgcctgctaaggaaccggcgccaaatggaagtgatctcactgagattgaagctccagaaactccaggaagacgccgttgaaaacgatgattatgataaggctgagaccctccagcagagattagaggacctggagcaagagaagattagcttgcacttccagctgccctctaggcagcctgccttgagtagttttctggggcacctggcggctcaggtccaggctgccctgcggcggggcgctacccagcaggcttctggggacgacactcacacccccctacggatggaacctcgcttgctggagccaacagcacaggacagcctccacgtgtcgataacgagaagggattggttactgcaggaaaagcagcagttgcagaaggagattgaagcgctgcaggcacggatgtttgtgctcgaagcaaaggatcaacaactcagaagagagattgaggagcaggaacagcaactgcagtggcaagggtgtgatttgacaccgctggtgggccagctgtcgcttggtcagctgcaggaggtgtctaaggcgttacaagacaccctggcttcagctgggcagatcccttttcacgcagaacccccagaaactatccgtcggaacaaatgcgagggtaaatactacgaggtgcacggcaatacatag

SEQ ID NO: 63054 - DNA, 1680 bp, Artificial Sequence
  derived and/or modified sequence
atgcccggaggcggtccacagggcgctcccgctgcggctggcggtgggggagtaagccacagggcgggaagcagggattgtctgcctccggctgcttgctttcggaggcgacgactggctagacgacccggttacatgcggtcgagcaccggtcccggtatcggctttttgtcaccagccgtggggactctctttcgctttcctggaggcgtgagcggcgaagagagccaccattcggagtcgagggcaagacagtgtggcctggattcacgaggcctcctggtccggagcccagtcagcaagtccgctgctgctcccacagtcacttcagtgcggggaacctccgcccacttcggtatccagctccgagggggaactagactgcctgaccgcctgagttggccttgcggtcccggatccgctgggtggcagcaagaattcgcagctatggactcctcagagactctagatgcgtcgtgggaggcagcttgttccgatggggctcggcgagtaagggccgcaggctccctcccatctgccgagctgtcctcaaacagctgctcccctggatgtggcccagaagtcccgcctacacccccaggctctcactccgcgttcaccagctctttcagttttataaggctctcattaggatccgccggagaaaggggtgaggccgaaggatgcccaccctcgcgcgaagcagagtcccactgtcagagcccccaggagatgggcgctaaggctgcctctcttgatggtccccacgaggatccaagatgcttgtcaagaccattctctctgctcgccacgagggtgtccgcagacctggcacaggccgctcgaaactctagcagaccggagcgcgacatgcactccctgcctgacatggaccccggtagttcctcctctctcgacccctccctggcaggctgcgggggagacgggtcgtccgggtccggtgacgctcactcctgggacactctgctcaggaaatgggaacctgtgctcagggactgcctgttgagaaatagacggcaaatggaggtgatcagtctgcgattaaagttacagaagctacaggaagacgccgtggaaaacgacgattacgataaggccgagacgcttcagcaaaggctggaagacctcgagcaagagaagatctcgctgcacttccagttgccaagcaggcagcccgcactctctagcttcctcggccacctcgctgcgcaggtacaggccgcactacgcaggggggctacgcagcaagcctccggagatgatacccacacaccactgaggatggaaccacgccttctggaacctactgcccaagactccttgcatgttagtatcacacgcagggactggttgctgcaagagaagcagcagcttcaaaaagagatcgaagccctgcaagccaggatgttcgtcctggaggccaaggatcagcaacttcgacgcgagatcgaggaacaggagcagcaactccagtggcaggggtgcgatttgaccccactggtcggccagctgagcctggggcaactgcaggaggtcagcaaagccctccaggataccctggccagcgccggacagatcccttttcatgccgagccacccgaaactataagaagaaataaatgtgagggtaagtactatgaggttcatggtaacacttag

SEQ ID NO: 63055 - DNA, 1680 bp, Artificial Sequence
  derived and/or modified sequence
atgcccggcggcggcccccagggcgcccccgccgccgccggcggcggcggcgtgagccacagagccggcagcagagactgcctgccccccgccgcctgcttcagaagaagaagactggccagaagacccggctacatgagaagcagcaccggccccggcatcggcttcctgagccccgccgtgggcaccctgttcagattccccggcggcgtgagcggcgaggagagccaccacagcgagagcagagccagacagtgcggcctggacagcagaggcctgctggtgagaagccccgtgagcaagagcgccgccgcccccaccgtgaccagcgtgagaggcaccagcgcccacttcggcatccagctgagaggcggcaccagactgcccgacagactgagctggccctgcggccccggcagcgccggctggcagcaggagttcgccgccatggacagcagcgagaccctggacgccagctgggaggccgcctgcagcgacggcgccagaagagtgagagccgccggcagcctgcccagcgccgagctgagcagcaacagctgcagccccggctgcggccccgaggtgccccccaccccccccggcagccacagcgccttcaccagcagcttcagcttcatcagactgagcctgggcagcgccggcgagagaggcgaggccgagggctgcccccccagcagagaggccgagagccactgccagagcccccaggagatgggcgccaaggccgccagcctggacggcccccacgaggaccccagatgcctgagcagacccttcagcctgctggccaccagagtgagcgccgacctggcccaggccgccagaaacagcagcagacccgagagagacatgcacagcctgcccgacatggaccccggcagcagcagcagcctggaccccagcctggccggctgcggcggcgacggcagcagcggcagcggcgacgcccacagctgggacaccctgctgagaaagtgggagcccgtgctgagagactgcctgctgagaaacagaagacagatggaggtgatcagcctgagactgaagctgcagaagctgcaggaggacgccgtggagaacgacgactacgacaaggccgagaccctgcagcagagactggaggacctggagcaggagaagatcagcctgcacttccagctgcccagcagacagcccgccctgagcagcttcctgggccacctggccgcccaggtgcaggccgccctgagaagaggcgccacccagcaggccagcggcgacgacacccacacccccctgagaatggagcccagactgctggagcccaccgcccaggacagcctgcacgtgagcatcaccagaagagactggctgctgcaggagaagcagcagctgcagaaggagatcgaggccctgcaggccagaatgttcgtgctggaggccaaggaccagcagctgagaagagagatcgaggagcaggagcagcagctgcagtggcagggctgcgacctgacccccctggtgggccagctgagcctgggccagctgcaggaggtgagcaaggccctgcaggacaccctggccagcgccggccagatccccttccacgccgagccccccgagaccatcagaagaaacaagtgcgagggcaagtactacgaggtgcacggcaacacctag

SEQ ID NO: 63056 - DNA, 2616 bp, Artificial Sequence
  derived and/or modified sequence
ggaaggagcaggaggcagcccaggcggagcgggaggagctggcagcggggcgcatgccaggcgggggtcctcagggcgccccagccgccgccggcggcggcggcgtgagccaccgcgcaggcagccgggattgcttaccacctgcagcgtgctttcggaggcggcggctggcacggaggccgggctacatgagaagctcgacagggcctgggatcgggttcctttccccagcagtgggcacactgttccggttcccaggaggggtgtctggcgaggagtcccaccactcggagtccagggccagacagtgtggccttgactcgagaggcctcttggtccggagccctgtttccaagagtgcagcagcccctactgtgacctctgtgagaggaacctcggcgcactttgggattcagctcagaggtggcaccagattgcctgacaggcttagctggccgtgtggccctgggagtgctgggtggcagcaagagtttgcagccatggatagttctgagaccctggacgccagctgggaggcagcctgcagcgatggagcaaggcgtgtccgggcagcaggctctctgccatcagcagagttgagtagcaacagctgcagccctggctgtggccctgaggtccccccaacccctcctggctctcacagtgcctttacctcaagctttagctttattcggctctcgcttggctctgccggggaacgtggagaagcagaaggctgcccaccatccagagaggctgagtcccattgccagagcccccaggagatgggagccaaagctgccagcttggacgggcctcacgaggacccgcgatgtctctctcggcccttcagtctcttggctacacgggtctctgcagacttggcccaggccgcaaggaacagctccaggccagagcgtgacatgcattctttaccagacatggaccctggctcctccagttctctggatccctcactggctggctgtggtggtgatgggagcagcggctcaggggatgcccactcttgggacaccctgctcaggaaatgggagccagtgctgcgggactgcctgctgagaaaccggaggcagatggaggtaatatccttaagattaaaacttcagaaacttcaggaagatgcagttgagaatgatgattatgataaagctgagacgttacaacaaagattagaagacctggaacaagagaaaatcagcctgcactttcaacttccttcaaggcagccagctcttagcagtttcctgggtcacctggcagcacaagtccaggctgccttgcgccgtggggccactcagcaggccagcggagatgacacccacaccccactgagaatggagccgaggctgttggaacccactgctcaggacagcttgcacgtgtccatcacgagacgagactggcttcttcaggaaaagcagcagctacagaaagaaatcgaagctctccaagcaaggatgtttgtgctggaagccaaagatcaacagctgagaagggaaatagaggagcaagagcagcaactccagtggcagggctgcgacctgaccccactggtgggccagctgtccctgggtcagctgcaggaggtcagcaaggccttgcaggacaccctggcctcagccggtcagattcccttccatgcagagccaccggaaaccataaggagaaacaagtgtgaaggaaaatactatgaagtacatggaaacacttaagaataaactgtgcagctgcaagtgtccactgcttgggaaagtgtgggaagctgacttggaagcttgtcgattgcttatccagagcctacagctccaggaagccaggggaagcctgtctgtagaagatgagaggcagatggatgacttagagggagctgctcctcctattccccccaggctccactccgaggataaaaggaagacccctttgaaggtattggaagaatggaagactcacctcatcccctctctgcactgtgctggaggtgaacagaaagaggtctgtccttttcacatggcctccagaggggacccttattctaaggggtgctttgggaccatgctccaaatgggaacaataaatattgggaaggcttcccattgagcatataaacttttaaaagtttcaataactcttgaatatgattacaaaataaagtagaatttttgtagaagtttgaaatatagaagagcaaaaaaacccaacttttggcatatttagttccattttcattctaatttagtggctagaattagaatatgcagtctaatatagaattaccatatatagcatacattatatatgtcatatataatatagttattatattcactatagattatatatgccatacatgatatttaacatatatactatacattatgtattgtatgtcatatatgatgtttatatatttagaatctatatattacaatatattattatttatttgaatgaaacattcaaatatatgtatttatcccattaattgtttttaccaaaaccagatcataatgaatgtttataatgttcttctttcataaacacaactaaagtttggcctgagatatatgtattacaaattaaaatatggttttattt

SEQ ID NO: 63057 - DNA, 1830 bp, Artificial Sequence
  derived and/or modified sequence
atgcctggaggtggaccccaaggagctcctgctgcagcaggtggcgggggcgtgtcccatcgcgccggtagccgtgattgtttgccccctgcagcttgctttaggagaaggagattggcgaggcggccgggctacatgcggagcagtaccggtcccggaattgggttcctgagtccagcagtaggtaccctttttcgattccctggtggtgtgagcggtgaggaatctcatcatagcgaatcgagagcccgtcagtgtgggctagacagtcgaggattactcgtacgcagtcctgtctcaaaaagtgccgccgctcccactgtgacctctgttcgcggcaccagtgcccacttcgggatccagctaagaggcggaacccgcctccccgacaggctctcctggccttgtgggccagggtccgcagggtggcagcaagaatttgcagccatggatagcagtgagactctggacgcctcgtgggaggctgcctgctccgacggagcgcgaagagtgcgcgccgccggtagccttccatccgcggagttgtcctctaattcttgttccccaggctgcggaccagaagtgcctcccacaccgcctggctcgcacagcgcttttaccagctcctttagttttattcggctctccctgggctcagcaggagaaaggggcgaagccgaaggctgcccacccagccgggaggccgaatcccactgtcagagcccacaggagatgggcgccaaagcagcctctctcgatgggccacatgaagaccctcggtgtttgtcccggcccttctcacttctagcgaccagagtgagcgccgacctggctcaggctgccagaaacagttcccgccccgaacgcgacatgcattccctcccagacatggatccaggcagttcctctagcctggacccaagtttggccgggtgtgggggtgacggcagctcgggatccggggatgcgcatagttgggacactctgttgaggaagtgggagcctgtgctgagggactgcctcctccggaaccgtcggcagatggaagtgattagcctccgtctcaagctccaaaagctccaggaggacgcggttgaaaatgatgattacgacaaggcggaaacccttcaacagagattagaagacctggagcaggaaaaaatatccctgcatttccagctgcccagccgccagccagctctctcttcattccttgggcacctggcagcacaggtgcaggctgccctgcgcagaggagctacacagcaggccagcggtgacgatacccacaccccactgcggatggagccccgtctgctcgaacccactgcccaggatagtctgcacgtgagcataacacgcagagactggctgcttcaggaaaagcagcaattgcagaaagagatcgaagccttgcaagccagaatgttcgtgttggaggctaaagaccagcagttgagacgcgaaattgaagagcaggagcagcagctccagtggcaagggtgcgatctgacccctctcgttggacaattgagtctggggcagctccaagaagtttcgaaggccttgcaggacactcttgcatctgctgggcaaataccattccacgccgagccacctgagacaattcggagagaggtgcggcaccaaacagccccctgtaggaatcaccaactcgaaaagccagtcatcaatatctgggccttccacctaagacgaaagatttgcctgtttcaggccgatggcttgcagcacgggagtgcagaggtgaagcacctgaaggagacttccgtggagcctgccggaagcaccgcctcccgcaaggagtag

SEQ ID NO: 63058 - DNA, 1830 bp, Artificial Sequence
  derived and/or modified sequence
atgcctgggggcggcccccagggcgccccagctgctgctgggggcggcggcgtgagccaccgggccggcagccgggactgcctgcccccagctgcctgcttcagaagaagaaggctggcccggcggcccggctacatgaggagcagcacaggccctggcatcggcttcctgagccctgctgtgggcaccctcttccgcttccctgggggcgtgtctggagaggagagccaccacagcgagagccgggcccggcagtgtggcctggacagccggggcctgctggtgcgcagccctgtgtccaagtctgctgctgcccccaccgtgacctctgtgcggggcaccagcgcccacttcggcatccagctgcggggcggcacccggctgcctgaccggctgtcctggccctgtggccctggcagcgctggctggcagcaggagtttgctgccatggacagcagcgagaccctggatgcctcctgggaggccgcctgcagtgatggagccaggagagtgcgggccgccggcagcctgcccagcgctgagctgagcagcaacagctgcagccctggctgcggccctgaggtgccccccaccccacctggcagccacagcgccttcaccagcagcttctccttcatccggctgagcctgggcagcgctggggagcggggggaggccgagggctgcccccccagccgggaggccgagagccactgccagagcccccaggagatgggcgccaaggccgccagcctggatggcccccatgaggacccccgctgcctgagccggcccttcagcctgctggccaccagggtgtctgctgacctggcccaggccgccaggaacagcagcaggcctgagcgggacatgcacagcctgcctgacatggaccccggcagcagcagcagcctggaccccagcctggccggctgtggaggagatggcagcagcggcagcggagatgcccacagctgggacaccctgctgaggaagtgggagcctgtgctgcgggactgcctgctgaggaacagacggcagatggaggtgatcagcctgcggctgaagctgcagaagctgcaggaggatgctgtggagaatgatgattatgacaaggccgagaccctgcagcagaggctggaggacctggagcaggagaagatcagcctgcacttccagctgcccagccggcagcctgccctgagcagcttcctgggccacctggccgcccaggtgcaggccgccctgcggcggggggccacccagcaggccagcggagatgacacccacacccccctgaggatggagccccggctgctggagcccacagcccaggacagcctgcacgtgtccatcacccggcgggactggctgctgcaggagaagcagcagctgcagaaggagattgaggccctgcaggccaggatgtttgtgctggaggccaaggaccagcagctgcggcgggagattgaggagcaggagcagcagctgcagtggcagggctgtgacctgacccccctggtgggccagctgagcctgggccagctgcaggaggtgtccaaggccctgcaggacaccctggccagcgctggccagatccccttccacgccgagcccccagagaccatccggcgggaggtgcgccaccagacagccccctgcaggaaccaccagctggagaagcctgtgatcaacatctgggccttccacctgcggaggaagatctgcctcttccaggctgatggcctgcagcacggcagcgctgaggtgaagcacctgaaggagacctctgtggagcctgctggcagcacagccagcaggaaggagtag

SEQ ID NO: 63059 - DNA, 1830 bp, Artificial Sequence
  derived and/or modified sequence
atgcccggcggcggcccccagggcgcccccgccgccgccggcggcggtggagtaagtcaccgggcagggagtcgcgactgcctccctcctgcggcctgcttccgtaggcggcgtttggctcgcaggcccgggtacatgcgctcttcgactggacccggtattgggttcttgtctccagccgtgggcaccctgtttcgctttccagggggggtgagtggagaggaaagccaccacagcgagtctcgcgcacgccaatgtggcctcgatagtcgtgggctgctggtgaggtcccccgtatcaaagagtgcagctgctcctacagtcacttccgtcagaggcacatccgcccatttcggaattcaattaagaggcggtacccgtcttcccgaccggttaagctggccttgcggtcccggcagtgcaggatggcagcaggagttcgcagccatggattcatctgagacactcgacgcttcatgggaagccgcctgctcagatggcgccaggcgggtgagagcagccggatctttgccatccgctgaactgtcaagcaacagctgctcacccggctgtggacctgaagtgccacccacacctcccggctcccactccgcttttacctcaagcttcagcttcatcaggctgtctttggggtcagcaggagaacgcggagaagcggaggggtgcccgccctccagagaggccgaatcacactgccagtctccccaagagatgggagctaaagcggcctcactggacggtccgcacgaggatccacgttgtctgtcccgacccttttccctgctggcaactcgggtgtctgccgatttagcccaggcagctaggaactcgagtcggcccgaacgtgatatgcacagcttgcccgatatggacccaggatcatccagtagcctcgacccctctcttgccggatgcgggggggatgggtcctccggtagcggggacgcgcatagctgggacactctcctgcgaaagtgggagccagttctgcgggactgtttactgcgaaaccgtagacagatggaagttatatcattaagactgaagctgcaaaagttacaggaggacgccgtcgagaacgacgattacgataaggcagagactctgcagcagagactcgaagacttggagcaggagaagatcagcttgcacttccaacttcctagtcgacaacccgccttgtctagtttccttggacacttagctgctcaggtacaggccgctctgagacgcggcgctacacagcaagccagtggagacgacacccacactcccctgagaatggaaccaagactcctggaacctactgcccaggatagcttacatgtgtcgatcacccggcgcgattggctccttcaggagaaacagcagctccagaaagagatcgaggcactccaagcacgcatgtttgttcttgaggcaaaggatcaacagctgcgtagggagatcgaggagcaagagcagcaactccagtggcaggggtgcgaccttacccctctcgtgggccaactctcccttggccagctccaggaagtcagtaaagcacttcaggacacactggcttccgcaggtcagatacctttccacgcagaacctcccgagacaatccggcgagaggtgcgccaccagaccgctccctgtagaaatcaccaacttgagaaacccgtgatcaacatctgggcctttcacctgagaagaaaaatctgtttgtttcaggcggacgggctccagcatggcagcgcagaagtgaaacatctgaaagaaacctctgtggagcccgctggaagtactgcctcccgcaaggagtag

SEQ ID NO: 63060 - DNA, 1830 bp, Artificial Sequence
  derived and/or modified sequence
atgccaggcggaggtccgcaaggcgctcctgcagccgctggcggagggggtgtgtctcaccgcgctgggtcacgagactgcttaccccctgcggcatgtttccgccgacggcgtcttgcgcgtagaccgggatatatgagatcctcgacagggccagggataggcttcctgagccctgcagtaggtactctgttccgcttcccaggaggtgttagcggggaggaaagtcatcacagcgagagccgggctcgacaatgtggcctagatagcagaggactgcttgtcagatcaccggtctccaagtccgcagcagccccaaccgtaactagtgtgagaggcactagcgcccacttcgggatccagttgaggggcggaacccgcctgcccgatcgtttgagctggccatgtggccctggcagcgccggttggcagcaggagtttgccgctatggattcaagtgagaccctcgatgcttcttgggaagctgcctgttccgacggcgctcggcgagtgcgggctgctggcagtctccccagcgcggagctcagtagtaactcttgcagtccaggctgtggccctgaagtgccaccgacaccaccaggaagccattctgccttcaccagcagtttctccttcattcgcttatcattgggctcagctggtgagaggggtgaagcagaagggtgcccaccatcccgggaggccgagtctcattgtcaaagcccccaggaaatgggcgcaaaggctgcaagcctggatggtccgcacgaagacccccgttgcctcagccggccattcagtcttctcgcaaccagagtttcagctgatctggcccaggccgctcgaaattcttcgagacccgagcgggatatgcatagtctgccggatatggacccaggttctagttcaagcctagatccttcccttgcagggtgcgggggtgacggcagtagcggcagtggtgacgcccactcttgggacactttactgcggaaatgggagccagtgcttagggactgtctgctcaggaaccgacgtcagatggaagtcattagtctgcgcctgaaacttcagaagttgcaggaggatgcggtggagaacgacgattacgacaaagctgagacactccaacagagattggaggacctggaacaggaaaagattagcctacacttccagcttcccagtcggcagcccgctctgagctccttcctgggacacttggctgcccaggtccaggcggctttgcgtcgcggagcgactcagcaggcctccggcgatgatactcacacccccctgcggatggaacctcgcctcctcgagcctaccgcccaggactctctgcacgtgtccatcactcggagagactggctcctgcaagagaagcagcagctacagaaggaaatcgaagctctacaggccagaatgtttgtgctggaggcgaaagatcagcagctgcgcagggaaatagaagagcaggaacaacagttgcagtggcaggggtgtgatcttacccctctggtgggccaactctctctgggccaactgcaggaggtgagtaaggcactccaagacactctagcaagcgccggtcagattccgtttcacgccgagcctcccgaaactattcggagagaggtgcggcatcaaactgccccatgcagaaatcatcagctggagaagccagttataaatatatgggcctttcacctccggcgtaagatctgcctcttccaggcggatggactgcagcacggaagtgcggaggtgaagcatctgaaggagacatccgtcgagccagccggttccaccgccagtaggaaagaatag

SEQ ID NO: 63061 - DNA, 1830 bp, Artificial Sequence
  derived and/or modified sequence
atgcccggcggcggcccccagggcgcccccgccgccgccggcggcggcggcgtgagccacagagccggcagcagagactgcctgccccccgccgcctgcttcagaagaagaagactggccagaagacccggctacatgagaagcagcaccggccccggcatcggcttcctgagccccgccgtgggcaccctgttcagattccccggcggcgtgagcggcgaggagagccaccacagcgagagcagagccagacagtgcggcctggacagcagaggcctgctggtgagaagccccgtgagcaagagcgccgccgcccccaccgtgaccagcgtgagaggcaccagcgcccacttcggcatccagctgagaggcggcaccagactgcccgacagactgagctggccctgcggccccggcagcgccggctggcagcaggagttcgccgccatggacagcagcgagaccctggacgccagctgggaggccgcctgcagcgacggcgccagaagagtgagagccgccggcagcctgcccagcgccgagctgagcagcaacagctgcagccccggctgcggccccgaggtgccccccaccccccccggcagccacagcgccttcaccagcagcttcagcttcatcagactgagcctgggcagcgccggcgagagaggcgaggccgagggctgcccccccagcagagaggccgagagccactgccagagcccccaggagatgggcgccaaggccgccagcctggacggcccccacgaggaccccagatgcctgagcagacccttcagcctgctggccaccagagtgagcgccgacctggcccaggccgccagaaacagcagcagacccgagagagacatgcacagcctgcccgacatggaccccggcagcagcagcagcctggaccccagcctggccggctgcggcggcgacggcagcagcggcagcggcgacgcccacagctgggacaccctgctgagaaagtgggagcccgtgctgagagactgcctgctgagaaacagaagacagatggaggtgatcagcctgagactgaagctgcagaagctgcaggaggacgccgtggagaacgacgactacgacaaggccgagaccctgcagcagagactggaggacctggagcaggagaagatcagcctgcacttccagctgcccagcagacagcccgccctgagcagcttcctgggccacctggccgcccaggtgcaggccgccctgagaagaggcgccacccagcaggccagcggcgacgacacccacacccccctgagaatggagcccagactgctggagcccaccgcccaggacagcctgcacgtgagcatcaccagaagagactggctgctgcaggagaagcagcagctgcagaaggagatcgaggccctgcaggccagaatgttcgtgctggaggccaaggaccagcagctgagaagagagatcgaggagcaggagcagcagctgcagtggcagggctgcgacctgacccccctggtgggccagctgagcctgggccagctgcaggaggtgagcaaggccctgcaggacaccctggccagcgccggccagatccccttccacgccgagccccccgagaccatcagaagagaggtgagacaccagaccgccccctgcagaaaccaccagctggagaagcccgtgatcaacatctgggccttccacctgagaagaaagatctgcctgttccaggccgacggcctgcagcacggcagcgccgaggtgaagcacctgaaggagaccagcgtggagcccgccggcagcaccgccagcagaaaggagtag

SEQ ID NO: 63062 - DNA, 2940 bp, Artificial Sequence
  derived and/or modified sequence
ggaaggagcaggaggcagcccaggcggagcgggaggagctggcagcggggcgcatgccaggcgggggtcctcagggcgccccagccgccgccggcggcggcggcgtgagccaccgcgcaggcagccgggattgcttaccacctgcagcgtgctttcggaggcggcggctggcacggaggccgggctacatgagaagctcgacagggcctgggatcgggttcctttccccagcagtgggcacactgttccggttcccaggaggggtgtctggcgaggagtcccaccactcggagtccagggccagacagtgtggccttgactcgagaggcctcttggtccggagccctgtttccaagagtgcagcagcccctactgtgacctctgtgagaggaacctcggcgcactttgggattcagctcagaggtggcaccagattgcctgacaggcttagctggccgtgtggccctgggagtgctgggtggcagcaagagtttgcagccatggatagttctgagaccctggacgccagctgggaggcagcctgcagcgatggagcaaggcgtgtccgggcagcaggctctctgccatcagcagagttgagtagcaacagctgcagccctggctgtggccctgaggtccccccaacccctcctggctctcacagtgcctttacctcaagctttagctttattcggctctcgcttggctctgccggggaacgtggagaagcagaaggctgcccaccatccagagaggctgagtcccattgccagagcccccaggagatgggagccaaagctgccagcttggacgggcctcacgaggacccgcgatgtctctctcggcccttcagtctcttggctacacgggtctctgcagacttggcccaggccgcaaggaacagctccaggccagagcgtgacatgcattctttaccagacatggaccctggctcctccagttctctggatccctcactggctggctgtggtggtgatgggagcagcggctcaggggatgcccactcttgggacaccctgctcaggaaatgggagccagtgctgcgggactgcctgctgagaaaccggaggcagatggaggtaatatccttaagattaaaacttcagaaacttcaggaagatgcagttgagaatgatgattatgataaagctgagacgttacaacaaagattagaagacctggaacaagagaaaatcagcctgcactttcaacttccttcaaggcagccagctcttagcagtttcctgggtcacctggcagcacaagtccaggctgccttgcgccgtggggccactcagcaggccagcggagatgacacccacaccccactgagaatggagccgaggctgttggaacccactgctcaggacagcttgcacgtgtccatcacgagacgagactggcttcttcaggaaaagcagcagctacagaaagaaatcgaagctctccaagcaaggatgtttgtgctggaagccaaagatcaacagctgagaagggaaatagaggagcaagagcagcaactccagtggcagggctgcgacctgaccccactggtgggccagctgtccctgggtcagctgcaggaggtcagcaaggccttgcaggacaccctggcctcagccggtcagattcccttccatgcagagccaccggaaaccataaggagggaggtgaggcatcagactgctccctgccgtaaccatcaactagagaaacccgtcatcaatatttgggctttccatttgagaaggaagatatgtcttttccaagctgatgggctgcagcatggatctgcagaagtgaagcatttgaaagaaaccagtgtagaaccagctggctcaacagcctccaggaaagaataaaatccctcaacttgtcacttaaagaaatcactactaaggtgtgtatgagtgagaaattctgcagcaccctgaggaagaaagttaacgatattgaaacccaactaccagccttgcttgaagccaaaatgcatgccatatcaggaaaccatttctggacggctaaagacctcaccgaggagattagatcattaacatcagagagagaagggctggagggactcctcagcaagctgttggtgttgagttccaggaatgtcaaaaagctgggaagtgttaaagaagattacaacagactgagaagagaagtggagcaccaggagactgcctatggtaggtagtgcacaactgttccccggcaagatattgatgatatttgttgtgttttgtggccaggcagaatgttctgtgccttatgtgaacgtcactgtgaagagcgtcatggagcacatggcccttttccttggggacatttttggcaggtgccttggcaaaccgaatggaattacttgtcagcttttgttttcatattcacatgtgacatcttttctttttctgttccctgtctcaacctgtgtttgctaatagccttgttattatttagagcagtctctcccttggcaaggtcttgagcattttctttgtgtgacaattatcttccttttgtcccttggctccgtctccttgtctgcacaatcatagactaaatcaggctgatctgagaaaattgagggaagaccataaagtggctcttctatgtgtggacttttctgagagcttctttccccaggaaggatgatgtagaagatgtgaatgccgccttagccaaagtgtctgcttgtcagaggagttcaagtgttcctgtgttctttccttttccagtcgttaggagtaactgagcttactctgagatttgcacccagagggatggtctcagaagacgctggttcagtgcaaattgagatggtaaaaacttatttcttaaaaaatggttcctaaataaatgtcatttactaaaacaaatgaaagaaatatatatatgaataaatggctatatttt

SEQ ID NO: 63063 - DNA, 1644 bp, Artificial Sequence
  derived and/or modified sequence
atgcctggcgggggcccccagggggcacccgccgcagccggcggaggcggcgtgagtcacagggccggatcgcgagactgtctgccccctgctgcttgcttccgtagacgccgactggcacgacgccccggttacatgaggtcttccacaggcccgggcatcggatttctaagtcctgcagtgggaacattgtttcggttccctgggggggtgagtggagaggaatcccaccactccgagtcaagggcacgccagtgcggtcttgatagccgcggtctgctcgtacgaagcccagtctcaaagagtgcagctgcaccaacagtaaccagcgttcgggggacttcagctcacttcggcattcagcttcggggggggacacggcttcctgacaggctgtcctggccttgtggtcctggatctgcaggctggcagcaggagtttgccgccatggacagttctgagaccttggacgcctcttgggaggcagcatgctccgatggggctaggagagtgcgcgctgccggctccttaccctctgcagaactgtctagcaatagctgttcaccagggtgcggcccagaggtgccacctacccccccaggctctcactcggcctttacatctagtttcagttttatccgcttgagtctgggatcggccggagagagaggggaggctgaaggttgtccccctagtcgagaggcagagagccactgtcagtctcctcaggaaatgggagctaaggccgcctccctcgacgggccacatgaagatcccagatgcctgagcaggcctttctcgctgctggcgacacgggtgtccgccgacctggcgcaggctgcgagaaatagttcacgccccgaacgtgatatgcactccctcccggacatggaccctggctcatcctcctctcttgatcccagcctggctgggtgcgggggcgacggatctagtgggtccggtgatgctcattcatgggacacgctgctgcgcaaatgggagccagtgctgagagactgcctcttaaggaaccgcaggcaaatggaagtcatctcgttgcggctaaagttacagaaattgcaggaagacgctgtggagaatgacgattacgacaaggctgagactctacagcagcgtctggaagatttagaacaggagaaaatctcactacattttcagctcccatcccgccaaccggccctgagtagcttccttgggcaccttgcagcacaggtgcaagctgccctgagaagaggagccacccagcaggcgtccggtgatgacacccatactcctcttagaatggaacctcggttgctcgagcctaccgcccaggattctttacacgtcagtatcactcggagggactggctcctgcaggaaaagcagcagctccagaaggagatcgaggcccttcaagctcgaatgttcgtgctggaagccaaagatcagcaactgcggcgggagattgaagaacaagaacagcagctgcaatggcagggctgtgacctcacgccactggtggggcagctcagcctgggtcagcttcaggaagtctctaaggccctgcaggatacactggcaagcgcaggtcagattcctttccacgctgaacctcctgagaccattcggcgctgcgtatag

SEQ ID NO: 63064 - DNA, 1644 bp, Artificial Sequence
  derived and/or modified sequence
atgcctgggggcggcccccagggcgccccagctgctgctgggggcggcggcgtgagccaccgggccggcagccgggactgcctgcccccagctgcctgcttcagaagaagaaggctggcccggcggcccggctacatgaggagcagcacaggccctggcatcggcttcctgagccctgctgtgggcaccctcttccgcttccctgggggcgtgtctggagaggagagccaccacagcgagagccgggcccggcagtgtggcctggacagccggggcctgctggtgcgcagccctgtgtccaagtctgctgctgcccccaccgtgacctctgtgcggggcaccagcgcccacttcggcatccagctgcggggcggcacccggctgcctgaccggctgtcctggccctgtggccctggcagcgctggctggcagcaggagtttgctgccatggacagcagcgagaccctggatgcctcctgggaggccgcctgcagtgatggagccaggagagtgcgggccgccggcagcctgcccagcgctgagctgagcagcaacagctgcagccctggctgcggccctgaggtgccccccaccccacctggcagccacagcgccttcaccagcagcttctccttcatccggctgagcctgggcagcgctggggagcggggggaggccgagggctgcccccccagccgggaggccgagagccactgccagagcccccaggagatgggcgccaaggccgccagcctggatggcccccatgaggacccccgctgcctgagccggcccttcagcctgctggccaccagggtgtctgctgacctggcccaggccgccaggaacagcagcaggcctgagcgggacatgcacagcctgcctgacatggaccccggcagcagcagcagcctggaccccagcctggccggctgtggaggagatggcagcagcggcagcggagatgcccacagctgggacaccctgctgaggaagtgggagcctgtgctgcgggactgcctgctgaggaacagacggcagatggaggtgatcagcctgcggctgaagctgcagaagctgcaggaggatgctgtggagaatgatgattatgacaaggccgagaccctgcagcagaggctggaggacctggagcaggagaagatcagcctgcacttccagctgcccagccggcagcctgccctgagcagcttcctgggccacctggccgcccaggtgcaggccgccctgcggcggggggccacccagcaggccagcggagatgacacccacacccccctgaggatggagccccggctgctggagcccacagcccaggacagcctgcacgtgtccatcacccggcgggactggctgctgcaggagaagcagcagctgcagaaggagattgaggccctgcaggccaggatgtttgtgctggaggccaaggaccagcagctgcggcgggagattgaggagcaggagcagcagctgcagtggcagggctgtgacctgacccccctggtgggccagctgagcctgggccagctgcaggaggtgtccaaggccctgcaggacaccctggccagcgctggccagatccccttccacgccgagcccccagagaccatccgccgctgtgtgtag

SEQ ID NO: 63065 - DNA, 1644 bp, Artificial Sequence
  derived and/or modified sequence
atgcccggcggcggcccccagggcgcccccgccgccgccggcggcgggggagtcagccaccgggctggctcacgggattgcctgccacccgccgcctgttttcgacgaaggaggttggcaaggaggcctgggtatatgcgatcttctacaggacctggaatagggtttctctcgcccgctgttggaacactattccggtttcccggaggcgtgagtggggaggagtctcaccatagtgaaagtagagctagacagtgtggtctagactcccgtggcctgctggttcgctcaccagtttcaaagtccgctgcggctcccaccgtcaccagcgtccgaggcacaagcgcccacttcgggatacaactgagaggcgggactcgactccccgaccgtctgtcgtggccctgtggcccaggatctgctgggtggcagcaggaattcgcggcgatggattccagtgagacactggatgcctcatgggaggcagcgtgctctgacggagctcggagggtgcgcgcggctggaagcctgccctctgctgaactaagttctaactcttgctctccaggatgcggtcccgaggtaccaccaacacccccaggatcgcatagcgcgttcacctcctctttcagtttcattagactgtccctggggagtgcaggagaaaggggagaagccgagggatgtcccccatcacgtgaagcagaaagccactgtcaatcacctcaggagatgggggcaaaggcagcatctctggatggaccacacgaagacccccggtgtttgagcagaccattctccctgttggcaacacgagtgtctgccgatctcgctcaggctgccaggaattctagccgcccggagagagacatgcacagtctgcctgatatggatcccggatcttccagtagcctggacccatctctggcaggatgtgggggtgacgggtcctcaggatctggagacgcacatagctgggacactctgttacgcaagtgggaacccgtgctcagggactgcctgttacgtaaccggcggcagatggaagtaatttcactacgcctcaagctccagaagctgcaggaagacgctgtcgaaaatgatgactacgataaagctgagacactccaacaacggctggaggatctcgagcaggaaaagatctctctgcactttcagctgccttcacgccagccagccctgagtagcttcctgggacatctggccgcccaggtgcaggccgcactgaggcgcggcgccacccaacaagcgtcaggggatgatacacatacccctctgagaatggagccaagactgctggaacctaccgcccaggattctctacacgtttctataactagaagggactggcttttgcaggaaaaacagcagcttcagaaggagattgaggccctgcaagcgcggatgtttgtgcttgaggcaaaggatcagcagttaagacgtgaaattgaggaacaggagcagcaactccagtggcagggttgcgacctaacccctctcgttggacagttatccctcggccaactgcaggaagtgtccaaggctttgcaggataccctcgcgagcgctggccaaatccccttccacgcggaacccccggaaaccatccgtcggtgcgtctag

SEQ ID NO: 63066 - DNA, 1644 bp, Artificial Sequence
  derived and/or modified sequence
atgcctggcggtggaccgcagggagcaccggcagccgcagggggagggggagttagccatagagcaggatcccgtgattgtctgcctcccgcagcatgttttaggaggagaaggcttgcaaggagaccaggctacatgaggagcagtacaggacccggtattggattcctcagtccagccgtaggcacactatttaggttccctgggggagtgtcgggagaggaaagccatcacagcgagtcgcgcgcaaggcagtgtggtctggacagcagagggctgctggtacgctctcccgtatccaagtccgctgcagcacctacagtgacctctgttcgcggtacatctgcccattttgggatccagctgcgtggaggaactagattacctgataggttatcttggccctgtggacccggaagcgctggatggcagcaggagtttgctgccatggatagtagcgagaccctggatgctagttgggaagcagcctgctccgatggagcacgcagggtgagagcagctggatccttgccatccgccgagctatcctcgaattcctgctcccccggatgtggaccggaggtacctccgaccccacctggctctcactccgccttcacctctagcttctctttcatccggctatccctcggatctgccggagagcgtggagaggcagagggttgccccccatcacgggaagcagaatcacactgccagagcccacaggaaatgggcgctaaggcagcctctctagacggaccccacgaggatcccaggtgtctgtcacggccattttcccttttagccacccgggtgagtgccgatctagcccaagcagccaggaacagtagccgcccagaacgcgacatgcactcattacccgatatggaccctggcagctcaagttctctcgatccaagtctggcagggtgcggtggggacggctcttcgggatccggcgatgcccactcctgggacactcttttgcgcaagtgggagcccgtgctcagggattgtctgctgaggaacaggaggcaaatggaagtcataagcctgagactgaaactgcaaaaattgcaggaagacgccgtggaaaacgacgactatgacaaagccgagaccttgcagcagagactggaggatctcgagcaggagaagatctctctgcattttcaactgccatctaggcagcctgctctttccagcttcctcggacaccttgccgcacaggtccaggccgctctcagacggggtgctactcaacaagcatcaggcgatgacacacacactcctttaaggatggaaccaaggttgctggagcccacagcacaggactccctgcacgtcagtatcactaggcgggattggctccttcaggagaagcaacagctccaaaaagagattgaggcactgcaggcaagaatgttcgtgctagaagccaaggatcagcagctccggagggagatcgaagaacaggagcagcaactccagtggcagggatgtgatctgacaccactagtcgggcaactctcactgggacaactgcaggaagtgtcaaaagccctgcaggataccttggcttccgctggacaaataccctttcacgctgaaccccctgaaacaatcaggaggtgcgtgtag

SEQ ID NO: 63067 - DNA, 1644 bp, Artificial Sequence
  derived and/or modified sequence
atgcccggcggcggcccccagggcgcccccgccgccgccggcggcggcggcgtgagccacagagccggcagcagagactgcctgccccccgccgcctgcttcagaagaagaagactggccagaagacccggctacatgagaagcagcaccggccccggcatcggcttcctgagccccgccgtgggcaccctgttcagattccccggcggcgtgagcggcgaggagagccaccacagcgagagcagagccagacagtgcggcctggacagcagaggcctgctggtgagaagccccgtgagcaagagcgccgccgcccccaccgtgaccagcgtgagaggcaccagcgcccacttcggcatccagctgagaggcggcaccagactgcccgacagactgagctggccctgcggccccggcagcgccggctggcagcaggagttcgccgccatggacagcagcgagaccctggacgccagctgggaggccgcctgcagcgacggcgccagaagagtgagagccgccggcagcctgcccagcgccgagctgagcagcaacagctgcagccccggctgcggccccgaggtgccccccaccccccccggcagccacagcgccttcaccagcagcttcagcttcatcagactgagcctgggcagcgccggcgagagaggcgaggccgagggctgcccccccagcagagaggccgagagccactgccagagcccccaggagatgggcgccaaggccgccagcctggacggcccccacgaggaccccagatgcctgagcagacccttcagcctgctggccaccagagtgagcgccgacctggcccaggccgccagaaacagcagcagacccgagagagacatgcacagcctgcccgacatggaccccggcagcagcagcagcctggaccccagcctggccggctgcggcggcgacggcagcagcggcagcggcgacgcccacagctgggacaccctgctgagaaagtgggagcccgtgctgagagactgcctgctgagaaacagaagacagatggaggtgatcagcctgagactgaagctgcagaagctgcaggaggacgccgtggagaacgacgactacgacaaggccgagaccctgcagcagagactggaggacctggagcaggagaagatcagcctgcacttccagctgcccagcagacagcccgccctgagcagcttcctgggccacctggccgcccaggtgcaggccgccctgagaagaggcgccacccagcaggccagcggcgacgacacccacacccccctgagaatggagcccagactgctggagcccaccgcccaggacagcctgcacgtgagcatcaccagaagagactggctgctgcaggagaagcagcagctgcagaaggagatcgaggccctgcaggccagaatgttcgtgctggaggccaaggaccagcagctgagaagagagatcgaggagcaggagcagcagctgcagtggcagggctgcgacctgacccccctggtgggccagctgagcctgggccagctgcaggaggtgagcaaggccctgcaggacaccctggccagcgccggccagatccccttccacgccgagccccccgagaccatcagaagatgcgtgtag

SEQ ID NO: 63068 - protein, 238 aa, Artificial Sequence
  derived and/or modified sequence
MDSSETLDASWEAACSDGARRVRAAGSLPSAELSSNSCSPGCGPEVPPTPPGSHSAFTSSFSFIRLSLGSAGERGEAEGCPPSREAESHCQSPQEMGAKAASLDGPHEDPRCLSRPFSLLATRVSADLAQAARNSSRPERDMHSLPDMDPGSSSSLDPSLAGCGGDGSSGSGDAHSWDTLLRKWEPVLRDCLLRNRRQMEVISLRLKLQKLQEDAVENDDYDKAGTNCFGSTMEASTS

SEQ ID NO: 63069 - DNA, 717 bp, Artificial Sequence
  derived and/or modified sequence
atggactccagcgaaacactggacgcttcctgggaagcagcatgttctgacggagcccgacgcgtacgggctgctggcagtctgccatcggccgaactctcctcaaactcatgcagcccagggtgtggtcccgaagtcccgccaacccctccaggctcacactccgccttcacctcctccttcagctttatacgtctgtccctggggagtgccggggagcggggtgaagccgagggatgccccccatcccgcgaggctgagtcccactgccaatcccctcaggaaatgggagccaaagcagcttcacttgacggcccgcacgaggaccctaggtgtctgagtcgcccattttccctgctggcaacacgagtaagcgccgacctggcccaggccgctcgaaatagttctcggccagagagagacatgcactctctccctgacatggaccccggaagttcctcctctctggacccctccctggctggctgtggtggggatggttcttcaggatccggggatgctcattcatgggataccttgctcagaaagtgggagccagtcctgagagattgtctactgagaaatcgccggcagatggaagtgatctcattgaggctgaagctgcaaaaacttcaggaagatgccgtggagaacgacgactatgacaaagctgggaccaactgcttcggcagtactatggaagcttcaactagttag

SEQ ID NO: 63070 - DNA, 717 bp, Artificial Sequence
  derived and/or modified sequence
atggacagcagcgagaccctggatgcctcctgggaggccgcctgcagtgatggagcccggcgggtgcgggctgctggcagcctgcccagcgctgagctgagcagcaacagctgcagccctggctgcggccctgaggtgccccccaccccacctggcagccacagcgccttcaccagcagcttctccttcatccggctgagcctgggcagcgctggggagcggggggaggccgagggctgcccccccagccgggaggccgagagccactgccagagcccccaggagatgggcgccaaggccgccagcctggatggcccccatgaggacccccgctgcctgagccggcccttcagcctgctggccaccagggtgtctgctgacctggcccaggccgccaggaacagcagcaggcctgagcgggacatgcacagcctgcctgacatggaccccggcagcagcagcagcctggaccccagcctggccggctgtggaggagatggcagcagcggcagcggagatgcccacagctgggacaccctgctgaggaagtgggagcctgtgctgcgggactgcctgctgaggaacagacggcagatggaggtgatcagcctgcggctgaagctgcagaagctgcaggaggatgctgtggagaatgatgattatgacaaggccggcaccaactgcttcggcagcaccatggaggccagcaccagctag

SEQ ID NO: 63071 - DNA, 717 bp, Artificial Sequence
  derived and/or modified sequence
atggacagcagcgagaccctggacgccagctgggaggccgcctgctctgacggcgcccgtagggttcgcgccgctggcagcctaccctccgccgagctgagttcaaactcttgttccccaggatgcggcccagaagtgcctccgacccctcccggttctcactccgcctttacctcatcctttagtttcatcagattgtcactggggagtgccggcgaacggggagaagctgaaggatgccctccgagtcgagaagccgagagccattgccagtccccccaggaaatgggtgccaaagccgcctcactggacgggccacatgaagaccctcggtgtctttcaagaccatttagtctacttgcaacccgagtgtcagctgacctggcacaggctgctagaaattcctcaagaccagaacgggacatgcactcgctcccggatatggatccaggatcctcttcttcattagatccttcattggccgggtgtggcggcgacggcagctcaggctctggagacgcgcactcgtgggacaccctgctccgtaaatgggaacctgtcctgcgggactgcttactaagaaatcgaaggcagatggaggttatttcattgcggctgaaacttcaaaagctgcaggaggatgccgtggagaatgacgactacgacaaagcggggacgaactgcttcgggtcaacgatggaggcatctaccagctag

SEQ ID NO: 63072 - DNA, 717 bp, Artificial Sequence
  derived and/or modified sequence
atggatagctctgagactttagatgctagctgggaagccgcttgcagcgatggcgctcggagagtacgcgcagccggatcgctgccctcggccgaattgtcttccaattcctgcagccccggatgcggtcccgaagtgcctccaacgcctccaggaagtcatagcgctttcacaagctccttcagcttcatccgcctctctttaggttcggccggagagagaggcgaggctgaaggctgtccgccttccagagaagccgaatcgcattgccagtcacctcaggagatgggagcaaaagcagcatcccttgatggtccacatgaggatccaaggtgcttgtctcgaccgttctccctcctggccacccgggtatccgcagacctggctcaagcagcgaggaactcttccagaccagagagagacatgcacagcctgccagacatggacccgggatccagctccagcctggatcccagtctcgcaggttgcggaggcgacgggtcctcagggtctggggacgcgcacagttgggataccttactgagaaagtgggagcccgtgctgcgggactgccttctgcgcaacaggcggcagatggaagtaattagcctgagactgaaattgcaaaagcttcaggaggacgcggttgaaaacgacgattacgataaagcaggtactaactgtttcggatctaccatggaagcttcaacatcctag

SEQ ID NO: 63073 - DNA, 717 bp, Artificial Sequence
  derived and/or modified sequence
atggacagcagcgagaccctggacgccagctgggaggccgcctgcagcgacggcgccagaagagtgagagccgccggcagcctgcccagcgccgagctgagcagcaacagctgcagccccggctgcggccccgaggtgccccccaccccccccggcagccacagcgccttcaccagcagcttcagcttcatcagactgagcctgggcagcgccggcgagagaggcgaggccgagggctgcccccccagcagagaggccgagagccactgccagagcccccaggagatgggcgccaaggccgccagcctggacggcccccacgaggaccccagatgcctgagcagacccttcagcctgctggccaccagagtgagcgccgacctggcccaggccgccagaaacagcagcagacccgagagagacatgcacagcctgcccgacatggaccccggcagcagcagcagcctggaccccagcctggccggctgcggcggcgacggcagcagcggcagcggcgacgcccacagctgggacaccctgctgagaaagtgggagcccgtgctgagagactgcctgctgagaaacagaagacagatggaggtgatcagcctgagactgaagctgcagaagctgcaggaggacgccgtggagaacgacgactacgacaaggccggcaccaactgcttcggcagcaccatggaggccagcaccagctag

SEQ ID NO: 63074 - DNA, 2872 bp, Artificial Sequence
  derived and/or modified sequence
gtaggattcatgccttccgactgtgaggctgttgtaaggaagtagcgtttgtgggaatgccacccaggagtcaaatctctagcctttgggtgatcaggaggctgacaggaaaacagcgacagagctttgcctctggtggaactcctggtggcctgcagacctgttggcgtctgtacctgcagtccactcagctttccagatgactgaaatgccccaacagggtagagtggctcgcctctccaagaaagagcagttggtgaataatcatgcctgggaaaacaatccgcctggcaaagagatggatggtatccgttggtgaatgtgatggcagcaagcccagtgcaagattctgtggcgattccttgattgacctgctcggcagccgggattgcttaccacctgcagcgtgctttcggaggcggcggctggcacggaggccgggctacatgagaagctcgacagggcctgggatcgggttcctttccccagcaaggcctcttggtccggagccctgtttccaagagtgcagcagcccctactgtgacctctgtgagaggaacctcggcgcactttgggattcagctcagaggtggcaccagattgcctgacaggcttagctggccgtgtggccctgggagtgctgggtggcagcaagagtttgcagccatggatagttctgagaccctggacgccagctgggaggcagcctgcagcgatggagcaaggcgtgtccgggcagcaggctctctgccatcagcagagttgagtagcaacagctgcagccctggctgtggccctgaggtccccccaacccctcctggctctcacagtgcctttacctcaagctttagctttattcggctctcgcttggctctgccggggaacgtggagaagcagaaggctgcccaccatccagagaggctgagtcccattgccagagcccccaggagatgggagccaaagctgccagcttggacgggcctcacgaggacccgcgatgtctctctcggcccttcagtctcttggctacacgggtctctgcagacttggcccaggccgcaaggaacagctccaggccagagcgtgacatgcattctttaccagacatggaccctggctcctccagttctctggatccctcactggctggctgtggtggtgatgggagcagcggctcaggggatgcccactcttgggacaccctgctcaggaaatgggagccagtgctgcgggactgcctgctgagaaaccggaggcagatggaggtaatatccttaagattaaaacttcagaaacttcaggaagatgcagttgagaatgatgattatgataaagctggaaccaattgctttggatccaccatggaagcctcgacatcctgaaccaaactcctattaatgaaacttcccaaatttaaacaaagcaagacaaatagatatccacacagcgtagatcatgacttctttagacatcatgaaaagaaaaagaggacccacgtggaagaatacgctcatttatgatcagggtagcatcatattcctctcccttttaacattatttcaggatagcagctgtctggatgctggccatgggcttgaaaaaaaccaggtgggcatttctgcccactgtaccgtttctcccatgcgtttcccagtcccctgtcatggcatgaaaaaaccgctattgttctgtgttgggacaattagatttttgtaggggggagaaaccacccaaaagcaaatggaaaaatatgctatgattaatgtcagttacgggaattaaacttcggaggcctttaggacaattatgaaggaatcattttccccttggtggcaatatgtactacagttgtcccttgatatccatgggggattaattccaggacgcctgtggatacagaaatccacgtgtactcaagtcttgttttcagtggatatgaaaagtcggccctccatatctgcaggttttacacttggcgaatgctgtatttttgattcatgttggattaaggatctggaacccctgatacagactgtatttattgaaaaaaaagtctgcctatgagtagactcacatgttaaaacccgtgttgttcaagggtcaaccataactgcaggcagaacatctgggcaggaagctcctgcaggaagacctgtaaactcaggtctgtggaacggcgatgatcttcttcccttgcttccagaattattgctgtgagatcaggtgcactggctacgaccttactctttgtgcagaacttatttctggtctggtttaagtgaacgttattctttctgtgcagtcctgtggttacatcaaaggttaaatttcatatagcatgtctgttatatcagacttctctgatggcctgtccagagcaaacattttaaaatattggtcctattctgtcttataacagtctgctctggtgatttttgtctcatcaattggattatgacactgtcagccactgttagtgttattctcaaattcagtcttccattcatctctccttcccttccctggcagacagacttctgcagccactgggactgttggggtgaggaaaggcaagaaccgatgtttcattctctccctcccttcttcctccctcttttttgttggttgtggggtgggctacatcttcttacccaaacaaccaggagcatttgttggcaagtttattgtgcccagtgccgatgtctggacaattaattccctaggtcagtggctttcacagtttgtgatggtgactccaggaaggaaactcaccatgaccctgtatatacatagaacaaaaatgcagcccactctgatattgtatttgttctattctagttcattaaaagtgaatgttggtcttcatccttt

SEQ ID NO: 63075 - protein, 1036 aa, Artificial Sequence
  derived and/or modified sequence
MGFALERFAEAVDPALECKLCGQVLEEPLCTPCGHVFCASCLLPWAVRRRRCPLQCQPLAPGELYRVLPLRSLIQKLRVQCDYRARGCGHSVRLHELEAHVEHCDFGPARRLRSRGGCASGLGGGEVPARGGCGPTPRAGRGGGARGGPPGGRWGRGRGPGPRVLAWRRREKALLAQLWALQGEVQLTARRYQEKFTQYMAHVRNFVGDLGGGHRRDGEHKPFTIVLERENDTLGFNIIGGRPNQNNQEGTSTEGIYVSKILENGPADRADGLEIHDKIMEVNGKDLSKATHEEAVEAFRNAKEPIVVQVLRRTPLSRPAYGMASEVQLMNASTQTDITFEHIMALAKLRPPTPPVPDICPFLLSDSCHSLHPMEHEFYEDNEYISSLPADADRTEDFEYEEVELCRVSSQEKLGLTVCYRTDDEEDTGIYVSEVDPNSIAAKDGRIREGDRILQINGEDVQNREEAVALLSNDECKRIVLLVARPEIQLDEGWLEDERNEFLEELNLEMLEEEHNEAMQPTANEVEQPKKQEEEEGTTDTATSSSNNHEKDSGVGRTDESLRNDESSEQENAAEDPNSTSLKSKRDLGQSQDTLGSVELQYNESLVSGEYIDSDCIGNPDEDCERFRQLLELKCKIRNHGEYDLYYSSSTIECNQGEQEGVEHELQLLNEELRNIELECQNIMQAHRLQKVTDQYGDIWTLHDGGFRNYNTSIDMQRGKLDDIMEHPEKSDKDSSSAYNTAESCRSTPLTVDRSPDSSLPRVINLTNKKNLRSTMAATQSSSGQSSKESTSTKAKTTEQGCSAESKEKVLEGSKLPDQEKAVSEHIPYLSPYHSSSYRYANIPAHARHYQSYMQLIQQKSAVEYAQSQLSLVSMCKESQKCSEPKMEWKVKIRSDGTRYITKRPVRDRILKERALKIKEERSGMTTDDDTMSEMKMGRYWSKEERKQHLVRAKEQRRRREFMMRSRLECLKESPQSGSEGKKEINIIELSHKKMMKKRNKKILDNWMTIQELMTHGAKSPDGTRVHNAFLSVTTV

SEQ ID NO: 63076 - DNA, 444 bp, Artificial Sequence
  derived and/or modified sequence
atgggcctgctgagcctgatcctgttcctgggcgccaaggtgaccaccgccaacaagaccgacagcttcctgttcagcaccggcctgaccgtgctgagcagccccggcctgaagatgagagtgctgggctgcccccccacccccccccagctgacccagggccacaccagcggctacgtggacctgcacaagggccccttcctgagccccatgagacaccccagaggccacaccggcccccagatcctgccccaggcctgggagcccatcggcagaagagtgagacagtgcagaggcccccagaccttcctgaagggccccgagagcaagtacttcagactgtgcagacccgacgtgctgtgctgcaagacccagttctgctactgcagcagcaaggccgccatcgacaacagcgaggtgaacgagtgcgtggtgagccagtag

SEQ ID NO: 63077 - DNA, 3111 bp, Artificial Sequence
  derived and/or modified sequence
atggggttcgccctggaacgttttgctgaggcagtagatcctgcactggaatgcaagctctgcggacaagttctggaggagcccttgtgtacaccatgcggccatgtgttctgcgcctcttgcctgcttccctgggctgtgagacggcggagatgtccgctccagtgccagccgctggcccctggggaactgtaccgagtgctacctctgcgatctctgatccagaagctgagggttcagtgcgattacagggccagaggctgtggccactccgtccgacttcacgagctggaagcccatgtagagcattgcgactttggtccagccaggagacttcggtccaggggcggatgtgcctccgggctgggaggcggagaggtgccagcaagggggggttgtggccctacaccgagagccggaagaggcgggggtgccagaggcggcccccctggcggacggtgggggcgtggacggggacccggaccccgggtgttagcctggcgtagaagagagaaagccctgctggcccagctgtgggccctgcagggggaggtccagcttaccgcccgcagatatcaggaaaagttcacccagtacatggctcacgtacgcaacttcgtgggcgacttgggaggcggccatcgcagagatggagagcacaagccctttaccattgtactggaaagagaaaacgatacactgggtttcaatattattggcggacgtcccaatcagaataatcaagagggcaccagcacagagggaatctacgtgtcgaaaatactcgagaacggccctgccgatcgggccgatgggctggaaatacacgataaaattatggaagtgaacgggaaggacttatccaaagctactcacgaagaggctgtagaggctttccgcaatgcaaaagaacccatcgtagtgcaggtgcttagacgcactcccctctctcgccctgcgtatggcatggcaagcgaggtacagctaatgaacgctagtactcagactgacatcactttcgaacatatcatggcgttggctaaattgagaccaccgactccccccgtgccagatatctgtccattcctgctgtctgactcctgtcactcacttcatccaatggagcacgagttttacgaggataatgagtatattagttccctgcctgctgatgcagaccggactgaggattttgagtatgaggaagtggaactatgccgcgtgtcatcccaagaaaagctcggcctgacagtctgttacagaaccgacgatgaggaggataccggcatctatgtgtccgaagtagatcctaacagcatcgcagccaaagatggaaggatccgtgagggggatagaattttgcagattaatggtgaggacgtgcagaatcgtgaggaggctgtggctttactgagcaatgatgaatgcaagaggatagtgttgctcgtagctcgcccagagatccagctcgacgaggggtggttggaggacgagaggaatgaatttctcgaggaactgaatctggagatgttggaggaggaacataacgaagcgatgcagcccacagccaacgaggttgagcagccgaagaaacaggaggaagaggagggcacaaccgacaccgctactagtagcagcaataatcatgaaaaggactccggtgtggggaggactgacgaatccttacgaaacgatgagagctcagaacaggagaacgctgccgaggaccccaattccacctcacttaagtcaaaacgtgatctgggacagagtcaggataccttagggtctgttgaacttcagtacaacgaatcactggtgagcggcgaatacattgattcggattgcatcggaaatccagacgaggattgtgagagattcaggcagctgctggaattaaagtgtaaaattcgtaatcacggcgagtatgacctgtactacagttcctccactatcgagtgcaaccagggagaacaggagggggtcgaacatgaactccaactactgaacgaggaactgcggaacattgagttggaatgtcagaacattatgcaagcgcatagactgcagaaagttactgatcaatatggcgatatctggactctgcatgatggcgggttcaggaactacaatactagtatagatatgcagagggggaagcttgatgacatcatggagcacccagagaagtctgacaaagactccagctctgcctacaacacagccgaatcctgtcgttctacccccctgactgtggatcgatccccagactcgtccctcccaagggtgataaatttaactaataaaaagaatctcaggtctactatggcagctactcaatcatccagtggccaatcctcaaaggagtccaccagtacaaaggcgaagaccacagagcaggggtgttccgccgagtccaaggagaaagtgttggaggggtctaagctccccgatcaggaaaaggcagtgtccgagcacattccttacctcagtccatatcacagctcaagctacagatacgcaaatattcccgcccatgctagacattatcagtcctacatgcagctcattcagcagaagtcagccgttgagtacgcccagagccagctctctctcgtgtccatgtgcaaagagtctcaaaaatgctctgagcccaagatggagtggaaagtgaagatcaggtccgacggaacgaggtatattaccaaacgtccagtgcgggatagaattctgaaggagagagcgcttaaaatcaaagaagagcgatccggaatgaccaccgacgacgatacaatgagcgagatgaagatgggcaggtactggtccaaagaggagcggaaacagcatctggtgagggctaaagaacagcggcgccgaagagaattcatgatgaggtcaaggttagagtgtcttaaagaatctcctcagagcgggagcgaaggaaagaaggaaattaacatcatcgagctgtcccataagaagatgatgaaaaaaaggaataagaagattttagataactggatgacaatccaggaactgatgacgcatggagctaagtcgccagatgggaccagagttcataatgcgtttctgtccgtaactaccgtctag

SEQ ID NO: 63078 - DNA, 3111 bp, Artificial Sequence
  derived and/or modified sequence
atgggctttgccctggagagatttgctgaggccgtggaccctgccctggagtgcaagctgtgtggccaggtgctggaggagcccctgtgcaccccctgtggccacgtgttctgtgccagctgcctgctgccctgggccgtgagaagaagacgctgccccctgcagtgccagcccctggcccctggagagctgtacagagtgctgcccctgcggagcctcatccagaagctgcgggtgcagtgtgactaccgggcccggggctgcggccacagcgtgcggctgcacgagctggaggcccacgtggagcactgtgactttggacctgcccggcggctgcggagccggggcggctgtgccagcggcctgggcggcggggaggtgcctgcccggggcggctgcggccccacccccagggctggccggggcggcggggcccggggcggccccccaggcggccgctggggccggggccggggccctggcccccgggtgctggcctggaggagaagagagaaggccctgctggcccagctgtgggccctgcagggcgaggtgcagctgacagcccggcgctaccaggagaagttcacccagtacatggcccacgtgaggaactttgtgggggacctgggcggcggccacagaagagatggagagcacaagcccttcaccatcgtgctggagcgggagaatgacaccctgggcttcaacatcattggaggccggcccaaccagaacaaccaggagggcaccagcacagagggcatctacgtgtccaagatcctggagaatggacctgctgacagagcagatggcctggagatccatgacaagatcatggaggtgaatggcaaggacctgagcaaggccacccatgaggaggccgtggaggccttcagaaatgccaaggagcccatcgtggtgcaggtgctgcggaggacccccctgagcaggcctgcctacggcatggccagcgaggtgcagctgatgaatgccagcacccagacagacatcacctttgagcacatcatggccctggccaagctgcggccccccaccccacctgtgcctgacatctgccccttcctgctgagtgacagctgccacagcctgcaccccatggagcacgagttctatgaggacaatgagtacatcagcagcctgcctgcagatgctgacagaacagaggactttgaatatgaggaggtggagctgtgccgggtgagcagccaggagaagctgggcctgactgtgtgctacagaacagatgatgaggaggacaccggcatctacgtgtctgaggtggaccccaacagcattgctgccaaggatggccgcatccgggagggggaccgcatcctgcagatcaatggagaagatgtgcagaaccgggaggaggccgtggccctgctgagcaatgatgagtgcaagagaattgtgctgctggtggcccggcctgagatccagctggatgagggctggctggaggatgaaagaaatgagttcctggaggagctgaacctggagatgctggaggaggagcacaatgaggccatgcagcccacagccaatgaggtggagcagcccaagaagcaggaggaggaggagggcaccacagacacagccaccagcagcagcaacaaccacgagaaggacagcggcgtgggccgcacagatgagagcctgagaaatgatgagagcagcgagcaggagaatgctgctgaggaccccaacagcaccagcctgaagagcaagagggacctgggccagagccaggacaccctgggctctgtggagctgcagtacaatgaaagcctggtgtctggagagtacatcgacagcgactgcatcggcaacccagatgaggactgtgagcgcttccggcagctgctggagctgaagtgcaagatccggaaccacggggagtatgacctgtactacagcagcagcaccatcgagtgcaaccagggcgagcaggagggcgtggagcacgagctgcagctgctgaatgaggagctgaggaacatcgagctggagtgccagaacatcatgcaggcccaccggctgcagaaggtgacagaccagtacggggacatctggaccctgcatgatggcggcttcaggaactacaacaccagcattgacatgcagaggggcaagctggatgacatcatggagcaccctgagaagagtgacaaggacagcagcagcgcctacaacacagctgagagctgccgcagcacccccctgactgtggacaggagcccagacagcagcctgcccagggtcatcaacctgaccaacaagaagaacctgcggagcaccatggccgccacccagagcagcagcggccagagcagcaaggagagcaccagcaccaaggccaagaccacagagcagggctgcagcgctgagagcaaggagaaggtgctggagggcagcaagctgcctgaccaggagaaggctgtgtctgagcacatcccctacctgagcccctaccacagcagcagctaccgctatgccaacatcccagcccacgcccggcactaccagagctacatgcagctgatccagcagaagtctgctgtggagtatgcccagagccagctgagcctggtgtccatgtgcaaggagagccagaagtgcagcgagcccaagatggagtggaaggtgaagatccgcagtgatggcacccgctacatcaccaagaggcctgtgcgggaccgcatcctgaaggagcgggccctgaagatcaaggaggagaggagcggcatgaccacagatgatgacaccatgtctgagatgaagatgggccgctactggagcaaggaggagaggaagcagcacctggtgcgggccaaggagcagaggagaagaagagagttcatgatgaggagccggctggagtgcctgaaggagagcccccagagcggcagcgagggcaagaaggagatcaacatcatcgagctgagccacaagaagatgatgaagaagaggaacaagaagatcctggacaactggatgaccatccaggagctgatgacccacggggccaagagcccagatggcaccagggtgcacaatgccttcctgtctgtgaccaccgtgtag

SEQ ID NO: 63079 - DNA, 3111 bp, Artificial Sequence
  derived and/or modified sequence
atgggcttcgccctggagcggttcgccgaggccgtggaccccgccctagaatgtaagctttgtgggcaggtgctggaggaaccactctgcaccccttgcggacatgtcttctgtgcctcatgtctgctcccctgggccgtccggcggcggagatgcccactgcagtgtcagccattagcccctggcgagttgtatagagtgcttcccctacgcagccttatccaaaaactgagggtccagtgtgactaccgtgccaggggctgcggccactccgtgcggttgcatgagttggaagcccacgttgagcactgtgatttcggccctgcacgcaggctgcggtctaggggaggttgtgcatccggattgggggggggcgaagttccggcccgtggcggctgcgggccaactccacgcgccggtagaggtgggggagcacgcggaggaccacctgggggcagatggggccggggaagagggccggggcctcgagtactcgcctggcgaagaagggagaaagcactcttggcccagctatgggctctgcagggggaagtgcaactgacagcccgacgatatcaagagaagtttacccagtatatggctcacgttcgtaactttgtaggcgatcttggaggcggccataggcgcgacggggaacacaaacctttcactatcgtgctagagagagagaacgacaccctcggctttaatattattggaggacgcccgaaccaaaataatcaggagggcactagtacagaaggcatctacgtgagcaaaattttagagaacggcccagccgatagagccgatgggctggagatccacgacaagattatggaagtgaatggcaaggaccttagtaaggcaacacatgaagaagccgtagaagcttttcgaaatgccaaggaacccattgtcgttcaagttctgcggcgtaccccacttagtcggcccgcgtatggaatggcatccgaagtccaacttatgaacgcctccactcaaaccgatattacttttgaacacataatggctctggctaagcttcggcctccaactccccctgtgcccgacatctgtccctttttattgtccgactcatgtcatagcctgcaccccatggagcatgaattttatgaggataatgaatatatatcctccctacccgccgatgcagaccgcacagaagactttgaatatgaagaggtggaactgtgccgggtatcttctcaggaaaagctaggtcttaccgtttgttatcggacggatgatgaggaagacaccgggatctatgttagtgaggtcgacccaaacagtatcgcagctaaggatgggcggattagagaaggggatcgaatcctgcaaattaacggcgaggacgtccagaaccgggaagaagcagtagcccttctctctaacgatgagtgcaagaggatcgttctcctggtcgctaggcctgagattcagctcgacgagggctggctcgaagacgaaaggaacgagttccttgaagaacttaatctggagatgttggaggaggagcacaacgaagcaatgcagcccacagccaacgaggtggagcaacctaagaagcaggaagaggaagaaggcaccacagacacagctacttcttcaagcaacaatcacgagaaagatagcggcgtcgggcggacagatgaatccctgcggaatgatgagtcatccgaacaggaaaacgccgccgaggaccctaattccacctccctgaaatctaagcgagatctcggacaaagtcaggacacgctggggtcggtggaactgcagtacaacgagagcctggtcagtggagagtacatcgattccgactgtatcgggaacccagatgaggactgcgaacgattccgccagctgctggagttgaagtgcaagatccggaatcacggagagtacgacctgtactactccagtagtactattgaatgcaatcaaggggaacaggaaggcgtagagcacgagttgcagctgctcaatgaggagctgcgcaacattgagcttgagtgtcaaaacattatgcaagctcatcgacttcagaaagttactgaccagtacggagacatttggaccttgcacgatggcggcttccgcaattataatacctctatcgatatgcagcgtggtaagctggatgatatcatggaacaccctgagaagagcgataaggactcttcctctgcctataatacagcggagagctgcaggtccaccccactgaccgtggataggagccctgatagttcactgccacgagtgattaaccttaccaataaaaaaaatctgagatcaactatggcggctacccagtcttctagcggccaaagctctaaggagagtacttcaacgaaggctaaaaccaccgagcagggatgttctgccgagtctaaggaaaaggtgttggaggggtctaagctccccgatcaggaaaaggccgtgtccgagcacattccctacctcagcccttaccattcctcctcctaccgttatgccaatatcccagctcacgcgcgacattatcagagttatatgcagctcatacaacaaaagtcagcggtggagtatgcgcaatcccagctgagcctggtgtcgatgtgtaaggaatcccaaaaatgttcggagccgaagatggagtggaaagtgaagatccgcagcgacgggacaagatacatcaccaagcgaccagtgcgagaccgcattctcaaagaacgcgctctgaagatcaaggaagagcggagtggcatgacgaccgacgatgatacaatgagcgagatgaagatgggaagatattggtcaaaagaggagagaaaacagcaccttgtgcgcgctaaagagcaacgcagaaggagagaatttatgatgaggtcccgcctggaatgtttgaaggaaagtccccagtccggaagtgaaggcaagaaagaaataaacatcatcgagctgtctcataaaaagatgatgaagaagcgcaataagaaaattctggacaactggatgaccatccaggaactcatgactcacggggccaagagtcccgacggcacacgcgtacacaacgcgttcttgagcgtgaccactgtgtag

SEQ ID NO: 63080 - DNA, 3347 bp, Artificial Sequence
  derived and/or modified sequence
tccctaacatgggctttgccctggagcgcttcgcagaagccgtggacccggctctggagtgcaaactgtgcggccaggtgcttgaagagcccctgtgcacgccgtgcgggcacgtcttctgcgccagctgcctgttgccctgggcggtgcggaggcgccggtgcccgctgcagtgccagcccttggcgcccggcgagctgtaccgggtgctgccgctgcgcagcctcatccagaagctgcgagtccagtgcgactaccgcgcccgcggctgcggccactcggtcaggctgcacgagctggaggcgcacgtcgagcactgcgacttcggccctgcccgccggctccgcagccgcgggggctgcgcttcggggctgggcggtggtgaggtgcccgcgcgggggggctgcggtccgacacccagggctggccggggcgggggcgcgcgcggggggccgccgggcggccgctggggccgcgggcggggacccgggcctcgggtcctcgcctggaggcggcgcgagaaggcgctgctggcgcagctctgggcgctgcagggcgaggtgcagctcacggcgcgcaggtaccaggagaagttcacccaatacatggctcacgtccgcaacttcgtcggcgacctcggtggcggccaccgcagggatggagagcataagccattcactattgtgttagaaagagaaaatgacactttgggattcaatattataggaggtcgaccaaatcagaataatcaggaaggaacatcgactgaaggaatttacgtttcaaaaattttagaaaatggacctgctgacagagcagatggcctggagattcatgacaaaatcatggaggtcaatgggaaggatctttcaaaggccactcatgaagaggcagtggaagcttttcgcaatgccaaggagcccattgtggtgcaggtgttaaggcgaacacctcttagtagaccagcctatgggatggcttcagaagtgcagcttatgaatgccagcactcagacggacatcaccttcgaacacatcatggctctggccaagcttcgtccacctacccctccagtgccagacatctgtccattcctgctctcagacagctgccattctctacatccaatggagcatgaattttatgaggacaatgagtatatttccagcttgcctgctgatgcagacagaacagaagactttgaatatgaggaggtcgagttgtgtcgtgttagcagtcaagagaagctgggcctgacagtctgttaccgaacagatgatgaagaagacaccggcatttatgtcagcgaggttgacccaaatagcattgctgccaaagacggccggattcgagaaggggatcggattttgcaaataaatggggaagatgtccagaatcgagaagaagcagtggccttgctgtctaacgatgagtgtaagagaatcgtgctgcttgttgcaaggccagagattcagctggatgaaggctggctggaagatgaaaggaatgaattcttagaggagttaaacttggagatgttggaagaagagcataatgaagcaatgcagcccactgccaatgaggtggagcagccaaaaaagcaagaagaagaagaaggcacaacagacactgcaacatcctcatccaacaaccatgagaaggacagtggagtaggacgtacagatgaaagcttgcgaaatgatgagagctcagagcaggagaatgcagccgaggaccccaatagcacatctttgaagagcaagagagacctggggcagagccaagacactctgggaagtgttgaacttcagtacaatgagagcctcgtatctggtgaatacattgactcagactgcattggcaacccagatgaggactgtgaaagattcaggcagctcttggagctcaaatgcaagattcgaaatcatggagagtatgacctgtattactcaagcagcacaattgaatgcaatcaaggggagcaagagggagtggagcatgagctacagttgcttaatgaagaactgagaaacattgagcttgagtgtcagaatatcatgcaggctcacaggctccagaaagtgacagaccagtatggagacatctggacattgcatgatggaggattccggaattataacaccagcatagatatgcaaaggggaaagctagatgacatcatggagcatccagaaaagtctgacaaggacagttctagtgcttacaacacagctgagagctgcagaagtactccgctcactgtagaccgttcccctgacagttcccttccaagggtgatcaacctcaccaataagaaaaacctgagaagcacaatggcagccacccagtcctcttccggacagagcagtaaagagtcgacctccaccaaagccaaaaccactgagcaaggttgtagcgctgaaagcaaggagaaggttttagaaggcagcaagcttcctgatcaagagaaggcagtcagcgaacacatcccttacctctctccttaccacagctcctcatatagatatgcaaacatcccagcacacgcccggcattatcaaagctacatgcagttaattcaacagaaatctgcagtcgagtatgctcagagtcagctcagcttggtgagcatgtgcaaggagtctcagaagtgttcagagcccaagatggaatggaaggtgaaaattaggagcgacgggacacggtacatcacaaagagacccgtgcgagaccgaatcctgaaggaacgtgccttaaagatcaaggaagagcggagtggcatgaccacagacgatgacaccatgagcgagatgaaaatggggcgctactggagcaaagaggagagaaagcagcacctggttagggccaaagagcagcgccgtcgccgtgagttcatgatgcgaagcaggttagagtgtctcaaggagagccctcagagcggcagtgagggcaagaaggagatcaatatcattgaactgagtcacaaaaagatgatgaaaaagagaaacaagaaaattttggacaactggatgacaatccaagaactgatgacccatggggccaagtctccagatggcacgagagtccataatgccttcttgtcggtgaccactgtatgaccgaatgaatggaatgcatgcgactgattttaggaggatgctaccagtttcggtagagtatgattgcctcgttcaatgtggcgtttttatatatattttgtgactctttatagtttaaattttttgtaagcaaaaaatacctggtaatttttcatttgtttttcatatactggtaccttctttttggctgagatctttcttttacttgtgatatattcatattactcg

SEQ ID NO: 63081 - DNA, 3111 bp, Artificial Sequence
  derived and/or modified sequence
atgggctttgcccttgaaagattcgccgaggccgttgaccctgcactggaatgcaagctctgcggccaggttctggaggagcccttatgtacaccgtgtggtcacgtgttctgtgcctcatgcttgctcccatgggccgtgcgcagaaggcggtgcccactgcagtgtcaaccactggccccaggcgagctctatagggtgctgccacttaggtctctgatccaaaagctgagagtacaatgtgactatcgcgctcggggttgtgggcactcggtgcgtctgcatgaactagaggcccatgtagagcattgcgacttcggccctgccaggcggctaagatcccgaggtggatgtgctagcgggctaggaggcggtgaagttccagctcggggagggtgtggacccacccctcgtgcgggaagaggtggtggcgctagggggggaccaccgggagggagatggggcagagggagggggcctggcccacgggtcctggcctggcgccgtcgggagaaagcactgcttgcacaactttgggccctgcagggggaggtgcagctgacggccagaagatatcaagaaaagtttacacagtatatggcccatgtccgcaatttcgtcggtgacctcggcggaggtcatcgcagagatggggaacataaaccctttaccattgtgctggagagggaaaatgataccttaggctttaatataatcggcggaaggccaaaccagaacaaccaggagggcacgtctaccgaagggatttacgtctctaaaatcctggagaacgggccagctgatcgtgctgatgggctggagattcatgacaagattatggaagtcaatggtaaagatctgtccaaggctactcacgaagaggccgttgaagctttcagaaatgccaaagagcccattgtggtgcaggttttgcgcaggaccccgctgtcacggccagcctacggaatggcatctgaagtgcaactgatgaatgcttctacccagacggacattacttttgaacatattatggcccttgccaagttgaggccacccacaccccctgttccagacatatgtccattcttgcttagcgatagctgtcactcattacacccaatggagcatgaattttatgaggataacgagtatatttcttctctccctgctgacgcagacagaactgaagatttcgagtatgaggaggtggagctctgtagggtgtcttctcaggagaaactggggttgactgtttgctatcgcaccgacgacgaggaggacactggcatctatgtatctgaggtggatcccaattcaatcgccgcaaaagacggccgaatcagggagggggaccgaatcctgcaaattaatggcgaggatgtccagaaccgagaagaagcagtagcactgcttagtaatgatgagtgtaagagaattgtgctgctggtcgcccgaccagaaatccagctggacgagggatggctcgaagatgaaaggaatgaatttctagaggagttgaatctcgagatgctggaggaagagcacaacgaagccatgcagccaactgcgaatgaggttgagcaacccaaaaagcaggaagaggaggaaggtactacagacacagcgacctctagctcgaacaatcacgagaaagattcgggcgtgggacgaaccgacgaaagtctacgcaatgacgagagttctgaacaggaaaacgctgccgaagaccccaactcaacatcactgaagtcaaaacgcgacctggggcaatctcaagacactcttgggagtgtagaattgcaatataatgagagcctggtgagcggggagtacatcgacagtgattgcataggcaatccagacgaggattgtgaacggtttaggcagctgctcgagcttaaatgtaagatacggaaccacggagagtacgacctctattactcgagttcaacgatagagtgcaatcagggggagcaggagggagtcgagcatgagcttcagctcctaaacgaggagttgagaaacatcgaactcgaatgtcagaatattatgcaggctcaccgactccagaaagttactgaccagtatggtgatatctggaccctgcatgacggcggattcaggaactacaacactagtatcgacatgcaaagaggcaagcttgatgacatcatggaacatccagaaaagtcagacaaagatagctcctctgcctataacaccgccgaatcgtgtagatccacccccctcactgtcgatcgcagtccagattcgagcctacccagggtgatcaacctcacaaacaagaagaaccttcggtccacgatggctgccacccaatctagtagcggacagagcagcaaggagagtacatcaactaaggcaaagaccacagagcagggctgcagcgctgaatcaaaagaaaaggtgctcgagggctccaaattgccagatcaggagaaggctgtgtctgagcatattccttatctgtctccctatcatagcagcagttatagatacgccaatattcctgctcacgccagacattaccagagctatatgcaactgatccagcaaaagtcagctgtggaatatgctcaaagccaactcagtttggtgtcgatgtgcaaggagagccagaagtgttcagagcccaagatggagtggaaggtaaaaatcaggtctgatggaacccggtacatcaccaaacgacctgtgagagatagaatccttaaagaaagagccctcaaaattaaagaagaacgaagcgggatgacaacggacgacgacacaatgtccgaaatgaaaatgggacggtattggagcaaagaggaaagaaaacaacatttggttcgtgcgaaggagcagagaaggaggcgggaatttatgatgagaagccgtctagaatgcctgaaagagagcccccaaagcggttccgaaggcaagaaagaaatcaacatcattgagctgtcccacaagaagatgatgaaaaagcgtaataagaagattctggacaactggatgactattcaggagttaatgacacatggagccaagtcaccggatggaacaagggtccacaacgcgttcctatcagtaacgactgtgtag

SEQ ID NO: 63082 - DNA, 3111 bp, Artificial Sequence
  derived and/or modified sequence
atgggcttcgccctggagagattcgccgaggccgtggaccccgccctggagtgcaagctgtgcggccaggtgctggaggagcccctgtgcaccccctgcggccacgtgttctgcgccagctgcctgctgccctgggccgtgagaagaagaagatgccccctgcagtgccagcccctggcccccggcgagctgtacagagtgctgcccctgagaagcctgatccagaagctgagagtgcagtgcgactacagagccagaggctgcggccacagcgtgagactgcacgagctggaggcccacgtggagcactgcgacttcggccccgccagaagactgagaagcagaggcggctgcgccagcggcctgggcggcggcgaggtgcccgccagaggcggctgcggccccacccccagagccggcagaggcggcggcgccagaggcggcccccccggcggcagatggggcagaggcagaggccccggccccagagtgctggcctggagaagaagagagaaggccctgctggcccagctgtgggccctgcagggcgaggtgcagctgaccgccagaagataccaggagaagttcacccagtacatggcccacgtgagaaacttcgtgggcgacctgggcggcggccacagaagagacggcgagcacaagcccttcaccatcgtgctggagagagagaacgacaccctgggcttcaacatcatcggcggcagacccaaccagaacaaccaggagggcaccagcaccgagggcatctacgtgagcaagatcctggagaacggccccgccgacagagccgacggcctggagatccacgacaagatcatggaggtgaacggcaaggacctgagcaaggccacccacgaggaggccgtggaggccttcagaaacgccaaggagcccatcgtggtgcaggtgctgagaagaacccccctgagcagacccgcctacggcatggccagcgaggtgcagctgatgaacgccagcacccagaccgacatcaccttcgagcacatcatggccctggccaagctgagaccccccaccccccccgtgcccgacatctgccccttcctgctgagcgacagctgccacagcctgcaccccatggagcacgagttctacgaggacaacgagtacatcagcagcctgcccgccgacgccgacagaaccgaggacttcgagtacgaggaggtggagctgtgcagagtgagcagccaggagaagctgggcctgaccgtgtgctacagaaccgacgacgaggaggacaccggcatctacgtgagcgaggtggaccccaacagcatcgccgccaaggacggcagaatcagagagggcgacagaatcctgcagatcaacggcgaggacgtgcagaacagagaggaggccgtggccctgctgagcaacgacgagtgcaagagaatcgtgctgctggtggccagacccgagatccagctggacgagggctggctggaggacgagagaaacgagttcctggaggagctgaacctggagatgctggaggaggagcacaacgaggccatgcagcccaccgccaacgaggtggagcagcccaagaagcaggaggaggaggagggcaccaccgacaccgccaccagcagcagcaacaaccacgagaaggacagcggcgtgggcagaaccgacgagagcctgagaaacgacgagagcagcgagcaggagaacgccgccgaggaccccaacagcaccagcctgaagagcaagagagacctgggccagagccaggacaccctgggcagcgtggagctgcagtacaacgagagcctggtgagcggcgagtacatcgacagcgactgcatcggcaaccccgacgaggactgcgagagattcagacagctgctggagctgaagtgcaagatcagaaaccacggcgagtacgacctgtactacagcagcagcaccatcgagtgcaaccagggcgagcaggagggcgtggagcacgagctgcagctgctgaacgaggagctgagaaacatcgagctggagtgccagaacatcatgcaggcccacagactgcagaaggtgaccgaccagtacggcgacatctggaccctgcacgacggcggcttcagaaactacaacaccagcatcgacatgcagagaggcaagctggacgacatcatggagcaccccgagaagagcgacaaggacagcagcagcgcctacaacaccgccgagagctgcagaagcacccccctgaccgtggacagaagccccgacagcagcctgcccagagtgatcaacctgaccaacaagaagaacctgagaagcaccatggccgccacccagagcagcagcggccagagcagcaaggagagcaccagcaccaaggccaagaccaccgagcagggctgcagcgccgagagcaaggagaaggtgctggagggcagcaagctgcccgaccaggagaaggccgtgagcgagcacatcccctacctgagcccctaccacagcagcagctacagatacgccaacatccccgcccacgccagacactaccagagctacatgcagctgatccagcagaagagcgccgtggagtacgcccagagccagctgagcctggtgagcatgtgcaaggagagccagaagtgcagcgagcccaagatggagtggaaggtgaagatcagaagcgacggcaccagatacatcaccaagagacccgtgagagacagaatcctgaaggagagagccctgaagatcaaggaggagagaagcggcatgaccaccgacgacgacaccatgagcgagatgaagatgggcagatactggagcaaggaggagagaaagcagcacctggtgagagccaaggagcagagaagaagaagagagttcatgatgagaagcagactggagtgcctgaaggagagcccccagagcggcagcgagggcaagaaggagatcaacatcatcgagctgagccacaagaagatgatgaagaagagaaacaagaagatcctggacaactggatgaccatccaggagctgatgacccacggcgccaagagccccgacggcaccagagtgcacaacgccttcctgagcgtgaccaccgtgtag

SEQ ID NO: 63083 - protein, 74 aa, Artificial Sequence
  derived and/or modified sequence
  misc_feature (1)..(1): Xaa can be any naturally occurring amino acid
XWAEAARLVLENYSDAPMTPKQILQVIEAEGLKEMRSGTSPLACLNAMLHSNSRGGEGLFYKLPGRISLFTLKV

SEQ ID NO: 63084 - DNA, 225 bp, Artificial Sequence
  derived and/or modified sequence
taatgggcagaggcagcgagactcgtgcttgaaaactactcagatgcccctatgaccccaaaacagatcctgcaagtgattgaagcagaaggtcttaaggagatgcgctctgggactagccccttagcctgtctcaatgctatgctccactcgaattctaggggtggcgaggggctcttttataagctgcccggtcgcataagtcttttcacactgaaggtgtag

SEQ ID NO: 63085 - DNA, 258 bp, Artificial Sequence
  derived and/or modified sequence
atgaaagataaacagaaaaagaaaaaagagagaacttgggcagaggccgccagactcgtcttagagaactatagcgacgctcctatgactcccaagcaaatcctgcaggtgattgaggctgaaggtctgaaagaaatgaggtccggcacctcaccattagcatgtctcaatgctatgctgcactcgaactcaagaggcggagaagggcttttttacaagctccctgggcgaatatccctatttacacttaaggtatag

SEQ ID NO: 63086 - DNA, 255 bp, Artificial Sequence
  derived and/or modified sequence
atgaaggacaaacagaagaaaaagaaagagaggacctgggccgaggcagctagattggtcctcgaaaactattcagatgccccaatgactcctaagcagattctccaggtgatcgaggctgaggggctgaaggagatgtctgggacatcccccctggcttgtttaaatgcgatgctgcatagtaacagtcggggcggagaggggcttttttacaagctgcctggcagaatatcattgttcactctgaaacgttag

SEQ ID NO: 63087 - DNA, 284 bp, Artificial Sequence
  derived and/or modified sequence
gtgggccgaggccgcgcgcctggtattagaaaactactcggatgctccaatgacaccaaaacagattctgcaggtcatagaggcagaaggactaaaggaaatgagaagtgggacttcccctctcgcatgcctcaatgctatgctacattccaattcaagaggaggagaggggttgttttataaactgcctggccgaatcagccttttcacgctcaaggtgtgagccactgcaccaggccccttcatcttaattttaatatatctttgaataaacaccattgtat

SEQ ID NO: 63088 - DNA, 1068 bp, Artificial Sequence
  derived and/or modified sequence
cacacccacggcagacacgcacgcacccgggcgccgaagggaaagccgcgtctcgccctcccgccccgccgtcggtcctgtctcagtccctcagcagagcgggaaagcggaggccggagccgtgacctctgaccccgtggttatgcggagccgccgcattccttagcgatcgcggggcagccgccgctgccgccgtgggcgactgacgcagcgcgggcgcgtggagccgccgccgcccctcccccaccgccgctctcgcgccagccggtccccgcgtgcccgccccttctccccggccgcacccgagacctcgcgcgccgccgctgccacgcgccccccccaccgccgccgccgccccagccccgcgccaccgccccagcccgcccagcccggaggtcccgcgtggagctgccgccgccgccggggagaaggatgaaggacaaacagaagaagaagaaggagcgcacgtgggccgaggccgcgcgcctggtattagaaaactactcggatgctccaatgacaccaaaacagattctgcaggtcatagaggcagaaggactaaaggaaatgaggagtgggacttcccctctcgcatgcctcaatgctatgctacattccaattcaagaggaggagaggggttgttttataaactgcctggccgaatcagccttttcacgctcaaggtgtgagccactgcaccaggccccttcatcttaattttaatatatctttgaataaacaccattgtatgaacctgctgtaagcttgggagtggtctgttagtctacagcttgtgtctgagatgtgctaattgaatatttgctcagtacctcatcttaactgcctttggctttatgttgcttatccttcatagtatcttgttcattggccttttacatccataggcatcacttctctgatattcgttgtgctcttttaatggattaatggtttgcttggttggttcctctagttagactgtaaactccttgagagcagagtctgtattttattaattacccacagtactaggtacatagttgccttcaataaatatatatttaatg

SEQ ID NO: 63089 - DNA, 225 bp, Artificial Sequence
  derived and/or modified sequence
tgatgggccgaggccgcccggctggtgctggagaactacagtgatgcccccatgacccccaagcagatcctgcaggtgattgaagctgagggcctgaaggagatgaggagcggcaccagccccctggcctgcctgaatgccatgctgcacagcaacagcagaggaggagagggcctcttctacaagctgcccggccgcatcagcctcttcaccctgaaggtgtag

SEQ ID NO: 63090 - DNA, 258 bp, Artificial Sequence
  derived and/or modified sequence
atgaaggacaagcagaagaagaagaaggagaggacctgggccgaggccgcccggctggtgctggagaactacagtgatgcccccatgacccccaagcagatcctgcaggtgattgaggccgagggcctgaaggagatgaggagcggcaccagccccctggcctgcctgaatgccatgctgcacagcaacagccggggcggggagggcctcttctacaagctgcccggccgcatcagcctcttcaccctgaaggtgtag

SEQ ID NO: 63091 - DNA, 255 bp, Artificial Sequence
  derived and/or modified sequence
atgaaggacaagcagaagaagaagaaggagaggacctgggccgaggccgcccggctggtgctggagaactacagtgatgcccccatgacccccaagcagatcctgcaggtgattgaggccgagggcctgaaggagatgagcggcaccagccccctggcctgcctgaatgccatgctgcacagcaacagcagaggaggagagggcctcttctacaagctgcccggccgcatcagcctcttcaccctgaagaggtag

SEQ ID NO: 63092 - DNA, 225 bp, Artificial Sequence
  derived and/or modified sequence
tgatgggccgaggccgcccggctggtgctggagaactacagcgacgctcctatgacccccaaacagatcctccaggtgatcgaagcggaaggcttaaaggagatgcgctctggtacctctccactcgcctgcctaaatgcaatgcttcactcgaattctagagggggggaaggtttattctataaacttccaggaaggatttcactgttcacgctaaaggtctag

SEQ ID NO: 63093 - DNA, 258 bp, Artificial Sequence
  derived and/or modified sequence
atgaaggacaagcagaagaagaagaaggagcggacctgggccgaggctgccaggctggtcctggagaactattcagatgctcctatgactccaaagcagatactgcaagtcatagaagctgaaggactcaaagaaatgcgcagcggcacttcccctctggcatgtctgaatgccatgctgcatagcaattcgaggggcggcgaggggttattctacaagctgcctggtcgcattagcctgttcactctgaaggtgtag

SEQ ID NO: 63094 - DNA, 255 bp, Artificial Sequence
  derived and/or modified sequence
atgaaggacaagcagaagaagaagaaggagcggacctgggccgaggcggccaggctcgtacttgagaactattctgacgcacccatgacgccaaaacagattctgcaggtgatagaggccgagggcctcaaggagatgagcggcacatctcctctggcatgccttaacgccatgttgcactcaaactcacgtggcggagagggcctattctataaactgccgggccggatcagtctgttcacactcaagcgatag

SEQ ID NO: 63095 - DNA, 225 bp, Artificial Sequence
  derived and/or modified sequence
tgatgggcagaagcagccagacttgtgcttgagaattattctgatgctccgatgacacctaagcagattttacaggtcattgaagcggaaggattgaaggagatgcgttccgggacgagtcccctagcatgcctgaacgccatgctgcacagcaatagtagggggggagagggtctgttctataagctgccagggagaatcagtcttttcactctcaaggtgtag

SEQ ID NO: 63096 - DNA, 258 bp, Artificial Sequence
  derived and/or modified sequence
atgaaagataaacagaaaaagaagaaagagagaacttgggctgaggctgcacggttagtgctagaaaactattcggacgcaccgatgaccccgaagcagattctgcaggtcatcgaagctgagggcctaaaggaaatgcgatccggcacatcccctctggcctgtttaaatgccatgctgcattctaacagcagaggcggagaaggactgttctataaactccccggtaggatatcactgtttacacttaaggtgtag

SEQ ID NO: 63097 - DNA, 255 bp, Artificial Sequence
  derived and/or modified sequence
atgaaggacaagcagaagaagaaaaaagaacggacgtgggcagaggccgctagactggtcctggaaaactactctgacgcccctatgacccccaaacaaattcttcaggtgattgaggccgagggcctgaaggaaatgtctggtactagtccattagcctgcttgaatgctatgctccattccaacagtagaggcggagaaggccttttttacaaactgccaggcaggataagcctcttcaccctgaagcgatag

SEQ ID NO: 63098 - DNA, 225 bp, Artificial Sequence
  derived and/or modified sequence
tgatgggccgaggccgccagactggtgctggagaactacagcgacgcccccatgacccccaagcagatcctgcaggtgatcgaggccgagggcctgaaggagatgagaagcggcaccagccccctggcctgcctgaacgccatgctgcacagcaacagcagaggcggcgagggcctgttctacaagctgcccggcagaatcagcctgttcaccctgaaggtgtag

SEQ ID NO: 63099 - DNA, 258 bp, Artificial Sequence
  derived and/or modified sequence
atgaaggacaagcagaagaagaagaaggagagaacctgggccgaggccgccagactggtgctggagaactacagcgacgcccccatgacccccaagcagatcctgcaggtgatcgaggccgagggcctgaaggagatgagaagcggcaccagccccctggcctgcctgaacgccatgctgcacagcaacagcagaggcggcgagggcctgttctacaagctgcccggcagaatcagcctgttcaccctgaaggtgtag

SEQ ID NO: 63100 - DNA, 255 bp, Artificial Sequence
  derived and/or modified sequence
atgaaggacaagcagaagaagaagaaggagagaacctgggccgaggccgccagactggtgctggagaactacagcgacgcccccatgacccccaagcagatcctgcaggtgatcgaggccgagggcctgaaggagatgagcggcaccagccccctggcctgcctgaacgccatgctgcacagcaacagcagaggcggcgagggcctgttctacaagctgcccggcagaatcagcctgttcaccctgaagagatag

SEQ ID NO: 63101 - protein, 674 aa, Artificial Sequence
  derived and/or modified sequence
MKMAYNMTFFPNLMGHYDQSIAAVEMEHFLPLANLECSPNIETFLCKAFVPTCIEQIHVVPPCRKLCEKVYSDCKKLIDTFGIRWPEELECDRLQYCDETVPVTFDPHTEFLGPQKKTEQVQRDIGFWCPRHLKTSGGQGYKFLGIDQCAPPCPNMYFKSDELEFAKSFIGTVSIFCLCATLFTFLTFLIDVRRFRYPERPIIYYSVCYSIVSLMYFIGFLLGDSTACNKADEKLELGDTVVLGSQNKACTVLFMLLYFFTMAGTVWWVILTITWFLAAGRKWSCEAIEQKAVWFHAVAWGTPGFLTVMLLAMNKVEGDNISGVCFVGLYDLDASRYFVLLPLCLCVFVGLSLLLAGIISLNHVRQVIQHDGRNQEKLKKFMIRIGVFSGLYLVPLVTLLGCYVYEQVNRITWEITWVSDHCRQYHIPCPYQAKAKARPELALFMIKYLMTLIVGISAVFWVGSKKTCTEWAGFFKRNRKRDPISESRRVLQESCEFFLKHNSKVKHKKKHYKPSSHKLKVISKSMGTSTGATANHGTSAVAITSHDYLGQETLTEIQTSPETSMREVKADGASTPRLREQDCGEPASPAASISRLSGEQVDGKGQAGSVSESARSEGRISPKSDITDTGLAQSNNLQVPSSSEPSSLKGSTSLLVHPVSGVRKEQGGGCHSDT

SEQ ID NO: 63102 - protein, 651 aa, Artificial Sequence
  derived and/or modified sequence
MLAQHFLPLANLECSPNIETFLCKAFVPTCIEQIHVVPPCRKLCEKVYSDCKKLIDTFGIRWPEELECDRLQYCDETVPVTFDPHTEFLGPQKKTEQVQRDIGFWCPRHLKTSGGQGYKFLGIDQCAPPCPNMYFKSDELEFAKSFIGTVSIFCLCATLFTFLTFLIDVRRFRYPERPIIYYSVCYSIVSLMYFIGFLLGDSTACNKADEKLELGDTVVLGSQNKACTVLFMLLYFFTMAGTVWWVILTITWFLAAGRKWSCEAIEQKAVWFHAVAWGTPGFLTVMLLAMNKVEGDNISGVCFVGLYDLDASRYFVLLPLCLCVFVGLSLLLAGIISLNHVRQVIQHDGRNQEKLKKFMIRIGVFSGLYLVPLVTLLGCYVYEQVNRITWEITWVSDHCRQYHIPCPYQAKAKARPELALFMIKYLMTLIVGISAVFWVGSKKTCTEWAGFFKRNRKRDPISESRRVLQESCEFFLKHNSKVKHKKKHYKPSSHKLKVISKSMGTSTGATANHGTSAVAITSHDYLGQETLTEIQTSPETSMREVKADGASTPRLREQDCGEPASPAASISRLSGEQVDGKGQAGSVSESARSEGRISPKSDITDTGLAQSNNLQVPSSSEPSSLKGSTSLLVHPVSGVRKEQGGGCHSDT

SEQ ID NO: 63103 - DNA, 2721 bp, Artificial Sequence
  derived and/or modified sequence
agtcccggacgcaaccccggagccgtctcaggtccctggggtaattgacccaggactcattttcaggaaagcctgaaaatgagtaaaatagtgaaatgaggaatttgaacattttatctttggatggggatcttctgaggatgcaaagagtgattcatccaagccatgtggtaaaatcaggaatttgaagaaaatggaaatgtttacatttttgttgacgtgtatttttctacccctcctaagagggcacagtctcttcacctgtgaaccaattactgttcccagatgtatgaaaatggcctacaacatgacgtttttccctaatctgatgggtcattatgaccagagtattgccgcggtggaaatggagggtacccagactggttaagcagaaaaggaattgattataagagtagcaggtagctcatagaatcgccaggtgggctagaattcaagctcaggctgtaaggaaacatgctacagctaagatgctggcacagcattttcttcctctcgcaaatctggaatgttcaccaaacattgaaactttcctctgcaaagcatttgtaccaacctgcatagaacaaattcatgtggttccaccttgtcgtaaactttgtgagaaagtatattctgattgcaaaaaattaattgacacttttgggatccgatggcctgaggagcttgaatgtgacagattacaatactgtgatgagactgttcctgtaacttttgatccacacacagaatttcttggtcctcagaagaaaacagaacaagtccaaagagacattggattttggtgtccaaggcatcttaagacttctgggggacaaggatataagtttctgggaattgaccagtgtgcgcctccatgccccaacatgtattttaaaagtgatgagctagagtttgcaaaaagttttattggaacagtttcaatattttgtctttgtgcaactctgttcacattccttacttttttaattgatgttagaagattcagatacccagagagaccaattatatattactctgtctgttacagcattgtatctcttatgtacttcattggatttttgctaggcgatagcacagcctgcaataaggcagatgagaagctagaacttggtgacactgttgtcctaggctctcaaaataaggcttgcaccgttttgttcatgcttttgtattttttcacaatggctggcactgtgtggtgggtgattcttaccattacttggttcttagctgcaggaagaaaatggagttgtgaagccatcgagcaaaaagcagtgtggtttcatgctgttgcatggggaacaccaggtttcctgactgttatgcttcttgctatgaacaaagttgaaggagacaacattagtggagtttgctttgttggcctttatgacctggatgcttctcgctactttgtactcttgccactgtgcctttgtgtgtttgttgggctctctcttcttttagctggcattatttccttaaatcatgttcgacaagtcatacaacatgatggccggaaccaagaaaaactaaagaaatttatgattcgaattggagtcttcagcggcttgtatcttgtgccattagtgacacttctcggatgttacgtctatgagcaagtgaacaggattacctgggagataacttgggtctctgatcattgtcgtcagtaccatatcccatgtccttatcaggcaaaagcaaaagctcgaccagaattggctttatttatgataaaatacctgatgacattaattgttggcatctctgctgtcttctgggttggaagcaaaaagacatgcacagaatgggctgggttttttaaacgaaatcgcaagagagatccaatcagtgaaagtcgaagagtactacaggaatcatgtgagtttttcttaaagcacaattctaaagttaaacacaaaaagaagcactataaaccaagttcacacaagctgaaggtcatttccaaatccatgggaaccagcacaggagctacagcaaatcatggcacttctgcagtagcaattactagccatgattacctaggacaagaaactttgacagaaatccaaacctcaccagaaacatcaatgagagaggtgaaagcggacggagctagcacccccaggttaagagaacaggactgtggtgaacctgcctcgccagcagcatccatctccagactctctggggaacaggtcgacgggaagggccaggcaggcagtgtatctgaaagtgcgcggagtgaaggaaggattagtccaaagagtgatattactgacactggcctggcacagagcaacaatttgcaggtccccagttcttcagaaccaagcagcctcaaaggttccacatctctgcttgttcacccggtttcaggagtgagaaaagagcagggaggtggttgtcattcagatacttgaagaacattttctctcgttactcagaagcaaatttgtgttacactggaagtgacctatgcactgttttgtaagaatcactgttacattcttcttttgcacttaaagttgcattgcctactgttatactggaaaaaatagagttcaagaataatatgactcatttcacacaaaggttaatgacaacaatatacctgaaaacagaaaatgtgcaggttaataatatttttttaatagtgtgggaggacagagttagaggaatcttccttttctatttatg

SEQ ID NO: 63104 - DNA, 2025 bp, Artificial Sequence
  derived and/or modified sequence
atgaaaatggcatacaacatgacatttttccccaatttaatgggccactacgatcaaagcatcgccgcagtagagatggaacattttctccctttggcaaacttggagtgttctcccaacattgagactttcctttgcaaggcctttgtgcctacatgcatagaacagattcatgtggtcccgccttgcaggaagctctgtgaaaaagtgtacagtgactgcaagaaactcattgacactttcggcatccggtggccggaggaactggagtgtgacaggcttcagtactgcgatgaaacagtgcctgtgaccttcgacccccatacggagtttctggggcctcagaagaagaccgagcaggtgcaacgcgacattggattctggtgccctagacacctgaaaacaagtggcggccagggctacaaatttcttggcatagatcaatgcgcccccccctgtcctaacatgtatttcaagagtgacgagctcgagtttgccaaatcttttattggcaccgtcagcattttctgcctgtgtgccactctattcaccttcctgacctttctgatagatgttaggaggtttcgataccctgagcggcccatcatatattacagcgtgtgctactccattgtttcactcatgtattttattgggttcttgctgggcgacagtactgcttgtaacaaagccgacgagaagttggagctcggggatactgtcgtattgggaagtcaaaataaggcgtgtacagtattgtttatgttgctgtactttttcacaatggcaggcaccgtctggtgggtgattctgactattacttggtttctggcagctgggaggaaatggtcctgcgaggccattgagcaaaaagccgtttggtttcacgcagtagcatggggcactccagggtttttgaccgtgatgcttctagccatgaacaaggtggaaggcgataacatctctggcgtgtgtttcgtgggtctttacgatctggatgcctcgaggtactttgtgcttctcccgctgtgcctctgcgtctttgtgggcttgagtctcctccttgcagggatcataagtctgaaccatgttaggcaagtcatccagcatgacggccgcaatcaggaaaaacttaaaaaattcatgatacggatcggcgtatttagtggtctgtacctcgtccctctggttaccctgttggggtgctatgtctacgagcaggtgaataggataacatgggaaataacatgggtctctgatcattgtcggcagtaccacataccttgcccctatcaagcaaaagccaaagccaggccagaacttgccctttttatgatcaagtacctgatgacactgatcgtgggtatctccgccgttttttgggttggaagcaagaagacttgtacagagtgggccggattcttcaaaagaaatcggaaacgcgatcctatctcggagtccagacgggtactccaagaatcctgtgaattttttttgaagcataattctaaagtcaagcacaagaagaagcactataagcctagttcccataagctgaaggttataagcaagtccatgggtacatctacaggtgccacggccaaccacgggacttccgccgtagctattaccagtcacgattatttgggacaggaaacactcacagagatccagacctcccctgagacatctatgagggaggtgaaggccgacggtgctagcacccctcgcctgcgcgaacaggactgcggagagcccgcttcacccgcagcctcaatctcccgactgtccggagaacaggtcgatggtaagggacaggccggatctgtctcagaatcagccagatcagagggccgcatctcccccaagagtgatataacagacactggcctggctcagtcaaacaacctgcaggttccttcctctagcgagccgtcctccctgaagggctccacttccttgctggtccaccccgttagtggcgtaaggaaggagcaaggcggaggatgccattctgatacatag

SEQ ID NO: 63105 - DNA, 1956 bp, Artificial Sequence
  derived and/or modified sequence
atgctggcccagcatttcctgcctctggccaaccttgaatgttcccccaatatagagacattcctatgtaaggcttttgtccccacatgtattgagcaaatacacgttgtgcccccgtgcagaaagctttgcgaaaaagtctatagtgactgcaaaaaactcatcgataccttcggcatccggtggcccgaggaattggagtgcgacagactgcagtactgcgatgaaaccgtgccagtgacattcgacccacatacggagttccttggaccacaaaaaaaaaccgaacaggtgcaacgggatatcggtttttggtgccctcgtcacctgaagacgtctggtggacagggatataagtttttgggcattgaccagtgtgcacccccgtgtccaaacatgtacttcaagagcgacgagcttgaattcgccaagagctttatcggtaccgtctcaattttttgcctgtgtgcaaccctgtttacttttttgacgtttctgatcgacgtccggcgatttaggtatccagaacgtcctataatatactacagcgtgtgctatagcattgtgtcacttatgtactttatcggattcctgttaggggattccaccgcttgcaacaaagccgacgagaaactggagctaggagacactgtggtcctcggctcgcaaaataaagcctgcaccgtcctgtttatgctcctctacttttttaccatggcaggaaccgtttggtgggtgatcctaactattacctggttcttggcagccgggcgaaagtggtcttgcgaagcaatcgaacaaaaagccgtctggttccacgctgttgcatggggaacccctggcttcctgacagtcatgttattagccatgaacaaagtggaaggcgacaacatctctggtgtctgcttcgtcggtctgtacgatcttgatgcctcccggtattttgtgctgctccctttatgcctgtgtgtcttcgtagggttgtcgcttctcctcgccggtatcatcagcctgaaccatgttcgccaggtgatccaacacgacggacggaaccaagaaaagctcaagaagttcatgattaggatcggcgtgttcagcggcctgtatttagtgcctctagtcaccctcttaggctgttacgtctacgagcaggtgaacaggatcacttgggaaattacttgggtctctgaccactgtagacaataccacatcccttgtccgtatcaggccaaggcaaaggccaggcccgagttagcactctttatgataaaatacctgatgaccctgatcgttggaatatccgcagtgttctgggtgggaagcaagaagacgtgcaccgaatgggccggttttttcaagcgaaaccgcaagagagacccaatctctgagtcacgtagagtgctgcaggagtcttgtgagtttttcctcaaacataatagtaaagtgaagcacaagaagaagcattacaaacctagttctcataaactcaaagtaatctccaagtcaatgggtactagtaccggtgcaactgctaatcacgggacaagcgctgttgcaatcacctcccatgactatctcggccaggagacacttaccgagatccagacgtcaccagagacgtccatgagggaggttaaggccgatggcgctagcactccaaggctcagggaacaggattgtggagaaccagcctctccagctgccagcatctcacggctaagtggcgaacaggtggacggcaaaggccaagccgggtctgtaagtgagtctgcccgctctgagggaagaatctcacccaagagcgacatcacagatactggactggcccagagcaacaatctacaggtgcctagctcatcagagccctccagcttaaaaggtagcacttccctgctggtccatcccgtctctggtgtgcggaaagaacagggaggggggtgtcatagcgacacttag

SEQ ID NO: 63106 - DNA, 2025 bp, Artificial Sequence
  derived and/or modified sequence
atgaagatggcctacaacatgaccttcttccccaacctgatgggccactatgaccagagcattgctgctgtggagatggagcacttcctgcccctggccaacctggagtgcagccccaacatcgagaccttcctgtgcaaggcctttgtgcccacctgcatcgagcagatccacgtggtgcccccctgcaggaagctgtgtgagaaggtgtacagcgactgcaagaagctgattgacaccttcggcatccgctggccagaggagctggagtgtgaccggctgcagtactgtgatgagaccgtgcctgtgacctttgacccccacacagagttcctgggcccccagaagaagacagagcaggtgcagagggacatcggcttctggtgccccaggcacctgaagaccagcggcggccagggctacaagttcctgggcatcgaccagtgtgccccaccctgccccaacatgtacttcaagagtgatgagctggagtttgccaagagcttcatcggcaccgtgtccatcttctgcctgtgtgccaccctcttcaccttcctgaccttcctgattgatgtgcggcgcttccgctacccagagcggcccatcatctactacagcgtgtgctacagcatcgtgtccctgatgtacttcatcggcttcctgctgggggacagcacagcctgcaacaaggcagatgagaagctggagctgggggacacagtggtgctgggcagccagaacaaggcctgcaccgtgctcttcatgctgctgtacttcttcaccatggccggcaccgtgtggtgggtgatcctgaccatcacctggttcctggccgccggcaggaagtggagctgtgaggccatcgagcagaaggctgtgtggttccacgctgtggcctggggcaccccaggcttcctgactgtgatgctgctggccatgaacaaggtggagggggacaacatcagcggcgtgtgctttgtgggcctgtatgacctggatgccagccgctactttgtgctgctgcccctgtgcctgtgtgtgtttgtgggcctgagcctgctgctggccggcatcatcagcctgaaccacgtgcggcaggtgatccagcatgatggaagaaaccaggagaagctgaagaagttcatgatcagaattggagtcttcagcggcctgtacctggtgcccctggtgaccctgctgggctgctacgtgtatgagcaggtgaaccgcatcacctgggagatcacctgggtgtctgaccactgccggcagtaccacatcccctgcccctaccaggccaaggccaaggcccggcctgagctggccctcttcatgatcaagtacctgatgaccctgattgtgggcatctctgctgtgttctgggtgggcagcaagaagacctgcacagagtgggccggcttcttcaagaggaacaggaagagggaccccatcagcgagagccggcgggtgctgcaggagagctgtgagttcttcctgaagcacaacagcaaggtgaagcacaagaagaagcactacaagcccagcagccacaagctgaaggtgatcagcaagtccatgggcaccagcactggagccacagccaaccacggcaccagcgctgtggccatcaccagccatgactacctgggccaggagaccctgacagagatccagaccagccctgagacctccatgagggaggtgaaggcagatggagccagcaccccccggctgcgggagcaggactgtggggagcccgccagccctgctgccagcatcagccggctgtctggagagcaggtggatggcaagggccaggccggctctgtgtctgagagcgcccggtctgagggccgcatcagccccaagagtgacatcacagacaccggcctggcccagagcaacaacctgcaggtgcccagcagcagcgagcccagcagcctgaagggcagcaccagcctgctggtgcaccctgtgtctggagtgaggaaggagcagggcggcggctgccacagcgacacctag

SEQ ID NO: 63107 - DNA, 1956 bp, Artificial Sequence
  derived and/or modified sequence
atgctggcccagcacttcctgcccctggccaacctggagtgcagccccaacatcgagaccttcctgtgcaaggcctttgtgcccacctgcatcgagcagatccacgtggtgcccccctgcaggaagctgtgtgagaaggtgtacagcgactgcaagaagctgattgacaccttcggcatccgctggccagaggagctggagtgtgaccggctgcagtactgtgatgaaacagtgcctgtgacctttgacccccacacagagttcctgggcccccagaagaagacagagcaggtgcagagggacatcggcttctggtgccccaggcacctgaagaccagcggcggccagggctacaagttcctgggcatcgaccagtgtgccccaccctgccccaacatgtacttcaagagtgatgagctggagtttgccaagagcttcatcggcaccgtgtccatcttctgcctgtgtgccaccctcttcaccttcctgaccttcctgattgatgtgcggcgcttccgctacccagagcggcccatcatctactacagcgtgtgctacagcatcgtgtccctgatgtacttcatcggcttcctgctgggggacagcacagcctgcaacaaggcagatgagaagctggagctgggggacacagtggtgctgggcagccagaacaaggcctgcaccgtgctcttcatgctgctgtacttcttcaccatggccggcaccgtgtggtgggtgatcctgaccatcacctggttcctggccgccggcaggaagtggagctgtgaggccatcgagcagaaggctgtgtggttccacgctgtggcctggggcaccccaggcttcctgactgtgatgctgctggccatgaacaaggtggagggggacaacatctctggagtgtgctttgtgggcctgtatgacctggatgccagccgctactttgtgctgctgcccctgtgcctgtgtgtgtttgtgggcctgagcctgctgctggccggcatcatcagcctgaaccacgtgcggcaggtgatccagcatgatggcaggaaccaggagaagctgaagaagttcatgatccgcatcggggtcttcagcggcctgtacctggtgcccctggtgaccctgctgggctgctacgtgtatgagcaggtgaaccgcatcacctgggagatcacctgggtgtctgaccactgccggcagtaccacatcccctgcccctaccaggccaaggccaaggcccggcctgagctggccctcttcatgatcaagtacctgatgaccctcatcgtgggcatctctgctgtgttctgggtgggcagcaagaagacctgcacagagtgggccggcttcttcaagaggaacaggaagagggaccccatcagcgagagcagaagagtgctgcaggagagctgtgagttcttcctgaagcacaacagcaaggtgaagcacaagaagaagcactacaagcccagcagccacaagctgaaggtgatcagcaagtccatgggcaccagcactggagccacagccaaccacggcaccagcgctgtggccatcaccagccatgactacctgggccaggagaccctgacagagatccagaccagccctgagacctccatgagggaggtgaaggcagatggagccagcaccccccggctgcgggagcaggactgtggggagcccgccagccctgctgccagcatcagccggctgagcggggagcaggtggatggcaagggccaggccggctctgtgtctgagagcgcccggtctgagggccgcatcagccccaagagtgacatcacagacaccggcctggcccagagcaacaacctgcaggtgcccagcagcagcgagcccagcagcctgaagggcagcaccagcctgctggtgcaccctgtgtctggagtgaggaaggagcagggcggcggctgccacagcgacacctag

SEQ ID NO: 63108 - DNA, 2025 bp, Artificial Sequence
  derived and/or modified sequence
atgaagatggcctacaacatgaccttcttccccaacctgatgggccactatgatcagagcattgccgcagtcgagatggaacacttcttaccgctggcaaacctggaatgcagccccaacatagagacgttcctttgcaaagccttcgtacctacttgtatagagcagattcacgtggtccctccatgccggaagctctgtgaaaaggtgtattcagattgtaagaaactgatcgacacctttggcattcggtggcctgaggagttagagtgtgacaggctgcagtattgcgatgagaccgtgcccgtgactttcgaccctcacacagagtttctgggtcctcaaaagaagaccgagcaggtccaaagagatattgggttctggtgtcctagacacttaaaaacttcagggggccaagggtataagttcctgggaattgatcagtgcgcaccaccgtgtccaaacatgtactttaaatccgacgaactggagttcgcaaagagctttatcggaacagtatccattttttgtctctgtgccaccctgtttaccttcctcactttcctgattgatgtgcggcggttccgctatcccgagaggccgatcatctactactccgtgtgttattctattgtctccctcatgtacttcattggctttctcctgggcgattccactgcctgtaataaggcagacgagaaactggagctgggggataccgtggtcttgggctcgcagaataaagcttgcacagtgctgttcatgctgttatatttttttactatggctggaacagtgtggtgggtgatcctgactatcacctggttcctggccgccggcaggaaatggtcctgcgaggccatagagcagaaagcagtctggttccacgcagtggcctggggtaccccagggttccttaccgtgatgttgcttgccatgaacaaagtggagggtgataacatttccggagtgtgtttcgtgggactgtatgatctggatgctagcaggtactttgtgctgctgcctctgtgcctctgcgtctttgtcggtctgtctctcctactggccggaatcatctccctgaatcacgtgaggcaggtcatccagcatgatggtcgcaatcaggagaaacttaagaaatttatgatcagaatcggcgttttttctggcttgtatctggtgcccctcgtcaccttactcgggtgttatgtgtacgaacaggtaaataggattacctgggagattacatgggtgagtgaccattgccgtcagtaccatatcccatgcccctatcaggcaaaagctaaagcccgcccagaattggccctttttatgatcaaataccttatgacactgattgtggggataagcgctgtgttttgggtcggatcaaagaagacatgtaccgagtgggcaggattttttaaacgcaaccggaagcgggacccaatttcggagagccggcgcgtgctgcaggagtcctgcgagtttttcctgaaacataatagtaaggtaaagcacaagaagaaacactataagccctcctcacataagctgaaagttataagcaaatcaatggggacctcaaccggcgcaactgccaatcatggcacgagcgctgtggctattacctcacatgactaccttgggcaggagacactgactgaaatccaaactagccccgagactagtatgcgggaagtgaaggctgacggcgctagtactcctcgcctgcgcgaacaggattgcggagagccagcgagtccagccgcttcgatttcacgcctgtctggcgagcaggtggatggtaaaggccaggctggttccgtgtccgaatccgcccggtccgagggccgcatctcaccaaaaagcgacatcaccgatacaggacttgctcagagcaacaatctgcaagtgccgtccagctccgaaccctcctccctgaaaggaagtaccagccttctagtccaccccgtctcaggggttcgcaaagagcaggggggcggttgccacagcgacacttag

SEQ ID NO: 63109 - DNA, 1956 bp, Artificial Sequence
  derived and/or modified sequence
atgctggcccagcacttcctgcccctggccaacctggagtgcagcccaaacatcgaaaccttcctctgtaaagcattcgtgccaacatgtatagaacaaatccatgttgtgcctccctgccgaaagctttgcgaaaaggtatatagcgactgtaagaagctcatcgatacattcggaattagatggccggaagagctcgagtgcgataggctgcagtattgcgacgagactgtgcccgtgacattcgacccgcacactgagtttctcggtccacagaagaaaactgaacaagtgcagcgggatattggcttctggtgtccccgccatctgaaaacaagcgggggccagggctacaagttcttaggtatcgatcagtgtgcaccaccctgccctaatatgtattttaagagtgacgagctggagttcgccaagtcattcattggtacagtatctatcttctgcctatgcgcgactctgtttacctttcttacttttttgatcgacgtgaggcgctttcgatatccagagcgacccattatctattattctgtgtgctactccatcgtctctttaatgtatttcatagggtttctcctcggtgactcaacggcctgtaataaggctgacgagaaattggagctcggtgatactgtggttctgggatcccagaataaggcctgtacagtcctcttcatgctcctctacttcttcaccatggcaggaacagtatggtgggtgatcttgacaatcacttggttcctcgctgccgggaggaagtggtcctgtgaggccattgaacagaaggctgtgtggtttcatgccgtggcctggggaaccccaggttttctaactgtcatgctcctggccatgaacaaggtggagggcgacaacatatcgggagtgtgtttcgttggactgtacgatcttgacgcttctagatattttgtacttctacctctgtgtttatgcgttttcgttggactcagcctcctactagccggtattatcagtttaaatcacgtcaggcaggtgatccagcacgacgggcggaaccaagagaagctgaagaagttcatgatccgaataggggtttttagcggcctataccttgtccctctcgtgacactcttggggtgttacgtatacgagcaggtgaatcgaatcacctgggagattacttgggtttcagaccactgccgacaatatcacatcccttgtccctatcaggccaaagccaaggcaaggccggagttggcgctttttatgatcaagtatttgatgaccttaattgtggggatctccgctgtgttttgggtgggctcaaagaagacatgcacagagtgggctggctttttcaagcgaaaccggaagcgagacccaataagtgaatcgagacgcgtcctgcaggaaagctgcgaattttttttaaagcacaattctaaggtgaagcataagaagaagcattacaagcctagttctcacaagctaaaagtgatcagcaagagcatggggacttccacaggtgcaaccgcaaaccatggtaccagcgccgtggcaatcacctcccatgactatcttggccaggagaccctgaccgaaattcagacgtctcctgagaccagcatgcgggaagtgaaggcggacggtgctagtactccacgcctgagggaacaggattgcggcgaaccagccagtcctgctgcaagcatttctcggctctccggagagcaggtagacggtaaaggccaagctggatccgttagcgagagcgccaggtccgaaggccgcattagtccaaagagcgacatcaccgataccgggctcgcacagagtaacaacctgcaggtaccaagcagtagcgagccatcgagcctgaaaggttcgacgtccctgctcgtacaccccgtatccggcgtgcgaaaggaacagggcggcggctgccacagcgacacttag

SEQ ID NO: 63110 - DNA, 2025 bp, Artificial Sequence
  derived and/or modified sequence
atgaaaatggcatacaacatgacgttctttccaaatctgatggggcactacgaccaaagcatcgccgctgtggagatggaacacttcctccctcttgcaaacctggaatgtagccctaacatcgaaacattcctttgtaaagcttttgtacccacatgtatagaacaaatccacgtggtccctccttgcaggaagctgtgcgagaaggtgtactcagactgcaagaaacttattgatacatttggtatacgatggcctgaggagcttgaatgtgacagactgcagtattgtgacgaaacagtccccgtcaccttcgatccacacacggaatttctaggaccacagaagaagacagagcaggtgcagagagacatcgggttctggtgccctcggcacctgaagacgtcaggcggtcaaggatataaattcctagggattgaccaatgtgcacctccttgccccaacatgtacttcaagtctgatgaactggagttcgccaagagcttcatcggaactgtgtccattttttgcctgtgcgctaccctttttacattcttaacttttctgatagacgtacggcgatttcggtacccagagaggcccatcatatactattcagtgtgctacagcattgttagcttaatgtacttcattggattcctcttgggagactccactgcctgcaataaggctgatgagaagctggagttgggcgacaccgtggtcttagggtcacagaataaggcatgcaccgtgctctttatgctgctttatttcttcactatggccggaacagtgtggtgggtcatcctcactattacttggttcctggctgcaggaagaaagtggtcatgtgaagcaatcgaacagaaagccgtttggtttcatgctgtcgcctggggtacccccggatttctgaccgtgatgcttcttgcgatgaacaaagtagaaggcgataatatctctggggtctgcttcgtcggtttgtacgatctggacgcctcccggtatttcgtcctcctgcctctgtgcctttgcgtgttcgtcggcctttctctactcctggccggtatcataagcctgaaccatgttcgacaggtgatccagcacgacgggcgaaaccaggagaaattgaaaaaatttatgattcggataggagtttttagtgggctgtacctggtccccttggtcaccttgctgggatgctacgtctacgagcaggtaaaccggatcacttgggagatcacctgggtctctgaccactgccgccaataccatatcccatgtccctaccaggcgaaggcgaaagctcgcccagaattggccctattcatgattaagtatttaatgactttgatcgttggaatcagcgccgtcttctgggtgggctccaaaaaaacgtgtacggagtgggccggtttctttaagaggaatcgcaagcgggacccaataagtgagtcgaggcgtgtgctccaagagtcgtgtgaattctttctgaagcacaactccaaggttaaacataagaaaaagcattataagccatcttcccataaactcaaggtcattagtaaatctatgggcacgagtacaggagcaactgcaaatcatgggacatcagccgtagccatcacaagccatgactatttaggtcaggaaacccttacagagatccagacttcacctgaaacctccatgagagaggtaaaagctgacggagcaagcaccccacgcctgcgtgagcaggattgtggtgagccagcgagcccagccgcatcaattagcagactgtcaggtgaacaagtggatggcaagggtcaggctgggagtgtcagtgagagcgccaggtcagagggtaggataagtccaaaatctgatattactgacactgggcttgcccagtccaacaacttgcaggttccatcatcgagcgagccctcctctctgaaagggagtacatctcttcttgtgcacccagtgtcaggagtgcgcaaagaacagggcggaggatgccacagcgacacttag

SEQ ID NO: 63111 - DNA, 1956 bp, Artificial Sequence
  derived and/or modified sequence
atgctagcccagcactttctacctctggcgaatctggagtgctcccccaatattgaaacatttctgtgtaaggcttttgtgccaacatgcattgagcagattcacgtggtgcccccatgtcgaaagctctgtgagaaagtgtactcagattgtaaaaaactgattgatacattcggaatccgttggccagaggagctcgaatgcgaccgcttgcagtattgtgatgaaacagtgccagtaacctttgatcctcacacagaatttcttggcccacagaaaaaaacggagcaggtccaacgggacattgggttttggtgtcccaggcatctgaaaactagcggtgggcaaggttataaatttttgggtattgaccaatgcgctccaccttgccctaacatgtacttcaagtccgacgagctagagtttgctaaatccttcataggaacagtgagtattttctgtctgtgtgctaccttgtttacattcttaacatttttaatcgatgtcagacgctttagatacccagagcgccctatcatctattattccgtctgctacagtatagtgagcctcatgtactttatagggttcttgttaggagacagtaccgcgtgtaataaggctgacgagaaactggaactcggagatactgtggtcctgggctcacagaacaaagcctgcaccgtgcttttcatgctcctctattttttcacaatggccggaactgtttggtgggttatattgaccatcacctggttcctggcagccggtaggaagtggtcttgcgaagccattgagcaaaaagccgtctggtttcacgcggtagcatggggcactccaggctttttgactgtgatgctgttagcgatgaacaaggtcgagggggataatatttctggggtctgctttgtgggcctgtacgatctcgacgcgagcagatacttcgtactgctgcctctgtgcctgtgtgtgtttgttggcctgtcattattactcgctggtatcataagccttaatcatgttagacaggtgatccagcacgacggtcgcaatcaagagaaattgaagaagttcatgataagaatcggggtgttttctggcctttacctagtgccactagtgacgcttctcggctgctatgtttatgagcaagtcaatcgaatcacgtgggagatcacgtgggtgtcagatcattgcaggcagtaccacattccttgcccctaccaggctaaagcaaaggcaaggccagagctggccctgttcatgatcaagtaccttatgactctgattgttggcatttcagccgtcttctgggttggtagcaagaaaacttgtactgagtgggcaggctttttcaagaggaatcgcaaacgggatccaataagtgagtccagaagggtcttacaggaaagttgtgaattttttctgaagcataattcaaaggtcaaacataaaaaaaaacactataaaccctccagtcacaagctgaaagtgatatcaaaaagtatgggcacctcaacaggagccaccgcaaaccatggcacttccgctgtagccattacatcgcatgactatttgggtcaggagaccctgacagaaattcagaccagtcctgagactagtatgcgggaagtgaaggctgacggcgcttccacgccgcgattaagggagcaagattgcggagaaccggcttcaccggcagcctcaatctctcgcctttcgggcgaacaggtggacggtaagggccaggccggaagcgtgagtgaatcggcaaggtctgaaggcaggatcagtccaaaatcagacatcactgacaccggacttgcacaatccaacaacctccaggtaccgagctccagtgagcccagcagtttaaaaggctctactagcctgctggttcacccagtcagcggcgtgcggaaggaacagggcggtgggtgccacagcgatacctag

SEQ ID NO: 63112 - DNA, 2025 bp, Artificial Sequence
  derived and/or modified sequence
atgaagatggcctacaacatgaccttcttccccaacctgatgggccactacgaccagagcatcgccgccgtggagatggagcacttcctgcccctggccaacctggagtgcagccccaacatcgagaccttcctgtgcaaggccttcgtgcccacctgcatcgagcagatccacgtggtgcccccctgcagaaagctgtgcgagaaggtgtacagcgactgcaagaagctgatcgacaccttcggcatcagatggcccgaggagctggagtgcgacagactgcagtactgcgacgagaccgtgcccgtgaccttcgacccccacaccgagttcctgggcccccagaagaagaccgagcaggtgcagagagacatcggcttctggtgccccagacacctgaagaccagcggcggccagggctacaagttcctgggcatcgaccagtgcgcccccccctgccccaacatgtacttcaagagcgacgagctggagttcgccaagagcttcatcggcaccgtgagcatcttctgcctgtgcgccaccctgttcaccttcctgaccttcctgatcgacgtgagaagattcagataccccgagagacccatcatctactacagcgtgtgctacagcatcgtgagcctgatgtacttcatcggcttcctgctgggcgacagcaccgcctgcaacaaggccgacgagaagctggagctgggcgacaccgtggtgctgggcagccagaacaaggcctgcaccgtgctgttcatgctgctgtacttcttcaccatggccggcaccgtgtggtgggtgatcctgaccatcacctggttcctggccgccggcagaaagtggagctgcgaggccatcgagcagaaggccgtgtggttccacgccgtggcctggggcacccccggcttcctgaccgtgatgctgctggccatgaacaaggtggagggcgacaacatcagcggcgtgtgcttcgtgggcctgtacgacctggacgccagcagatacttcgtgctgctgcccctgtgcctgtgcgtgttcgtgggcctgagcctgctgctggccggcatcatcagcctgaaccacgtgagacaggtgatccagcacgacggcagaaaccaggagaagctgaagaagttcatgatcagaatcggcgtgttcagcggcctgtacctggtgcccctggtgaccctgctgggctgctacgtgtacgagcaggtgaacagaatcacctgggagatcacctgggtgagcgaccactgcagacagtaccacatcccctgcccctaccaggccaaggccaaggccagacccgagctggccctgttcatgatcaagtacctgatgaccctgatcgtgggcatcagcgccgtgttctgggtgggcagcaagaagacctgcaccgagtgggccggcttcttcaagagaaacagaaagagagaccccatcagcgagagcagaagagtgctgcaggagagctgcgagttcttcctgaagcacaacagcaaggtgaagcacaagaagaagcactacaagcccagcagccacaagctgaaggtgatcagcaagagcatgggcaccagcaccggcgccaccgccaaccacggcaccagcgccgtggccatcaccagccacgactacctgggccaggagaccctgaccgagatccagaccagccccgagaccagcatgagagaggtgaaggccgacggcgccagcacccccagactgagagagcaggactgcggcgagcccgccagccccgccgccagcatcagcagactgagcggcgagcaggtggacggcaagggccaggccggcagcgtgagcgagagcgccagaagcgagggcagaatcagccccaagagcgacatcaccgacaccggcctggcccagagcaacaacctgcaggtgcccagcagcagcgagcccagcagcctgaagggcagcaccagcctgctggtgcaccccgtgagcggcgtgagaaaggagcagggcggcggctgccacagcgacacctag

SEQ ID NO: 63113 - DNA, 1956 bp, Artificial Sequence
  derived and/or modified sequence
atgctggcccagcacttcctgcccctggccaacctggagtgcagccccaacatcgagaccttcctgtgcaaggccttcgtgcccacctgcatcgagcagatccacgtggtgcccccctgcagaaagctgtgcgagaaggtgtacagcgactgcaagaagctgatcgacaccttcggcatcagatggcccgaggagctggagtgcgacagactgcagtactgcgacgagaccgtgcccgtgaccttcgacccccacaccgagttcctgggcccccagaagaagaccgagcaggtgcagagagacatcggcttctggtgccccagacacctgaagaccagcggcggccagggctacaagttcctgggcatcgaccagtgcgcccccccctgccccaacatgtacttcaagagcgacgagctggagttcgccaagagcttcatcggcaccgtgagcatcttctgcctgtgcgccaccctgttcaccttcctgaccttcctgatcgacgtgagaagattcagataccccgagagacccatcatctactacagcgtgtgctacagcatcgtgagcctgatgtacttcatcggcttcctgctgggcgacagcaccgcctgcaacaaggccgacgagaagctggagctgggcgacaccgtggtgctgggcagccagaacaaggcctgcaccgtgctgttcatgctgctgtacttcttcaccatggccggcaccgtgtggtgggtgatcctgaccatcacctggttcctggccgccggcagaaagtggagctgcgaggccatcgagcagaaggccgtgtggttccacgccgtggcctggggcacccccggcttcctgaccgtgatgctgctggccatgaacaaggtggagggcgacaacatcagcggcgtgtgcttcgtgggcctgtacgacctggacgccagcagatacttcgtgctgctgcccctgtgcctgtgcgtgttcgtgggcctgagcctgctgctggccggcatcatcagcctgaaccacgtgagacaggtgatccagcacgacggcagaaaccaggagaagctgaagaagttcatgatcagaatcggcgtgttcagcggcctgtacctggtgcccctggtgaccctgctgggctgctacgtgtacgagcaggtgaacagaatcacctgggagatcacctgggtgagcgaccactgcagacagtaccacatcccctgcccctaccaggccaaggccaaggccagacccgagctggccctgttcatgatcaagtacctgatgaccctgatcgtgggcatcagcgccgtgttctgggtgggcagcaagaagacctgcaccgagtgggccggcttcttcaagagaaacagaaagagagaccccatcagcgagagcagaagagtgctgcaggagagctgcgagttcttcctgaagcacaacagcaaggtgaagcacaagaagaagcactacaagcccagcagccacaagctgaaggtgatcagcaagagcatgggcaccagcaccggcgccaccgccaaccacggcaccagcgccgtggccatcaccagccacgactacctgggccaggagaccctgaccgagatccagaccagccccgagaccagcatgagagaggtgaaggccgacggcgccagcacccccagactgagagagcaggactgcggcgagcccgccagccccgccgccagcatcagcagactgagcggcgagcaggtggacggcaagggccaggccggcagcgtgagcgagagcgccagaagcgagggcagaatcagccccaagagcgacatcaccgacaccggcctggcccagagcaacaacctgcaggtgcccagcagcagcgagcccagcagcctgaagggcagcaccagcctgctggtgcaccccgtgagcggcgtgagaaaggagcagggcggcggctgccacagcgacacctag

SEQ ID NO: 63114 - protein, 603 aa, Artificial Sequence
  derived and/or modified sequence
MAGTVRTACLVVAMLLSLDFPGQAQPPPPPPDATCHQVRSFFQRLQPGLKWVPETPVPGSDLQVCLPKGPTCCSRKMEEKYQLTARLNMEQLLQSASMELKFLIIQNAAVFQEAFEIVVRHAKNYTNAMFKNNYPSLTPQAFEFVGEFFTDVSLYILGSDINVDDMVNELFDSLFPVIYTQLMNPGLPDSALDINECLRGARRDLKVFGNFPKLIMTQVSKSLQVTRIFLQALNLGIEVINTTDHLKFSKDCGRMLTRMWYCSYCQGLMMVKPCGGYCNVVMQGCMAGVVEIDKYWREYILSLEELVNGMYRIYDMENVLLGLFSTIHDSIQYVQKNAGKLTTTETEKKIWHFKYPIFFLCIGLDLQIGKLCAHSQQRQYRSAYYPEDLFIDKKVLKVAHVEHEETLSSRRRELIQKLKSFISFYSALPGYICSHSPVAENDTLCWNGQELVERYSQKAARNGMKNQFNLHELKMKGPEPVVSQIIDKLKHINQLLRTMSMPKGRVLDKNLDEEGFESGDCGDDEDECIGGSGDGMIKVKNQLRFLAELAYDLDVDDAPGNSQQATPKDNEISTFHNLGNVHSPLKLLTSMAISVVCFFFLVH

SEQ ID NO: 63115 - DNA, 1812 bp, Artificial Sequence
  derived and/or modified sequence
atggcgggcactgtgagaacagcgtgtcttgtcgttgctatgttattgagccttgactttccagggcaagcccagcccccgccacctccacctgatgccacttgccaccaagtccgctcttttttccaaagactgcagcctggtctcaagtgggtcccagaaacaccagtgccggggagtgacctgcaggtatgcctgcctaagggcccaacctgctgctcacggaagatggaagaaaaatatcagcttaccgcccggcttaatatggagcagctgctccaatctgccagtatggagttgaaattcctcataatacaaaatgccgcagtatttcaagaggcttttgagatcgtagtaagacatgctaaaaactacaccaacgctatgttcaagaacaattacccttctctgactcctcaggcattcgaatttgtcggcgaatttttcaccgatgtgagtctttacatcctggggtccgatataaatgtggacgacatggtcaatgagctgttcgactcactctttcctgtgatttatacccagttaatgaatccagggttgccagattcggccctcgacataaacgagtgtctgaggggagcccgtcgcgacctgaaggtgtttgggaacttcccaaaacttattatgacccaggtgagcaaaagtctccaagttactcgcatatttctgcaggctctcaacttaggcatcgaggtgattaatacaacagaccacctaaagttctccaaggactgtggccgtatgctaactcgcatgtggtactgttcttattgccaggggctcatgatggtgaagccctgcggcgggtactgtaatgtggttatgcagggctgtatggcaggcgtcgtggaaattgataagtactggcgtgaatatatactgagtctcgaggaactggtgaatggtatgtatagaatctatgacatggagaacgttttattggggctcttcagcacgatccacgactctatccagtatgtgcagaagaacgcaggtaaactgacaactacagagaccgagaagaagatctggcactttaaatacccaatattttttctatgtatcggcctggatctacaaattggaaaactctgtgcccattcccagcagagacagtaccgcagtgcctattatcccgaggatctctttatcgacaagaaggtgctcaaagtagcccatgtcgagcatgaagaaaccctctcaagccggcgaagggaactgattcaaaagcttaagtcttttattagtttctattcagcccttcctggctatatctgctcacactcccctgtggcggaaaacgacactctttgttggaatggacaggagcttgttgagcgctacagtcagaaggcagcccgtaacgggatgaaaaatcaatttaatctgcatgaactaaaaatgaagggacccgagcctgtggtttcacagattatagacaagttaaagcacattaatcagctgctccgcacaatgtcaatgccgaaggggcgggtccttgataagaacttggacgaggagggcttcgaatctggtgattgcggggatgacgaagatgagtgcataggcggaagtggagacggcatgataaaagtcaagaatcagctgcgattcctagccgagctcgcgtacgatttagatgtggacgacgccccaggaaacagccagcaagctactcctaaggacaatgagattagcacctttcacaatctgggaaatgtacactcgccactcaaacttctgacttcgatggccatatctgttgtgtgtttctttttcctcgtccactag

SEQ ID NO: 63116 - DNA, 2379 bp, Artificial Sequence
  derived and/or modified sequence
agccccgccctgccccgcgccgccaagcggttcccgccctcgcccagcgcccaggtagctgcgaggaaacttttgcagcggctgggtagcagcacgtctcttgctcctcagggccactgccaggcttgccgagtcctgggactgctctcgctccggctgccactctcccgcgctctcctagctccctgcgaagcaggatggccgggaccgtgcgcaccgcgtgcttggtggtggcgatgctgctcagcttggacttcccgggacaggcgcagcccccgccgccgccgccggacgccacctgtcaccaagtccgctccttcttccagagactgcagcccggactcaagtgggtgccagaaactcccgtgccaggatcagatttgcaagtatgtctccctaagggcccaacatgctgctcaagaaagatggaagaaaaataccaactaacagcacgattgaacatggaacagctgcttcagtctgcaagtatggagctcaagttcttaattattcagaatgctgcggttttccaagaggcctttgaaattgttgttcgccatgccaagaactacaccaatgccatgttcaagaacaactacccaagcctgactccacaagcttttgagtttgtgggtgaatttttcacagatgtgtctctctacatcttgggttctgacatcaatgtagatgacatggtcaatgaattgtttgacagcctgtttccagtcatctatacccagctaatgaacccaggcctgcctgattcagccttggacatcaatgagtgcctccgaggagcaagacgtgacctgaaagtatttgggaatttccccaagcttattatgacccaggtttccaagtcactgcaagtcactaggatcttccttcaggctctgaatcttggaattgaagtgatcaacacaactgatcacctgaagttcagtaaggactgtggccgaatgctcaccagaatgtggtactgctcttactgccagggactgatgatggttaaaccctgtggcggttactgcaatgtggtcatgcaaggctgtatggcaggtgtggtggagattgacaagtactggagagaatacattctgtcccttgaagaacttgtgaatggcatgtacagaatctatgacatggagaacgtactgcttggtctcttttcaacaatccatgattctatccagtatgtccagaagaatgcaggaaagctgaccaccactgaaactgagaagaaaatatggcacttcaaatatcctatcttcttcctgtgtatagggctagacttacagattggcaagttatgtgcccattctcaacaacgccaatatagatctgcttattatcctgaagatctctttattgacaagaaagtattaaaagttgctcatgtagaacatgaagaaaccttatccagccgaagaagggaactaattcagaagttgaagtctttcatcagcttctatagtgctttgcctggctacatctgcagccatagccctgtggcggaaaacgacaccctttgctggaatggacaagaactcgtggagagatacagccaaaaggcagcaaggaatggaatgaaaaaccagttcaatctccatgagctgaaaatgaagggccctgagccagtggtcagtcaaattattgacaaactgaagcacattaaccagctcctgagaaccatgtctatgcccaaaggtagagttctggataaaaacctggatgaggaagggtttgaaagtggagactgcggtgatgatgaagatgagtgcattggaggctctggtgatggaatgataaaagtgaagaatcagctccgcttccttgcagaactggcctatgatctggatgtggatgatgcgcctggaaacagtcagcaggcaactccgaaggacaacgagataagcacctttcacaacctcgggaacgttcattccccgctgaagcttctcaccagcatggccatctcggtggtgtgcttcttcttcctggtgcactgactgcctggtgcccagcacatgtgctgccctacagcaccctgtggtcttcctcgataaagggaaccactttcttatttttttctatttttttttttttgttatcctgtatacctcctccagccatgaagtagaggactaaccatgtgttatgttttcgaaaatcaaatggtatcttttggaggaagatacattttagtggtagcatatagattgtccttttgcaaagaaagaaaaaaaaccatcaagttgtgccaaattattctcctatgtttggctgctagaacatggttaccatgtctttctctctcactccctccctttctatcgttctctctttgcatggatttctttgaaaaaaaataaattgctc

SEQ ID NO: 63117 - DNA, 1812 bp, Artificial Sequence
  derived and/or modified sequence
atggccggcaccgtgaggacagcctgcctggtggtggccatgctgctgagcctggacttccctggccaggcccagcccccacctcctcctccagatgccacctgccaccaggtgcgctccttcttccagaggctgcagcccggcctgaagtgggtgcctgagacccctgtgcccggcagtgacctgcaggtgtgcctgcccaagggccccacctgctgcagcaggaagatggaggagaagtaccagctgacagcccggctgaacatggagcagctgctgcagagcgcctccatggagctgaagttcctgatcatccagaatgctgctgtgttccaggaggcctttgaaattgtggtgagacatgccaagaactacaccaatgccatgttcaagaacaactaccccagcctgaccccccaggcctttgaatttgtgggggagttcttcacagatgtgtccctgtacatcctgggcagtgacatcaacgtggatgacatggtgaatgagctgtttgacagcctcttccctgtgatctacacccagctgatgaaccctggcctgcctgacagcgccctggacatcaatgaatgtctgcggggggcccggcgggacctgaaggtgtttggaaacttccccaagctgatcatgacccaggtgtccaagagcctgcaggtgacccgcatcttcctgcaggccctgaacctgggcattgaagtcatcaacaccacagaccacctgaagttcagcaaggactgtggccgcatgctgaccaggatgtggtactgcagctactgccagggcctgatgatggtgaagccctgtggcggctactgcaatgtggtgatgcagggctgcatggccggcgtggtggagattgacaagtactggagggagtacatcctgagcctggaggagctggtgaatggcatgtaccgcatctatgacatggagaatgtgctgctgggcctcttcagcaccatccatgacagcatccagtatgtgcagaagaatgctgggaagctgaccaccacagaaacagagaagaagatctggcacttcaagtaccccatcttcttcctgtgcatcggcctggacctgcagatcggcaagctgtgtgcccacagccagcagaggcagtaccgcagcgcctactacccagaagatctcttcatcgacaagaaggtgctgaaggtggcccacgtggagcacgaggagaccctgagcagcagaagaagagagctgatccagaagctgaagagcttcatctccttctacagcgccctgcccggctacatctgcagccacagccctgtggccgagaatgacaccctgtgctggaatggccaggagctggtggagcgctacagccagaaggccgccagaaatggcatgaagaaccagttcaacctgcacgagctgaagatgaagggccctgagcctgtggtgtcccagatcatcgacaagctgaagcacatcaaccagctgctgcggaccatgtccatgcccaagggccgggtgctggacaagaacctggatgaggagggctttgagagcggggactgtggagatgatgaagatgaatgtattggaggcagcggagatggcatgatcaaggtgaagaaccagctgcgcttcctggccgagctggcctatgacctggatgtggatgatgcccctggcaacagccagcaggccacccccaaggacaatgagatcagcaccttccacaacctgggcaatgtgcacagccccctgaagctgctgacctccatggccatctctgtggtgtgcttcttcttcctggtgcactag

SEQ ID NO: 63118 - DNA, 1812 bp, Artificial Sequence
  derived and/or modified sequence
atggccggcaccgtgcggaccgcctgcctggtggtggccatgctgctctccctggattttccgggacaggcccagcctccgcctcccccacccgacgccacctgccaccaggtcagatcattcttccagcgactgcagccgggccttaagtgggtgcccgaaactccagtgccaggaagcgatttacaggtgtgccttcctaaaggacccacgtgctgctctcggaagatggaggagaagtatcaactgaccgctaggctaaatatggagcagctgctccagtccgcctctatggagctgaagtttttgattatccagaacgctgcagtgttccaggaagcctttgagattgtcgtacgtcacgccaagaattataccaacgcaatgtttaagaataattacccttcccttacacctcaggccttcgagtttgttggagagtttttcactgatgtttcattgtatatccttggttctgacataaatgttgacgatatggttaatgaactctttgactccctatttcccgtcatttatacgcagttgatgaatccaggactgccagatagtgcacttgacatcaacgagtgtctgcgaggagcccgcagagacctaaaggtgtttggaaatttcccaaaattgataatgacacaggttagcaaatctttgcaggtgactagaatcttcttgcaggccttaaacctggggatcgaagtgatcaacaccaccgatcaccttaagttctctaaggactgcggaaggatgcttacacggatgtggtactgttcttattgccaagggctgatgatggtaaaaccctgtggaggctattgtaacgtcgtcatgcaaggatgcatggcgggggtggtcgagatcgataaatactggcgcgagtacatattgtcccttgaagagttagtgaatggtatgtaccggatatatgatatggagaacgtcctgctcgggttattctccacaatccacgactctattcaatacgtccaaaagaacgctggcaagttgaccaccacggaaactgagaaaaaaatctggcactttaaatacccaatcttttttctctgtattggtctggaccttcaaattggaaaactgtgtgcccattcacagcagcggcagtatcgctctgcgtactaccctgaggacctgttcattgataaaaaagtgctaaaggtggcgcacgttgagcacgaggaaactctatcctcccggcgtcgcgagttaattcagaaactgaagtcttttatttccttctattctgccctcccggggtacatttgtagtcattcaccggttgccgagaatgacacgctatgctggaatggtcaagagctcgtggagaggtatagtcagaaagcagctcggaacgggatgaaaaatcaattcaacctccacgagctgaaaatgaagggacctgagcccgtggtgagccaaataatagataaactaaagcacatcaaccaacttttgcggaccatgtctatgcccaagggacgggtactggacaaaaaccttgatgaagagggtttcgagtcgggagactgtggcgacgacgaggacgagtgtatcggaggatccggagacggcatgatcaaggtcaagaatcagctgagattcctcgcagaactggcatacgatctggatgtggacgacgcaccgggtaactcccagcaggccactcctaaagacaacgagattagcacctttcataacctgggcaacgtgcactcaccactgaagttgctgacctcaatggccatctccgtggtctgtttcttcttcctagtacattag

SEQ ID NO: 63119 - DNA, 1812 bp, Artificial Sequence
  derived and/or modified sequence
atggccggtactgtgcggacagcatgcctcgtggtggctatgctcctatcacttgattttccgggtcaggcacagccccctccccctccacccgacgctacctgtcatcaggtcaggtccttcttccagcgcttgcagccgggactgaaatgggtgcccgagacgccagtcccgggttctgatttgcaggtgtgcctccctaaaggccctacttgctgcagtagaaagatggaggagaagtatcagctgactgctcgactgaacatggagcagctcctgcaatcagccagcatggagctaaaatttcttataatacagaatgccgctgtgtttcaggaagcctttgagatagttgttaggcatgcaaaaaattatactaacgctatgttcaagaataattatccctcactgacgcctcaagcatttgagtttgtgggcgaattctttactgatgtcagtctgtacatcctcggcagcgacatcaacgtggatgacatggttaacgagctgttcgactctctgtttcctgtgatctatactcagttgatgaatcctggccttcctgattccgctctcgatatcaatgagtgcctaaggggcgctcggagagatctcaaggtattcggcaatttccctaagctgatcatgacccaggtttcaaagtcacttcaggtcactagaattttcttacaagccctgaacctggggatagaggtgattaacacaaccgatcacctgaagttttccaaagattgtggccgtatgctcacaagaatgtggtactgcagctactgccaagggctgatgatggtcaagccctgtggcggttattgtaatgtggtgatgcagggttgtatggccggagtcgtggagatcgacaagtactggcgagagtatatcctgagcctggaggagctcgtgaacggtatgtaccgaatatatgacatggagaacgtccttctagggttattcagtacaattcacgactcaatccaatacgtacagaagaacgccggtaaattgactactaccgagaccgagaaaaaaatatggcactttaaataccctatcttttttctgtgtattggcttggatctgcaaatcggcaaactctgtgcgcattctcagcagcggcaataccgctccgcctactatccggaggatctgtttattgacaaaaaggtcctcaaggtggctcatgtggagcatgaagagacattatcttctagaaggagagaattgattcagaaactgaagtccttcatctctttttattcagctctacctggctacatatgcagccattccccagtggccgaaaacgacaccctgtgctggaacggtcaggaactggtggaaagatatagccagaaggccgctaggaacgggatgaagaatcaatttaaccttcatgagttaaagatgaaggggccagagcccgtggtatcgcagatcatagacaagctgaaacacattaaccagctcctcagaaccatgagcatgcccaagggaagagttctcgacaaaaacttggatgaagagggttttgagtctggggattgtggagacgatgaggatgagtgtataggaggcagcggcgatggaatgatcaaggtcaagaaccagttacgcttcctagctgagctggcctatgacttggacgtggacgatgccccagggaactcacagcaggctacccccaaggataacgagatcagtacatttcacaatctcggcaatgtccactcccctttgaagttactgacaagtatggctatctccgtggtctgttttttcttcttagtgcactag

SEQ ID NO: 63120 - DNA, 1812 bp, Artificial Sequence
  derived and/or modified sequence
atggccggcaccgtgagaaccgcctgcctggtggtggccatgctgctgagcctggacttccccggccaggcccagccccccccccccccccccgacgccacctgccaccaggtgagaagcttcttccagagactgcagcccggcctgaagtgggtgcccgagacccccgtgcccggcagcgacctgcaggtgtgcctgcccaagggccccacctgctgcagcagaaagatggaggagaagtaccagctgaccgccagactgaacatggagcagctgctgcagagcgccagcatggagctgaagttcctgatcatccagaacgccgccgtgttccaggaggccttcgagatcgtggtgagacacgccaagaactacaccaacgccatgttcaagaacaactaccccagcctgaccccccaggccttcgagttcgtgggcgagttcttcaccgacgtgagcctgtacatcctgggcagcgacatcaacgtggacgacatggtgaacgagctgttcgacagcctgttccccgtgatctacacccagctgatgaaccccggcctgcccgacagcgccctggacatcaacgagtgcctgagaggcgccagaagagacctgaaggtgttcggcaacttccccaagctgatcatgacccaggtgagcaagagcctgcaggtgaccagaatcttcctgcaggccctgaacctgggcatcgaggtgatcaacaccaccgaccacctgaagttcagcaaggactgcggcagaatgctgaccagaatgtggtactgcagctactgccagggcctgatgatggtgaagccctgcggcggctactgcaacgtggtgatgcagggctgcatggccggcgtggtggagatcgacaagtactggagagagtacatcctgagcctggaggagctggtgaacggcatgtacagaatctacgacatggagaacgtgctgctgggcctgttcagcaccatccacgacagcatccagtacgtgcagaagaacgccggcaagctgaccaccaccgagaccgagaagaagatctggcacttcaagtaccccatcttcttcctgtgcatcggcctggacctgcagatcggcaagctgtgcgcccacagccagcagagacagtacagaagcgcctactaccccgaggacctgttcatcgacaagaaggtgctgaaggtggcccacgtggagcacgaggagaccctgagcagcagaagaagagagctgatccagaagctgaagagcttcatcagcttctacagcgccctgcccggctacatctgcagccacagccccgtggccgagaacgacaccctgtgctggaacggccaggagctggtggagagatacagccagaaggccgccagaaacggcatgaagaaccagttcaacctgcacgagctgaagatgaagggccccgagcccgtggtgagccagatcatcgacaagctgaagcacatcaaccagctgctgagaaccatgagcatgcccaagggcagagtgctggacaagaacctggacgaggagggcttcgagagcggcgactgcggcgacgacgaggacgagtgcatcggcggcagcggcgacggcatgatcaaggtgaagaaccagctgagattcctggccgagctggcctacgacctggacgtggacgacgcccccggcaacagccagcaggccacccccaaggacaacgagatcagcaccttccacaacctgggcaacgtgcacagccccctgaagctgctgaccagcatggccatcagcgtggtgtgcttcttcttcctggtgcactag

SEQ ID NO: 63121 - protein, 526 aa, Artificial Sequence
  derived and/or modified sequence
MAGTVRTACLVVAMLLSLDFPGQAQPPPPPPDATCHQVRSFFQRLQPGLKWVPETPVPEAFEIVVRHAKNYTNAMFKNNYPSLTPQAFEFVGEFFTDVSLYILGSDINVDDMVNELFDSLFPVIYTQLMNPGLPDSALDINECLRGARRDLKVFGNFPKLIMTQVSKSLQVTRIFLQALNLGIEVINTTDHLKFSKDCGRMLTRMWYCSYCQGLMMVKPCGGYCNVVMQGCMAGVVEIDKYWREYILSLEELVNGMYRIYDMENVLLGLFSTIHDSIQYVQKNAGKLTTTIGKLCAHSQQRQYRSAYYPEDLFIDKKVLKVAHVEHEETLSSRRRELIQKLKSFISFYSALPGYICSHSPVAENDTLCWNGQELVERYSQKAARNGMKNQFNLHELKMKGPEPVVSQIIDKLKHINQLLRTMSMPKGRVLDKNLDEEGFESGDCGDDEDECIGGSGDGMIKVKNQLRFLAELAYDLDVDDAPGNSQQATPKDNEISTFHNLGNVHSPLKLLTSMAISVVCFFFLVH

SEQ ID NO: 63122 - DNA, 771 bp, Artificial Sequence
  derived and/or modified sequence
taaaagccttgcggcggatactgcaatgtcgttatgcaggggtgcatggccggtgttgtggaaatcgacaaatattggagagagtatatccttagtctggaagaactggtaaacgggatgtatcggatttatgacatggagaacgtgctgctaggtctattttcaactatccacgattctattcagtacgttcagaaaaacgcaggaaaactgaccactaccatcggcaagctctgtgcccattctcaacagcgccagtaccgctctgcgtattaccctgaggacctgttcatagacaaaaaagtactgaaagttgcgcatgtggaacacgaagagacactcagctctcggaggcgggaactaatccagaagctcaaatcctttataagcttttactcggccctcccaggctatatttgctcacatagtccggtggctgaaaatgacactctctgctggaatggccaagaactcgtggagcggtatagccaaaaggccgcaagaaatggcatgaagaaccagtttaatctccatgaactgaaaatgaaagggcctgagccagtggtttcacagattattgacaaattgaaacacattaatcagctcctgcgcaccatgtcaatgcccaaggggcgagtgttggataagaatttagacgaggaaggttttgaatcaggcgactgcggagatgatgaagacgagtgcatcggcggcagcggtgacggcatgatcaaggtaaagaatcaactgagattcttggctgggaactag

SEQ ID NO: 63123 - DNA, 1581 bp, Artificial Sequence
  derived and/or modified sequence
atggccggtacagtgcgcaccgcatgtttggtggttgccatgctgctctctctggactttccagggcaagcacagccacctccgcccccacctgatgcaacttgccaccaggtgcgctcctttttccagcgcctccagccggggcttaaatgggtccctgagacccccgtacccgaagccttcgaaatcgttgtgaggcatgctaagaattacacgaacgcgatgtttaaaaacaactatccctctctgaccccacaggctttcgagttcgtgggagaattctttaccgacgtgagtctctatatcttgggtagtgacattaacgtggacgatatggtaaacgagcttttcgactccctgttccctgtgatatatactcagctaatgaaccccggtctgcccgactcagcgctcgacattaacgaatgtctgagaggcgcaagacgggatctgaaagtctttggcaactttcccaaactgatcatgacacaggtctcaaaatcgctgcaggttacgcggatctttcttcaggctctcaacttagggatagaagttatcaacactaccgaccatcttaagttttcgaaggactgtgggcgcatgttgacgcgaatgtggtactgtagctattgtcaaggcctgatgatggtaaagccgtgtggaggatattgcaatgtagtcatgcaagggtgtatggccggcgtggtcgagatagataagtattggcgcgaatatatcctgagcctggaggaattggtgaacgggatgtatcgcatatatgacatggagaacgtcctgcttgggttgttctctaccatccatgatagcattcaatacgtacaaaagaatgcaggcaagcttactactactattggaaaactgtgcgcccatagccagcagagacaataccggagcgcctactacccagaggatttgtttatcgacaaaaaggtactgaaggtcgcccacgtagagcacgaagaaactttaagcagcaggcgccgggagctgattcagaagctgaagtcgttcatttctttctatagcgcgctgcctgggtacatttgctcccattcaccagtggcggagaacgacactctttgctggaatggccaagaactggtggagagatacagtcagaaggccgcaagaaacgggatgaagaatcagtttaacctccatgaactgaaaatgaaaggccccgagcccgttgtcagccagatcatagataagctgaagcacatcaaccaacttctgaggactatgtcgatgcctaaggggcgcgtcctggataaaaacttggacgaagagggtttcgagtccggcgattgtggcgacgatgaagacgaatgtatcggcggatctggggacggaatgataaaagtgaagaatcagctccggtttctcgcagaactcgcctacgacctggacgttgacgatgcgcctggaaattcccagcaggcaactcctaaagataatgaaatcagcaccttccataacctgggaaatgtgcatagcccactgaagctcctgacaagcatggccatttcggtcgtgtgcttctttttcctcgtgcactag

SEQ ID NO: 63124 - DNA, 836 bp, Artificial Sequence
  derived and/or modified sequence
ttaaaccctgtggcggttactgcaatgtggtcatgcaaggctgtatggcaggtgtggtggagattgacaagtactggagagaatacattctgtcccttgaagaacttgtgaatggcatgtacagaatctatgacatggagaacgtactgcttggtctcttttcaacaatccatgattctatccagtatgtccagaagaatgcaggaaagctgaccaccactattggcaagttatgtgcccattctcaacaacgccaatatagatctgcttattatcctgaagatctctttattgacaagaaagtattaaaagttgctcatgtagaacatgaagaaaccttatccagccgaagaagggaactaattcagaagttgaagtctttcatcagcttctatagtgctttgcctggctacatctgcagccatagccctgtggcggaaaacgacaccctttgctggaatggacaagaactcgtggagagatacagccaaaaggcagcaaggaatggaatgaaaaaccagttcaatctccatgagctgaaaatgaagggccctgagccagtggtcagtcaaattattgacaaactgaagcacattaaccagctcctgagaaccatgtctatgcccaaaggtagagttctggataaaaacctggatgaggaagggtttgaaagtggagactgcggtgatgatgaagatgagtgcattggaggctctggtgatggaatgataaaagtgaagaatcagctccgcttccttgcaggtaactgattagtgctgacccaaatgtaatctaaaaatggtgatgctcaggaattaaaaataaattgaacccgc

SEQ ID NO: 63125 - DNA, 1581 bp, Artificial Sequence
  derived and/or modified sequence
atggccgggaccgtgcgcaccgcgtgcttggtggtggcgatgctgctcagcttggacttcccgggacaggcgcagcccccgccgccgccgccggacgccacctgtcaccaagtccgctccttcttccagagactgcagcccggactcaagtgggtgccagaaactcccgtgccagaggcctttgaaattgttgttcgccatgccaagaactacaccaatgccatgttcaagaacaactacccaagcctgactccacaagcttttgagtttgtgggtgaatttttcacagatgtgtctctctacatcttgggttctgacatcaatgtagatgacatggtcaatgaattgtttgacagcctgtttccagtcatctatacccagctaatgaacccaggcctgcctgattcagccttggacatcaatgagtgcctccgaggagcaagacgtgacctgaaagtatttgggaatttccccaagcttattatgacccaggtttccaagtcactgcaagtcactaggatcttccttcaggctctgaatcttggaattgaagtgatcaacacaactgatcacctgaagttcagtaaggactgtggccgaatgctcaccagaatgtggtactgctcttactgccagggactgatgatggttaaaccctgtggcggttactgcaatgtggtcatgcaaggctgtatggcaggtgtggtggagattgacaagtactggagagaatacattctgtcccttgaagaacttgtgaatggcatgtacagaatctatgacatggagaacgtactgcttggtctcttttcaacaatccatgattctatccagtatgtccagaagaatgcaggaaagctgaccaccactattggcaagttatgtgcccattctcaacaacgccaatatagatctgcttattatcctgaagatctctttattgacaagaaagtattaaaagttgctcatgtagaacatgaagaaaccttatccagccgaagaagggaactaattcagaagttgaagtctttcatcagcttctatagtgctttgcctggctacatctgcagccatagccctgtggcggaaaacgacaccctttgctggaatggacaagaactcgtggagagatacagccaaaaggcagcaaggaatggaatgaaaaaccagttcaatctccatgagctgaaaatgaagggccctgagccagtggtcagtcaaattattgacaaactgaagcacattaaccagctcctgagaaccatgtctatgcccaaaggtagagttctggataaaaacctggatgaggaagggtttgaaagtggagactgcggtgatgatgaagatgagtgcattggaggctctggtgatggaatgataaaagtgaagaatcagctccgcttccttgcagaactggcctatgatctggatgtggatgatgcgcctggaaacagtcagcaggcaactccgaaggacaacgagataagcacctttcacaacctcgggaacgttcattccccgctgaagcttctcaccagcatggccatctcggtggtgtgcttcttcttcctggtgcactga

SEQ ID NO: 63126 - DNA, 771 bp, Artificial Sequence
  derived and/or modified sequence
tgaaaaccctgtggcggctactgcaatgtggtgatgcagggctgcatggccggcgtggtggagattgacaagtactggagggagtacatcctgagcctggaggagctggtgaatggcatgtaccgcatctatgacatggagaatgtgctgctgggcctcttcagcaccatccatgacagcatccagtatgtgcagaagaatgctgggaagctgaccaccaccatcggcaagctgtgtgcccacagccagcagaggcagtacagaagtgcctactacccagaggacctcttcatcgacaagaaggtgctgaaggtggcccacgtggagcacgaggagaccctgagcagcagaagaagagagctgatccagaagctgaagagcttcatctccttctacagcgccctgcccggctacatctgcagccacagccctgtggctgaaaatgacaccctgtgctggaatggccaggagctggtggagcgctacagccagaaggccgccagaaatggcatgaagaaccagttcaacctgcacgagctgaagatgaagggccctgagcctgtggtgtcccagatcatcgacaagctgaagcacatcaaccagctgctgcggaccatgtccatgcccaagggccgggtgctggacaagaacctggatgaggagggctttgaaagtggggactgtggagatgatgaagatgagtgcatcggcggcagcggagatggcatgatcaaggtgaagaaccagctgcgcttcctggccggcaactag

SEQ ID NO: 63127 - DNA, 1581 bp, Artificial Sequence
  derived and/or modified sequence
atggccggcaccgtgaggacagcctgcctggtggtggccatgctgctgagcctggacttccctggccaggcccagcccccacctcctcctccagatgccacctgccaccaggtgcgctccttcttccagaggctgcagcccggcctgaagtgggtgcctgagacccctgtgcctgaggcctttgaaattgtggtgagacatgccaagaactacaccaatgccatgttcaagaacaactaccccagcctgaccccccaggcctttgaatttgtgggggagttcttcacagatgtgtccctgtacatcctgggcagtgacatcaacgtggatgacatggtgaatgagctgtttgacagcctcttccctgtgatctacacccagctgatgaaccctggcctgcctgacagcgccctggacatcaatgaatgtctgcggggggcccggcgggacctgaaggtgtttggaaacttccccaagctgatcatgacccaggtgtccaagagcctgcaggtgacccgcatcttcctgcaggccctgaacctgggcattgaagtcatcaacaccacagaccacctgaagttcagcaaggactgtggccgcatgctgaccaggatgtggtactgcagctactgccagggcctgatgatggtgaagccctgtggcggctactgcaatgtggtgatgcagggctgcatggccggcgtggtggagattgacaagtactggagggagtacatcctgagcctggaggagctggtgaatggcatgtaccgcatctatgacatggagaatgtgctgctgggcctcttcagcaccatccatgacagcatccagtatgtgcagaagaatgctgggaagctgaccaccaccatcggcaagctgtgtgcccacagccagcagaggcagtacagaagtgcctactacccagaggacctcttcatcgacaagaaggtgctgaaggtggcccacgtggagcacgaggagaccctgagcagcagaagaagagagctgatccagaagctgaagagcttcatctccttctacagcgccctgcccggctacatctgcagccacagccctgtggctgaaaatgacaccctgtgctggaatggccaggagctggtggagcgctacagccagaaggccgccagaaatggcatgaagaaccagttcaacctgcacgagctgaagatgaagggccctgagcctgtggtgtcccagatcatcgacaagctgaagcacatcaaccagctgctgcggaccatgtccatgcccaagggccgggtgctggacaagaacctggatgaggagggctttgaaagtggggactgtggagatgatgaagatgagtgcatcggcggcagcggagatggcatgatcaaggtgaagaaccagctgcgcttcctggccgagctggcctatgacctggatgtggatgatgcccctggcaacagccagcaggccacccccaaggacaatgagatcagcaccttccacaacctgggcaatgtgcacagccccctgaagctgctgacctccatggccatctctgtggtgtgcttcttcttcctggtgcactag

SEQ ID NO: 63128 - DNA, 771 bp, Artificial Sequence
  derived and/or modified sequence
tgaaagccctgcggcggctactgcaacgtggtgatgcagggctgcatggccggagtggtagaaatcgataaatattggcgggagtatattctgagtctggaggagttggttaatggaatgtatcgtatttacgatatggaaaacgtgcttctggggttattcagtaccatccatgacagcatccagtatgttcagaaaaacgccggaaaactgacgacaaccattgggaaattgtgcgctcactcccaacaaagacagtacaggagcgcctattaccctgaagatctctttattgataagaaagttctgaaggttgcccacgtagaacacgaagagaccctaagttccagacgtcgggagctcatccaaaagctgaaatctttcatctcgttctattcggcgttgcctggttacatctgctctcactcccccgtcgccgaaaatgacaccttatgctggaacgggcaggagctggtggagagatattcccagaaggctgctcggaacggtatgaagaatcaatttaatttgcacgagctgaagatgaaaggaccggagccagtagtgagtcagataatcgacaaacttaagcacatcaatcagcttctgcgcactatgagcatgccgaagggccgcgtactagacaagaatctggatgaggagggtttcgaatcaggcgactgcggagatgacgaggacgaatgtattggcggatctggcgatggaatgataaaggtgaaaaaccagctccggtttttggccggcaactag

SEQ ID NO: 63129 - DNA, 1581 bp, Artificial Sequence
  derived and/or modified sequence
atggccggcaccgtgcggaccgcctgcctggtggtggccatgctgctgagtctggactttcctggtcaagcccagcctccgcccccacctcccgacgctacctgtcaccaggtccgctcattcttccaaagattacagccgggtctgaagtgggtgcctgaaactcctgtccctgaggccttcgaaattgtcgtacggcacgctaaaaattacacaaacgccatgtttaaaaataactatccatcgctgactcctcaagcttttgaatttgtcggtgagtttttcacagatgtgtccctttacatcctaggatccgacatcaatgtcgacgacatggtcaacgaactgttcgattccctgtttcccgtcatatatacgcaactgatgaaccccgggctccctgattcggctctcgacattaacgagtgtctacggggcgcacgccgtgatctcaaagtgttcgggaactttcccaaactgatcatgacacaggtctctaaaagcctccaggtaacaagaatctttctgcaggcgctaaatctgggcatcgaagtgattaacaccaccgatcatctcaaatttagcaaagactgtggaaggatgcttacaaggatgtggtattgttcttattgccagggactgatgatggtgaaaccttgcggcggctactgcaacgtcgtgatgcaggggtgtatggccggtgtggtcgagatagataagtattggagggagtacatcttgagtctagaggagctagtgaatggtatgtaccggatttatgacatggaaaatgtgctcctgggcctgttctctaccatccatgactctatccagtatgtgcaaaaaaatgcagggaaactcacaactaccatcggcaaattatgcgcacattcacagcagcgtcagtaccgatcagcctattacccagaggatctattcatcgacaagaaagtgctcaaagtggcccacgttgagcatgaggagacactctccagccgcaggcgcgagctgatacagaaactcaaatccttcatttctttttattctgccctgccaggttatatttgctcccattccccagtcgcagaaaacgacactctctgttggaatggccaggagctcgttgaacggtatagccagaaagcagcccgtaatgggatgaagaatcagtttaaccttcacgaactgaaaatgaaggggcccgaacctgtggtttcacagattatagacaagcttaagcacattaaccagctgctgcggacaatgtccatgcctaaagggcgcgttctagataaaaacctggacgaagagggatttgagagcggtgattgtggagacgacgaggacgagtgtatcggcggcagcggggatgggatgataaaggtcaagaatcaactgcgctttctcgccgagttggcctatgatttggacgtggatgacgccccaggtaattctcagcaagccacaccaaaggacaatgagatctcgacttttcacaatttagggaatgttcactctcctctcaagctgctaaccagcatggccatttcagtcgtatgtttcttcttcctggtgcactag

SEQ ID NO: 63130 - DNA, 771 bp, Artificial Sequence
  derived and/or modified sequence
tgaaagccatgtggtggctactgcaatgtcgtcatgcagggttgtatggctggcgtggtcgaaatcgacaaatactggagagagtatattctttcattggaggagcttgtcaatggaatgtatagaatctatgatatggagaatgtgctgctcgggctgtttagtaccattcatgactcaattcaatacgtccaaaagaacgccggaaagctgaccaccacaatcggcaaactgtgcgcgcactcccagcagcgtcaatacaggagcgcttattacccagaggatctattcatcgacaagaaggtgctgaaagtagcgcacgtggagcacgaagagaccttatccagccgcaggagggagctcattcagaagctcaaaagcttcatttcattctacagcgcattgcctggttacatctgctcccacagtccggtggcagaaaacgacactctgtgttggaacgggcaggagttagtcgaacgatactcccagaaggccgcacggaacggcatgaaaaaccagttcaacctgcacgaattaaagatgaagggacctgaaccagtagtctcacagatcatcgataagcttaagcacattaaccagctccttcggactatgagcatgcctaagggtagggtcctggataagaacttagacgaagaaggcttcgagagtggcgactgtggtgatgacgaagacgaatgtattggagggtcgggagacggtatgatcaaagtgaaaaatcagcttagattcttggctgggaattag

SEQ ID NO: 63131 - DNA, 1581 bp, Artificial Sequence
  derived and/or modified sequence
atggcagggaccgttcggacagcatgcctggttgtcgcgatgctgcttagtctagattttcctggtcaggcacaacctccccctccccctcccgatgccacctgccatcaggttcggtcatttttccaacgcttacagccgggtctcaagtgggtcccagagacacccgtaccagaggcctttgagatagtggtcaggcacgctaaaaattacactaatgccatgttcaaaaacaattatccgagcttgactccgcaggccttcgagttcgtgggagaattctttacggacgtctccctttacattctgggatctgatattaacgtagacgacatggtgaacgagctattcgattcactcttccctgtgatttacacgcagctgatgaacccgggtctccctgattctgcattggacatcaatgaatgtctaagaggcgctaggcgcgaccttaaagtgttcggcaattttcctaagctgatcatgacccaggtgtctaaatctcttcaggtgacgagaatttttctgcaggccctgaatctgggaatcgaggtgataaatacaaccgatcacctgaagttttccaaggactgtgggaggatgcttaccagaatgtggtattgtagttactgccaaggactgatgatggtaaagccctgcggtggttactgcaacgttgttatgcaaggttgtatggcgggtgtggtcgagatcgataagtactggagggagtatatactgagcctggaggagctggtgaatggaatgtatcggatatacgacatggagaatgtgctgctaggcctcttcagcacaattcatgatagcatccagtacgtccaaaaaaatgctgggaaactgacgactacaattggcaaattgtgtgcacattcgcagcagcggcagtatcgttctgcatactaccctgaagatctgttcatagacaagaaagtcttaaaagtggctcatgtggaacacgaggagacactgtcaagccgtaggcgggagctcatccagaagctgaagtcctttatttcattctattccgctctgcctggctacatttgctctcactcgccagtagctgagaacgataccctgtgctggaatggacaggaacttgtcgaacgctacagccaaaaggcggctcggaatgggatgaaaaaccagtttaatctacacgaactgaagatgaaagggcctgaacccgtggtatctcagattatcgataagttaaagcacattaatcaactcctgagaactatgtccatgcccaaaggaagggttctggacaagaacttggacgaggaagggttcgaatctggagattgtggggatgacgaggacgagtgcattgggggaagcggcgatggcatgataaaagtgaaaaaccaacttcggttccttgcggagctggcttatgatttggacgttgacgacgcccctgggaactcccagcaggctacgcccaaggataacgaaatatcaacatttcataatctgggtaacgtgcattccccccttaaacttctaacctccatggcaatttccgtggtgtgctttttttttctcgtacactag

SEQ ID NO: 63132 - DNA, 771 bp, Artificial Sequence
  derived and/or modified sequence
tgaaagccctgcggcggctactgcaacgtggtgatgcagggctgcatggccggcgtggtggagatcgacaagtactggagagagtacatcctgagcctggaggagctggtgaacggcatgtacagaatctacgacatggagaacgtgctgctgggcctgttcagcaccatccacgacagcatccagtacgtgcagaagaacgccggcaagctgaccaccaccatcggcaagctgtgcgcccacagccagcagagacagtacagaagcgcctactaccccgaggacctgttcatcgacaagaaggtgctgaaggtggcccacgtggagcacgaggagaccctgagcagcagaagaagagagctgatccagaagctgaagagcttcatcagcttctacagcgccctgcccggctacatctgcagccacagccccgtggccgagaacgacaccctgtgctggaacggccaggagctggtggagagatacagccagaaggccgccagaaacggcatgaagaaccagttcaacctgcacgagctgaagatgaagggccccgagcccgtggtgagccagatcatcgacaagctgaagcacatcaaccagctgctgagaaccatgagcatgcccaagggcagagtgctggacaagaacctggacgaggagggcttcgagagcggcgactgcggcgacgacgaggacgagtgcatcggcggcagcggcgacggcatgatcaaggtgaagaaccagctgagattcctggccggcaactag

SEQ ID NO: 63133 - DNA, 1581 bp, Artificial Sequence
  derived and/or modified sequence
atggccggcaccgtgagaaccgcctgcctggtggtggccatgctgctgagcctggacttccccggccaggcccagccccccccccccccccccgacgccacctgccaccaggtgagaagcttcttccagagactgcagcccggcctgaagtgggtgcccgagacccccgtgcccgaggccttcgagatcgtggtgagacacgccaagaactacaccaacgccatgttcaagaacaactaccccagcctgaccccccaggccttcgagttcgtgggcgagttcttcaccgacgtgagcctgtacatcctgggcagcgacatcaacgtggacgacatggtgaacgagctgttcgacagcctgttccccgtgatctacacccagctgatgaaccccggcctgcccgacagcgccctggacatcaacgagtgcctgagaggcgccagaagagacctgaaggtgttcggcaacttccccaagctgatcatgacccaggtgagcaagagcctgcaggtgaccagaatcttcctgcaggccctgaacctgggcatcgaggtgatcaacaccaccgaccacctgaagttcagcaaggactgcggcagaatgctgaccagaatgtggtactgcagctactgccagggcctgatgatggtgaagccctgcggcggctactgcaacgtggtgatgcagggctgcatggccggcgtggtggagatcgacaagtactggagagagtacatcctgagcctggaggagctggtgaacggcatgtacagaatctacgacatggagaacgtgctgctgggcctgttcagcaccatccacgacagcatccagtacgtgcagaagaacgccggcaagctgaccaccaccatcggcaagctgtgcgcccacagccagcagagacagtacagaagcgcctactaccccgaggacctgttcatcgacaagaaggtgctgaaggtggcccacgtggagcacgaggagaccctgagcagcagaagaagagagctgatccagaagctgaagagcttcatcagcttctacagcgccctgcccggctacatctgcagccacagccccgtggccgagaacgacaccctgtgctggaacggccaggagctggtggagagatacagccagaaggccgccagaaacggcatgaagaaccagttcaacctgcacgagctgaagatgaagggccccgagcccgtggtgagccagatcatcgacaagctgaagcacatcaaccagctgctgagaaccatgagcatgcccaagggcagagtgctggacaagaacctggacgaggagggcttcgagagcggcgactgcggcgacgacgaggacgagtgcatcggcggcagcggcgacggcatgatcaaggtgaagaaccagctgagattcctggccgagctggcctacgacctggacgtggacgacgcccccggcaacagccagcaggccacccccaaggacaacgagatcagcaccttccacaacctgggcaacgtgcacagccccctgaagctgctgaccagcatggccatcagcgtggtgtgcttcttcttcctggtgcactag

SEQ ID NO: 63134 - protein, 825 aa, Artificial Sequence
  derived and/or modified sequence
MYSGAGPALAPPAPPPPIQGYAFKPPPRPDFGTSGRTIKLQANFFEMDIPKIDIYHYELDIKPEKCPRRVNREIVEHMVQHFKTQIFGDRKPVFDGRKNLYTAMPLPIGRDKVELEVTLPGEGKDRIFKVSIKWVSCVSLQALHDALSGRLPSVPFETIQALDVVMRHLPSMRYTPVGRSFFTASEGCSNPLGGGREVWFGFHQSVRPSLWKMMLNIDVSATAFYKAQPVIEFVCEVLDFKSIEEQQKPLTDSQRVKFTKEIKGLKVEITHCGQMKRKYRVCNVTRRPASHQTFPLQQESGQTVECTVAQYFKDRHKLVLRYPHLPCLQVGQEQKHTYLPLEVCNIVAGQRCIKKLTDNQTSTMIRATARSAPDRQEEISKLMRSASFNTDPYVREFGIMVKDEMTDVTGRVLQPPSILYGGRNKAIATPVQGVWDMRNKQFHTGIEIKVWAIACFAPQRQCTEVHLKSFTEQLRKISRDAGMPIQGQPCFCKYAQGADSVEPMFRHLKNTYAGLQLVVVILPGKTPVYAEVKRVGDTVLGMATQCVQMKNVQRTTPQTLSNLCLKINVKLGGVNNILLPQGRPPVFQQPVIFLGADVTHPPAGDGKKPSIAAVVGSMDAHPNRYCATVRVQQHRQEIIQDLAAMVRELLIQFYKSTRFKPTRIIFYRDGVSEGQFQQVLHHELLAIREACIKLEKDYQPGITFIVVQKRHHTRLFCTDKNERGTSRPSHYHVLWDDNRFSSDELQILTYQLCHTYVRCTRSVSIPAPAYYAHLVAFRARYHLVDKEHDSAEGSHTSGQSNGRDHQALAKAVQVHQDTLRTMYFA

SEQ ID NO: 63135 - DNA, 3141 bp, Artificial Sequence
  derived and/or modified sequence
cggccgcccctcggccccggagcccctcggcggcgccaccatgtactcgggagccggccccgcacttgcacctcctgcgccgccgccccccatccaaggatatgccttcaagcctccacctagacccgactttgggacctccgggagaacaatcaaattacaggccaatttcttcgaaatggacatccccaaaattgacatctatcattatgaattggatatcaagccagagaagtgcccgaggagagttaacagggaaatcgtggaacacatggtccagcactttaaaacacagatctttggggatcggaagcccgtgtttgacggcaggaagaatctatacacagccatgccccttccgattgggagggacaaggtggagctggaggtcacgctgccaggagaaggcaaggatcgcatcttcaaggtgtccatcaagtgggtgtcctgcgtgagcttgcaggcgttacacgatgcactttcagggcggctgcccagcgtcccttttgagacgatccaggccctggacgtggtcatgaggcacttgccatccatgaggtacacccccgtgggccgctccttcttcaccgcgtccgaaggctgctctaaccctcttggcgggggccgagaagtgtggtttggcttccatcagtccgtccggccttctctctggaaaatgatgctgaatattgatgtgtcagcaacagcgttttacaaggcacagccagtaatcgagtttgtttgtgaagttttggattttaaaagtattgaagaacaacaaaaacctctgacagattcccaaagggtaaagtttaccaaagaaattaaaggtctaaaggtggagataacgcactgtgggcagatgaagaggaagtaccgcgtctgcaatgtgacccggcggcccgccagtcaccaaacattcccgctgcagcaggagagcgggcagacggtggagtgcacggtggcccagtatttcaaggacaggcacaagttggttctgcgctacccccacctcccatgtttacaagtcggacaggagcagaaacacacctaccttcccctggaggtctgtaacattgtggcaggacaaagatgtattaaaaaattaacggacaatcagacctcaaccatgatcagagcgactgctaggtcggcgcccgatcggcaagaagagattagcaaattgatgcgaagtgcaagtttcaacacagatccatacgtccgtgaatttggaatcatggtcaaagatgagatgacagacgtgactgggcgggtgctgcagccgccctccatcctctacgggggcaggaataaagctattgcgacccctgtccagggcgtctgggacatgcggaacaagcagttccacacgggcatcgagatcaaggtgtgggccattgcgtgcttcgccccccagcgccagtgcacggaagtccatctgaagtccttcacagagcagctcagaaagatctcgagagacgccggcatgcccatccagggccagccgtgcttctgcaaatacgcgcagggggcggacagcgtggagcccatgttccggcacctgaagaacacgtatgcgggcctgcagctggtggtggtcatcctgcccggcaagacgcccgtgtacgccgaggtcaagcgcgtgggagacacggtgctggggatggccacgcagtgcgtgcagatgaagaacgtgcagaggaccacgccacagaccctgtccaacctctgcctgaagatcaacgtcaagctgggaggcgtgaacaacatcctgctgccccagggcaggccgccggtgttccagcagcccgtcatctttctgggagcagacgtcactcacccccccgccggggatgggaagaagccctccattgccgccgtggtgggcagcatggacgcccaccccaatcgctactgcgccaccgtgcgcgtgcagcagcaccggcaggagatcatacaagacctggccgccatggtccgcgagctcctcatccagttctacaagtccacgcgcttcaagcccacccgcatcatcttctaccgcgacggtgtctctgaaggccagttccagcaggttctccaccacgagttgctggccatccgtgaggcctgtatcaagctagaaaaagactaccagcccgggatcaccttcatcgtggtgcagaagaggcaccacacccggctcttctgcactgacaagaacgagcgggggacaagcaggccttcgcactatcacgtcctctgggacgacaatcgtttctcctctgatgagctgcagatcctaacctaccagctgtgtcacacctacgtgcgctgcacacgctccgtgtccatcccagcgccagcatactacgctcacctggtggccttccgggccaggtaccacctggtggataaggaacatgacagtgctgaaggaagccatacctctgggcagagtaacgggcgagaccaccaagcactggccaaggcggtccaggttcaccaagacactctgcgcaccatgtactttgcttgacatgttttagtgtttagcgattgtgtaccgagtgggattcacgagaccagctacactcagaccaacagatggccagcccttccgtgacagccagcatcgaacatgagacgtcattgattttattagattctccgttttccagaatgccttccgtcccagatttcaaacttggattttgaactgcagacctgtatgagaacccaatgtcataggaaatatggtttgctaaaatctataagctgcttattaaaacagagtcccgtgtgtcctaaaaatctcctaaaaccagtctatgaactcagggctttaaaacatttttaatttatttggtcattcaatttacttgtttttaatacatgattctctatgaaattgatgggctcaaactagctgtgaatcttctgagagtgaaagcaacacaaaacacaagtgtggttttaaagccttgaacattctgatgttgtcactaaagttgatttccaggcgatgctcgtgtgcccctggcgtggctcacccaagttcctcgactgagggccggtggccatgcagaggcgtccgcaggtgccgtgttctgccagcaccgcccttcacccggcctgaactaaggagcagtggcagaaggt

SEQ ID NO: 63136 - DNA, 2478 bp, Artificial Sequence
  derived and/or modified sequence
atgtacagcggcgccgggcctgctttagcaccaccggcccctccgccaccaatccagggctatgctttcaaacctcctccccggcccgatttcggcacgtctggaagaaccatcaaactgcaggcaaacttttttgagatggacatacccaaaatcgatatctaccattacgagttagatataaagcctgagaaatgccccagacgcgttaatcgcgaaattgttgagcatatggtgcagcatttcaagacccaaatatttggagatcggaagcctgttttcgacggacgaaagaatctctacactgctatgcctctgccaatcgggagagacaaagtggagctggaggtcacactccccggagagggaaaggaccggattttcaaggtgtccataaagtgggtttcctgcgtgtcactccaggccctgcacgacgccttatctgggaggttgccttctgtaccattcgagaccatacaggccttggacgtagtgatgagacatctacccagcatgagatatacaccagttggccgtagcttcttcaccgctagtgaaggctgtagtaaccctcttggcggaggcagggaagtatggttcggcttccaccagagcgtccgccccagcctctggaagatgatgttgaacatagatgtgtctgccactgctttctacaaggcccagccagtcatagagttcgtttgcgaagtgctcgacttcaaaagtatcgaagagcagcagaaacctctaacagattctcagcgggtgaaattcactaaagagataaaggggcttaaggtggaaatcacacattgcggccagatgaagagaaagtaccgggtgtgcaatgtcaccagacggccagcatcccaccagacgtttccgctgcaacaagagagcggccagacggtcgagtgcactgtggctcaatactttaaagaccgccacaagctggtgttgagatatccacatctaccttgcctacaagtgggccaggagcagaagcacacctatctgccgctggaagtgtgcaatattgtggcgggccagcggtgtattaagaagttgacggacaaccaaacgtcgactatgatccgggcaaccgctcggtctgctccggatagacaggaggagatttctaaactgatgcggtctgcatcttttaacaccgacccctatgtgagagagttcggaatcatggttaaggatgagatgaccgatgtaacaggacgcgtgttgcaacccccttccatcctgtacggtggaaggaacaaggcaatagcaacacccgtgcagggagtgtgggacatgaggaataagcagttccataccggtatcgaaataaaggtgtgggccatcgcatgtttcgcaccccagcgccagtgtacagaggtacaccttaagtcttttactgagcagctccgcaagatttcccgggacgcaggaatgccaatccaaggccagccatgcttctgtaagtacgcccaaggcgcggactcagtcgagccaatgtttcggcatctcaaaaatacttacgccgggctccagcttgtggtcgttattctgccgggaaagacaccagtgtatgctgaggtcaagcgtgtcggggatacggttctcggaatggcaacacagtgcgtccagatgaaaaacgtgcagaggaccacaccgcagacgctctcgaacctttgcctgaaaatcaatgtgaagctgggtggcgtgaataatattctgctcccgcaagggcgacccccggtctttcagcagcccgttatttttcttggcgctgatgtgacacatccccctgctggcgatggtaaaaagccgtcaatcgccgccgtggtgggaagcatggacgcacaccccaatcggtattgcgccaccgttcgcgtgcagcagcacaggcaggagatcatacaggacctagctgccatggtgcgagagctcctgatccagttttacaagagtacccgttttaagcctactcggataatcttttatagagacggcgtatcagaaggccaatttcaacaggtattacaccacgaactcctcgctatacgggaagcctgcattaagctggagaaggactaccagcccggcataacatttatcgtggtgcaaaaacgacaccacacacgcctgttttgtactgataagaatgaacggggcacatccaggcctagccattatcatgtcctgtgggacgataatagattcagtagtgacgagttgcaaattctcacgtatcagctttgtcacacctatgtgcggtgcacgcggtctgtgagcatccccgcccccgcatattacgctcatctggtggcctttagggcccgatatcaccttgtcgacaaagaacacgattctgctgaggggtcacacaccagcggccagtccaatggaagggaccatcaggctctcgccaaagcagttcaagtacatcaagacaccctccggaccatgtattttgcatag

SEQ ID NO: 63137 - DNA, 2478 bp, Artificial Sequence
  derived and/or modified sequence
atgtacagcggggccggccctgccctggcccccccagcccctcctccacccatccagggctacgccttcaagcccccacccaggccagactttggcaccagcggccgcaccatcaagctgcaggccaacttctttgagatggacatccccaagattgacatctaccactatgagctggacatcaagccagagaagtgcccccggcgggtgaaccgggagatcgtggagcacatggtgcagcacttcaagacccagatctttggagacaggaagcctgtgtttgatggcaggaagaacctgtacacagccatgcccctgcccatcggccgggacaaggtggagctggaggtgaccctgcccggggagggcaaggaccgcatcttcaaggtgtccatcaagtgggtgtcctgtgtgtccctgcaggccctgcatgatgccctgagcggccgcctgcccagcgtgccctttgagaccatccaggccctggatgtggtgatgaggcacctgcccagcatgagatacacccctgtgggccgctccttcttcaccgccagcgagggctgcagcaaccccctgggcggcggccgggaggtgtggtttggcttccaccagagcgtgcggcccagcctgtggaagatgatgctgaacattgatgtgtctgccacagccttctacaaggcccagcctgtgattgaatttgtgtgtgaggtgctggacttcaagagcattgaggagcagcagaagcccctgacagacagccagagggtgaagttcaccaaggagatcaagggcctgaaggtggagatcacccactgcggccagatgaagaggaagtacagagtgtgcaatgtgacccggcggcctgccagccaccagaccttccccctgcagcaggagagcggccagacagtggagtgcaccgtggcccagtacttcaaggacagacacaagctggtgctgcgctacccccacctgccctgcctgcaggtgggccaggagcagaagcacacctacctgcccctggaggtgtgcaacatcgtggccggccagcgctgcatcaagaagctgacagacaaccagaccagcaccatgatccgggccacagcccggagcgccccagaccggcaggaggagatcagcaagctgatgaggtctgccagcttcaacacagacccctacgtgcgggagtttggcatcatggtgaaggatgagatgacagatgtgacaggccgggtgctgcagcccccatccatcctgtatggaggaagaaacaaggccatcgccacccctgtgcagggcgtgtgggacatgaggaacaagcagttccacacaggcatcgagatcaaggtgtgggccatcgcctgctttgccccccagaggcagtgcacagaggtgcacctgaagagcttcacagagcagctgaggaagatcagcagagatgctggcatgcccatccagggccagccctgcttctgcaagtatgcccagggcgctgacagcgtggagcccatgttccgccacctgaagaacacctacgccggcctgcagctggtggtggtgatcctgcccgggaagacccctgtgtatgcagaggtgaagagggtgggggacacagtgctgggcatggccacccagtgtgtgcagatgaagaatgtgcagaggaccaccccccagaccctgagcaacctgtgcctgaagatcaacgtgaagctgggcggcgtgaacaacatcctgctgccccagggccggccccctgtgttccagcagcccgtcatcttcctgggcgcagatgtgacccaccccccagctggagatggcaagaagcccagcattgctgctgtggtgggctccatggatgcccaccccaaccgctactgtgccaccgtgcgggtgcagcagcaccggcaggagatcatccaggacctggccgccatggtgcgggagctgctgatccagttctacaagagcacccgcttcaagcccacccgcatcatcttctacagagatggagtgtctgagggccagttccagcaggtgctgcaccacgagctgctggccatccgggaggcctgcatcaagctggagaaggactaccagcccggcatcaccttcatcgtggtgcagaagaggcaccacaccaggctcttctgcacagacaagaatgaaagaggcaccagccggcccagccactaccacgtgctgtgggatgacaaccgcttcagcagtgatgagctgcagatcctgacctaccagctgtgccacacctacgtgcgctgcaccaggtctgtgtccatcccagccccagcctactatgcccacctggtggccttccgggcccgctaccacctggtggacaaggagcatgacagcgctgagggcagccacaccagcggccagagcaatggccgggaccaccaggccctggccaaggctgtgcaggtgcaccaggacaccctgcggaccatgtactttgcctag

SEQ ID NO: 63138 - DNA, 2478 bp, Artificial Sequence
  derived and/or modified sequence
atgtacagcggcgccggccccgccctggccccccccgccccccccccgcctattcaagggtacgcttttaagcctccccccaggcctgactttggtacgtcaggcagaacaattaagttacaggcgaatttcttcgagatggatattcccaaaattgacatctaccactatgagctggacattaaaccagaaaagtgccccagacgcgtgaaccgggagatcgtagaacatatggtgcagcattttaagacccagatctttggggatcgcaaaccagtgtttgacggaaggaaaaacttatatactgctatgcctctacccattggccgcgataaagtagaactggaagttaccttaccgggtgagggtaaagatcgtatcttcaaagtgagtataaagtgggtgtcgtgcgtctccttgcaggctttgcatgatgccctctctggaagactgcccagtgtcccatttgagacaatccaggccctggatgtggtgatgcgccacctgccctccatgagatatacgcccgttgggagaagtttttttaccgcctcagagggttgtagtaaccctctggggggcgggagagaagtgtggttcggctttcatcaaagtgttagaccttccctctggaagatgatgctgaacatcgacgtctcagctacagccttctacaaggcacaacctgttatcgaattcgtctgcgaagttttagatttcaaaagtatcgaagagcagcagaagcccctgactgattcccaaagagtaaagtttactaaggaaataaagggtctcaaggtcgaaatcacccattgcggccagatgaagagaaaatacagggtctgtaacgtaacaaggcggcccgctagtcatcaaacatttccactccaacaggagtcgggccaaaccgtggagtgtaccgtggcccagtatttcaaagaccggcataagctggtgctgcggtacccgcaccttccttgtctgcaggttggacaagaacagaagcatacttaccttcccctcgaggtctgcaacatagtagccggtcagcgttgcatcaaaaaactgaccgacaaccagacctcaacaatgattcgtgctacggcaagaagcgctcccgatcggcaggaggaaattagcaagctcatgcggagcgctagtttcaacaccgacccatacgtccgagagttcggcatcatggttaaggatgagatgactgatgtgactgggagggtcttgcagcccccgtctattctgtacggcggcagaaataaagccatcgccacacctgtacagggtgtttgggatatgcgtaacaaacagttccacactggaatcgagattaaggtctgggccatcgcttgcttcgcaccacagcggcagtgtactgaagtccacttgaagagtttcaccgagcaattgcggaagatttcacgggacgccggcatgccaatccaaggacagccgtgcttctgtaagtacgctcagggtgccgacagtgttgaaccgatgtttagacaccttaagaatacctatgcaggtctccagctggtcgttgtgattctacccggaaaaacccccgtgtatgccgaggtgaagcgcgtgggggacactgtgctcggtatggccacccagtgtgtccagatgaaaaacgtgcagcgaaccacgcctcagacgctttccaatctctgtctgaagataaatgtcaaacttggcggtgtgaataacatcctgttgccgcagggaagaccccccgtctttcagcagcccgtgatttttctgggcgcggatgttacccaccctccagcaggcgacggcaagaagcctagtattgcagcagtggtgggttctatggacgctcatccgaacagatactgtgcgaccgtgcgggtccagcagcaccgtcaagagattatccaggatctcgccgccatggtacgagagttgctcattcagttttacaagtctacacggtttaaaccaacccggataatattttacagagatggggtgagtgaggggcaattccaacaggtgttacaccatgaactgctggcaattcgggaggcctgtatcaagttagaaaaggattaccaacctggaattactttcatcgttgttcagaagagacatcatactcggttgttttgtaccgacaaaaatgaaagagggaccagccgcccgagccactaccatgtcctgtgggacgataacagattttcatcagatgagttgcaaattctaacctatcagctatgccatacttatgtgagatgcactcgatcagtcagtatccctgcaccggcatattatgcgcatctggtcgccttccgtgccaggtaccacctggtcgataaagaacatgacagcgcagagggttcccacacaagtggacaatccaatggtagggatcaccaggcactcgcgaaggccgttcaggtacaccaggataccctgaggaccatgtatttcgcttag

SEQ ID NO: 63139 - DNA, 2478 bp, Artificial Sequence
  derived and/or modified sequence
atgtacagcggagccggtcctgctctggcccctcccgctccaccgccacccattcagggatatgcattcaaaccccctccacgcccagacttcggtacttcaggcagaaccatcaagctccaggcaaacttttttgaaatggacattccaaaaattgatatttatcactatgaactcgatattaagcccgagaagtgtccccgtagagtgaatcgggagattgtggaacatatggtgcagcacttcaaaacacagatcttcggggatcgtaagccagtatttgatggccgaaaaaatctgtacaccgcgatgccactgccaatcggacgtgacaaggtggagctggaggtcactctgcccggtgagggaaaggacagaattttcaaagtaagtattaagtgggtctcgtgtgtttctttgcaggcactgcatgatgctctgagcggaaggctgccgagcgtgccattcgaaaccatccaggcattagacgttgtaatgagacatctgcctagtatgcggtacacaccagtgggtaggagctttttcaccgctagtgagggttgtagtaacccactcggcggagggagggaggtctggtttggattccatcagtcggtgagaccttcgctttggaagatgatgttaaacattgacgtgtctgccacagcgttctataaggcccagcctgtaatcgagtttgtttgtgaggtcctggacttcaaatccatcgaggagcagcaaaaaccccttacagactctcaacgagttaaatttaccaaggagattaagggactgaaagtcgagattacccactgcggccagatgaagaggaaataccgcgtctgcaacgtgacccgacgcccagcttctcatcagacttttccattgcaacaggaatctgggcaaaccgttgagtgcacagttgcccagtattttaaggacagacacaagctggtgctacgctacccacatctgccttgtttacaagtaggccaggagcaaaagcatacttaccttcccctggaggtgtgcaacattgtagccggtcaacgatgcatcaagaagcttaccgacaatcagacttccaccatgattcgagccacagctcggagcgccccagacaggcaagaggaaatcagcaaactcatgcgatctgcgagctttaacacagatccctatgtgcgggagttcgggattatggtgaaggatgaaatgaccgatgtcacaggacgagtgttgcagccaccaagcatattgtacggcggacggaataaggctatcgccacacccgtacagggcgtgtgggatatgcggaacaaacaatttcataccggaattgagataaaagtgtgggccatcgcttgtttcgctccccagcgccaatgcactgaggtgcatctgaaaagttttacagagcagttgcggaaaatctcccgggacgctggcatgcctatccagggtcagccttgtttctgcaagtacgcccagggtgccgacagtgtggaaccgatgttccgccatctgaagaatacatacgccggtttgcagctagttgttgtgatccttccaggaaagacaccagtttatgcagaagtgaaaagggttggcgatactgtgttaggcatggcaacacagtgcgtgcagatgaagaacgtgcaacgcacaaccccccagacactttcaaatctctgtttaaaaattaacgtaaaactgggtggggttaacaatattcttctgccacagggtcgccctcctgtcttccagcagccagtaattttcttgggcgctgatgttacccatcctcctgccggagatggcaaaaaacctagtatcgccgctgtggtgggtagtatggacgcgcacccaaatcgctattgtgctacagtgagagtacagcagcaccgtcaggagattatccaggatctggccgctatggttagggagctgctgatccagttttataaatccacccgcttcaaacctactaggatcatcttctacagagacggtgtgtcagaggggcaatttcagcaggtcctccatcacgaactgctggcaatcagagaggcctgcattaagttggagaaggactatcagcccggaattacctttatcgtggtgcaaaaacgtcaccacactcggctgttctgtacggacaaaaatgaacggggaacatcgcgcccaagccactatcacgtcctatgggatgataacaggtttagctcggacgagctgcagatcctcacatatcaactgtgccacacatatgttcgctgtacacggtccgtgagcattcccgcaccagcatattacgctcacctggtggcgtttagagcgaggtaccaccttgtcgataaggaacacgactcagccgagggctctcacaccagcggacagtccaatggacgagatcaccaagcccttgctaaagccgtgcaggtgcaccaggacacattgcggacaatgtacttcgcctag

SEQ ID NO: 63140 - DNA, 2478 bp, Artificial Sequence
  derived and/or modified sequence
atgtacagcggcgccggccccgccctggccccccccgccccccccccccccatccagggctacgccttcaagcccccccccagacccgacttcggcaccagcggcagaaccatcaagctgcaggccaacttcttcgagatggacatccccaagatcgacatctaccactacgagctggacatcaagcccgagaagtgccccagaagagtgaacagagagatcgtggagcacatggtgcagcacttcaagacccagatcttcggcgacagaaagcccgtgttcgacggcagaaagaacctgtacaccgccatgcccctgcccatcggcagagacaaggtggagctggaggtgaccctgcccggcgagggcaaggacagaatcttcaaggtgagcatcaagtgggtgagctgcgtgagcctgcaggccctgcacgacgccctgagcggcagactgcccagcgtgcccttcgagaccatccaggccctggacgtggtgatgagacacctgcccagcatgagatacacccccgtgggcagaagcttcttcaccgccagcgagggctgcagcaaccccctgggcggcggcagagaggtgtggttcggcttccaccagagcgtgagacccagcctgtggaagatgatgctgaacatcgacgtgagcgccaccgccttctacaaggcccagcccgtgatcgagttcgtgtgcgaggtgctggacttcaagagcatcgaggagcagcagaagcccctgaccgacagccagagagtgaagttcaccaaggagatcaagggcctgaaggtggagatcacccactgcggccagatgaagagaaagtacagagtgtgcaacgtgaccagaagacccgccagccaccagaccttccccctgcagcaggagagcggccagaccgtggagtgcaccgtggcccagtacttcaaggacagacacaagctggtgctgagatacccccacctgccctgcctgcaggtgggccaggagcagaagcacacctacctgcccctggaggtgtgcaacatcgtggccggccagagatgcatcaagaagctgaccgacaaccagaccagcaccatgatcagagccaccgccagaagcgcccccgacagacaggaggagatcagcaagctgatgagaagcgccagcttcaacaccgacccctacgtgagagagttcggcatcatggtgaaggacgagatgaccgacgtgaccggcagagtgctgcagccccccagcatcctgtacggcggcagaaacaaggccatcgccacccccgtgcagggcgtgtgggacatgagaaacaagcagttccacaccggcatcgagatcaaggtgtgggccatcgcctgcttcgccccccagagacagtgcaccgaggtgcacctgaagagcttcaccgagcagctgagaaagatcagcagagacgccggcatgcccatccagggccagccctgcttctgcaagtacgcccagggcgccgacagcgtggagcccatgttcagacacctgaagaacacctacgccggcctgcagctggtggtggtgatcctgcccggcaagacccccgtgtacgccgaggtgaagagagtgggcgacaccgtgctgggcatggccacccagtgcgtgcagatgaagaacgtgcagagaaccaccccccagaccctgagcaacctgtgcctgaagatcaacgtgaagctgggcggcgtgaacaacatcctgctgccccagggcagaccccccgtgttccagcagcccgtgatcttcctgggcgccgacgtgacccacccccccgccggcgacggcaagaagcccagcatcgccgccgtggtgggcagcatggacgcccaccccaacagatactgcgccaccgtgagagtgcagcagcacagacaggagatcatccaggacctggccgccatggtgagagagctgctgatccagttctacaagagcaccagattcaagcccaccagaatcatcttctacagagacggcgtgagcgagggccagttccagcaggtgctgcaccacgagctgctggccatcagagaggcctgcatcaagctggagaaggactaccagcccggcatcaccttcatcgtggtgcagaagagacaccacaccagactgttctgcaccgacaagaacgagagaggcaccagcagacccagccactaccacgtgctgtgggacgacaacagattcagcagcgacgagctgcagatcctgacctaccagctgtgccacacctacgtgagatgcaccagaagcgtgagcatccccgcccccgcctactacgcccacctggtggccttcagagccagataccacctggtggacaaggagcacgacagcgccgagggcagccacaccagcggccagagcaacggcagagaccaccaggccctggccaaggccgtgcaggtgcaccaggacaccctgagaaccatgtacttcgcctag

SEQ ID NO: 63141 - protein, 237 aa, Artificial Sequence
  derived and/or modified sequence
MALEAAGGPPEETLSLWKREQARLKAHVVDRDTEAWQRDPAFSGLQRVGGVDVSFVKGDSVRACASLVVLSFPELEVLLVDGNGVLHHRGFGVACHLGVLTDLPCVGVAKKLLQVDGLENNALHKEKIRLLQTRGDSFPLLGDSGTVLGMALRSHDRSTRPLYISVGHRMSLEAAVRLTCCCCRFRIPEPVRQADICSREHIRKSLGLPGPPTPRSPKAQRPVACPKGDSGESSALC

SEQ ID NO: 63142 - DNA, 714 bp, Artificial Sequence
  derived and/or modified sequence
atggccctggaggccgccggcggcccccccgaggagaccctgagcctgtggaagagagagcaggccagactgaaggcccacgtggtggacagagacaccgaggcctggcagagagaccccgccttcagcggcctgcagagagtgggcggcgtggacgtgagcttcgtgaagggcgacagcgtgagagcctgcgccagcctggtggtgctgagcttccccgagctggaggtgctgctggtggacggcaacggcgtgctgcaccacagaggcttcggcgtggcctgccacctgggcgtgctgaccgacctgccctgcgtgggcgtggccaagaagctgctgcaggtggacggcctggagaacaacgccctgcacaaggagaagatcagactgctgcagaccagaggcgacagcttccccctgctgggcgacagcggcaccgtgctgggcatggccctgagaagccacgacagaagcaccagacccctgtacatcagcgtgggccacagaatgagcctggaggccgccgtgagactgacctgctgctgctgcagattcagaatccccgagcccgtgagacaggccgacatctgcagcagagagcacatcagaaagagcctgggcctgcccggcccccccacccccagaagccccaaggcccagagacccgtggcctgccccaagggcgacagcggcgagagcagcgccctgtgctag

SEQ ID NO: 63143 - DNA, 714 bp, Artificial Sequence
  derived and/or modified sequence
atggctctggaggctgccggggggcctccagaagaaacactctccctgtggaagcgggagcaggccagattaaaagcacacgtggttgacagggacaccgaagcttggcaacgggacccagccttttctggcctgcagagagtggggggtgtggacgtctcttttgtcaagggcgactcggtaagagcgtgtgcatcgttggtagtactctctttcccagagttggaagtgcttctagtggacggcaatggtgtgctgcaccatagaggttttggtgtggcctgccacctcggagtcttaactgacctgccatgcgtaggtgtggcaaagaagctgctacaggtggacggtctggagaacaatgccttacacaaggaaaaaatcaggttgctgcaaactaggggtgacagctttccactgttaggagacagcgggactgtgttggggatggccctacggtcacacgatagaagcacaagacctttatatatctctgtaggccatcggatgagcctggaggccgctgtgcggctgacatgctgctgttgtcggttcagaatcccagagcctgtgagacaagccgatatctgcagccgcgagcacattagaaagtcattaggattaccagggccacccactcccagaagccctaaggctcagcgcccggttgcgtgccctaagggggatagtggcgagagttctgcactgtgttag

SEQ ID NO: 63144 - DNA, 2680 bp, Artificial Sequence
  derived and/or modified sequence
gtgcggaaggggtgcccgggacgaagccatggccctggaggcggcgggagggccgccggaggaaacgctgtcactgtggaaacgggagcaagctcggctgaaggcccacgtcgtagaccgggacaccgaggcgtggcagcgagaccccgccttctcgggtctgcagagggtcgggggcgttgacgtgtccttcgtgaaaggggacagtgtccgcgcttgtgcttccctggtggtgctcagcttccctgagctcgaggtccttcttgtggatggaaacggggtactccaccaccgaggctttggggtggcctgccaccttggcgtccttacagacctgccgtgtgttggggtggccaagaaacttctgcaggtggatgggctggagaacaacgccctgcacaaggagaagatccgactcctgcagactcgaggagactcattccctctgctgggagactctgggactgtcctgggaatggccctgaggagccacgaccgcagcaccaggcccctctacatctccgtgggccacaggatgagcctggaggccgctgtgcgcctgacttgctgctgctgcaggttccggatcccagagcccgtgcgccaggctgacatctgctcccgagagcacatccgcaagtcgctgggactccccgggccacccacaccgaggagcccgaaggcgcagaggccagtggcatgccccaaaggagactccggagagtcctcagcactttgttgaacgtggtggtgagagcacacgtcctcgtctcattcctgatcgaacgcggtggtgagagcacacgtcctcgtctcgttcctgatcgaacgcggtggtgagagcacacatcctcgtctcgttcctgatcgaacgcggtggtgagagcacacgtcctcgtctcgttcctgatcgaacgtggtggtgagagcacacgtccttgtcttgttcctgatcttaagggaacgtttgcagtctttcaccactagatgtgatgtgagctgttagattttcaaggatgctcttcatccagctgaagacggtcccttctagtcctaatttgttaagtgtttttatccttaaagggtactggattttgtcaaatgcttttctggcctctattgaaaagatcctgtgttcttctgtgaatatgaggtgttacattgattgattttcatatgttgagccagtttccatttgtggaatacatctaactcggtcatggtgtataatccatttactctgctgctgaatgtgatttgcttgtattttggtgcggatttttacatctgtatttataagggatattggtctggtgtttttttatgatgtcttcctttggttttgatatcaggataatattagcctcatagattgggttaggaaatgttctctcctccgttttttttggaagagagagattggtgttaattcttgctagaacctttggtagaatttgccagtaagcctatctggtcttgggtctttgggaggattttgattcgattcaatctatgtatttgttatagatcgttcggattgtccatccttgagtcagttgctagcttgtgtgtttcttggagtttttccgtttcgtccatgttatctcatctgttggcataccgtcgttcacgggattttattgatgtgtgtgaggtctctgagaacgtccctgccttcactcctgcttttagtcactggcatcttcttttaacttgggccatctggccgtgcatggttttgggagagtcctccttgactctgcagatgctgagcagtgatctggctgggaaaggggaccaggagtgcagggcacctgctgaggactcacctaagcccaagagtcagagagtcggagctccaaccacatctgcctgcatgcctttcccaggctctccccaggcggacagccagcaccccctccccaaagaccgggcagttcctgaccagcaccccaccaagtcctcagtaaggcctgtctttgggggagcagggtttcaggaggacagtgggggtggtgtagaactcatggctggcggttccgggcctctcaggaagctttgccactgggcttggggttaagtgggtgtggggctccgaaccctaaatgggtgagagttgaaatgaaagcggcacctgtagtccgtttggggtgcaggtgtgtgccaggggtcttcagccccggctgatggccacatgaaccacatgaggagaggcagggcgtgtcagcagcaaacctaagtgtgtgctcatttctgtgggcccttactctgtgacactgcagctctccagagagacgctttgaaaacaaaacaggaaagaacacacggccccgcgtctgttgcctgagtcactgtattccttaaaaggtgaaggaccctggtccttggcttttcgtgcacatgagaaaatgttggccaaggttagcgattatgcttctgtaatctgtaaccagaagtgctcttatgcccaaaccttgatgtgattctgctgtaatgtaacttcggagccagctggatggatgtgactgtgcaggtcctgagccccggcccccgtaaccaagcagtgggccgagacactgagccgggcagtcaaacaggagctctctaaggctgctcccgggctgggacctgggtctaggattctcagtaagacctttgaataaaactaacttgaattctt

SEQ ID NO: 63145 - DNA, 714 bp, Artificial Sequence
  derived and/or modified sequence
atggccctggaggccgccggcggccccccagaggagaccctgagcctgtggaagcgggagcaggcccggctgaaggcccacgtggtggaccgggacacagaggcctggcagagggaccctgccttcagcggcctgcagagggtgggcggcgtggatgtgtcctttgtgaagggggacagcgtgcgggcctgtgccagcctggtggtgctgtccttccctgagctggaggtgctgctggtggatggaaatggagtgctgcaccaccggggctttggagtggcctgccacctgggcgtgctgacagacctgccctgtgtgggcgtggccaagaagctgctgcaggtggatggcctggagaacaatgccctgcacaaggagaagatccggctgctgcagaccaggggggacagcttccccctgctgggggacagcggcaccgtgctgggcatggccctgcggagccatgacaggagcacccggcccctgtacatctctgtgggccacaggatgagcctggaggccgctgtgcggctgacctgctgctgctgccgcttccgcatccctgagcctgtgcggcaggccgacatctgcagccgggagcacatcaggaagagcctgggcctgcccggcccccccacccccaggagccccaaggcccagaggcctgtggcctgccccaagggggacagcggggagagcagcgccctgtgctag

SEQ ID NO: 63146 - DNA, 714 bp, Artificial Sequence
  derived and/or modified sequence
atggccctggaggccgccggcggcccccccgaggagaccctgagcctttggaagcgggaacaagcaagattgaaagcgcacgtggtggatagggacactgaggcctggcagcgggatccagctttttccggattacagcgcgtgggcggcgttgatgttagcttcgtgaagggggattccgtcagggcgtgtgccagcctggtagtcctctctttccccgaactggaggtgctgttggttgatggcaatggcgtgttacaccatcgaggcttcggagtcgcctgtcacttgggtgtcttaaccgatttgccttgtgtcggggttgccaaaaagctgctgcaggtagatgggctagagaacaatgctctgcacaaagagaaaataaggctgctgcagacccgcggcgatagttttcctctgttaggggactctggcaccgtcctcggcatggcactacgctcacacgaccgatccactcgccctctgtatatctctgtcgggcatcgcatgagtctcgaggcggcggttaggctgacctgctgttgttgtaggtttaggatccccgagcctgtgaggcaggccgacatttgtagccgcgaacatatccgcaagtctctgggcctgcctggtcctcctactccacgatctcctaaagcacagcggcctgttgcgtgccccaagggcgacagcggtgagtctagcgcgctctgctag

SEQ ID NO: 63147 - DNA, 714 bp, Artificial Sequence
  derived and/or modified sequence
atggcactcgaagctgctggcggtcctccagaggagaccctgagcctgtggaagcgcgaacaggcgcgactaaaggcccatgtcgtggaccgagataccgaagcttggcagcgggacccggcattttccggactacaacgagtaggcggagtggacgtatccttcgtcaaaggggatagtgtgcgcgcatgcgcttccctggtggtgctgtcatttcccgaactggaggttctactagtggatgggaacggcgttctccatcacaggggctttggggtcgcctgtcacctgggagtgctcacggacctgccgtgcgtgggggtggctaaaaagctccttcaggttgatggtctggagaacaatgccctccacaaggagaaaattaggctgctgcaaacccgcggagatagctttcccctgctgggagacagtggaactgtgctcggaatggccttgcgatctcacgatagatctaccaggcctctgtacatatcagtgggtcacagaatgagcttagaagcagccgtgaggctgacttgttgttgctgcagattcaggattcccgagcctgtgaggcaggccgatatctgctctcgagagcacatccgaaaatctctgggcctcccgggacctcccacccctagatcccccaaagcgcagaggccggtagcttgtccgaagggagactcaggggaaagcagtgctttgtgttag

SEQ ID NO: 63148 - protein, 264 aa, Artificial Sequence
  derived and/or modified sequence
MALEAAGGPPEETLSLWKREQARLKAHVVDRDTEAWQRDPAFSGLQRVGGVDVSFVKGDSVRACASLVVLSFPELEVLLVDGNGVLHHRGFGVACHLGVLTDLPCVGVAKKLLQVDGLENNALHKEKIRLLQTRGDSFPLLGDSGTVLGMALRSHDRSTRPLYISVGHRMSLEAAVRLTCCCCRFRIPEPVRQADICSREHIRKSLGLPGPPTPRSPKAQRPVACPKGDSGESSGEGQPPQDHSPGPRTAPRPGSQEQAGKDWQ

SEQ ID NO: 63149 - DNA, 795 bp, Artificial Sequence
  derived and/or modified sequence
atggccctggaggccgccggcggcccccccgaggagaccctgagcctgtggaagagagagcaggccagactgaaggcccacgtggtggacagagacaccgaggcctggcagagagaccccgccttcagcggcctgcagagagtgggcggcgtggacgtgagcttcgtgaagggcgacagcgtgagagcctgcgccagcctggtggtgctgagcttccccgagctggaggtgctgctggtggacggcaacggcgtgctgcaccacagaggcttcggcgtggcctgccacctgggcgtgctgaccgacctgccctgcgtgggcgtggccaagaagctgctgcaggtggacggcctggagaacaacgccctgcacaaggagaagatcagactgctgcagaccagaggcgacagcttccccctgctgggcgacagcggcaccgtgctgggcatggccctgagaagccacgacagaagcaccagacccctgtacatcagcgtgggccacagaatgagcctggaggccgccgtgagactgacctgctgctgctgcagattcagaatccccgagcccgtgagacaggccgacatctgcagcagagagcacatcagaaagagcctgggcctgcccggcccccccacccccagaagccccaaggcccagagacccgtggcctgccccaagggcgacagcggcgagagcagcggcgagggccagcccccccaggaccacagccccggccccagaaccgcccccagacccggcagccaggagcaggccggcaaggactggcagtag

SEQ ID NO: 63150 - DNA, 795 bp, Artificial Sequence
  derived and/or modified sequence
atggcccttgaggccgctggcgggcctccagaagagaccctctctctctggaagagagaacaagccagattgaaagcgcacgtcgtcgatcgagataccgaagcttggcaacgggatcccgcgtttagcggactccaacgcgttggaggagtggacgtctcttttgttaagggagactccgtgcgagcttgtgccagcttggtggtactctcctttcctgaactcgaagtgttactcgtcgacgggaacggcgttctccatcataggggatttggagtggcttgccacctgggagtgttgaccgacctcccatgcgtgggagtggccaagaaattattacaggtcgatggcctagaaaacaatgcccttcataaggagaagattcgtctgctccagacccggggggacagctttccactgctgggggacagtggcacagtgctcggcatggcgcttagatcgcatgaccggagcaccagacctttatacatcagtgtcggacaccggatgagtctggaagctgcagtccgtctcacttgttgctgttgcagattccggatccccgagcctgtgcgccaagccgacatctgttcacgggagcacattcgcaaatctctggggttacccgggccccccactccaagaagcccaaaggctcagaggcccgtggcctgcccaaaaggagacagcggcgaatcctcaggggaaggccaacccccacaggatcacagccctggccctcgtaccgcccctcgcccgggcagccaggaacaagcgggtaaggattggcagtag

SEQ ID NO: 63151 - DNA, 1226 bp, Artificial Sequence
  derived and/or modified sequence
gggacgaagccatggccctggaggcggcgggagggccgccggaggaaacgctgtcactgtggaaacgggagcaagctcggctgaaggcccacgtcgtagaccgggacaccgaggcgtggcagcgagaccccgccttctcgggtctgcagagggtcgggggcgttgacgtgtccttcgtgaaaggggacagtgtccgcgcttgtgcttccctggtggtgctcagcttccctgagctcgaggtccttcttgtggatggaaacggggtactccaccaccgaggctttggggtggcctgccaccttggcgtccttacagacctgccgtgtgttggggtggccaagaaacttctgcaggtggatgggctggagaacaacgccctgcacaaggagaagatccgactcctgcagactcgaggagactcattccctctgctgggagactctgggactgtcctgggaatggccctgaggagccacgaccgcagcaccaggcccctctacatctccgtgggccacaggatgagcctggaggccgctgtgcgcctgacttgctgctgctgcaggttccggatcccagagcccgtgcgccaggctgacatctgctcccgagagcacatccgcaagtcgctgggactccccgggccacccacaccgaggagcccgaaggcgcagaggccagtggcatgccccaaaggagactccggagagtcctcaggtgagggccagcccccacaggaccacagcccaggccccaggacagccccaaggccaggctcccaggagcaggcgggcaaggactggcagtagggtggaactgggcaccatgaagacaagaaggccaccggccaccccgttctggcctcaggacactgaccacccctgggggtggtctagggacttaggggaacctcatctcagccgcaggtggagcacccagtccccaaagacaggctgaccgcaccaccccagggggacgccgcagcacagcccagcaccaggtggggcagaggtgaccacggcccctctttgctccgtcatcggctggtcagctgtggtcacggtgcctcagaggacagatctctatgggggcaagtgccagatcctgagagcgcatgagacgctttcccggagccgacgaaggggactcggagctgcagcctgcacgacccctgcagcctgtgctttgcccacccctttcaatagatggaacttgcttgctctttttta

SEQ ID NO: 63152 - DNA, 795 bp, Artificial Sequence
  derived and/or modified sequence
atggccctggaggccgccggcggccccccagaggagaccctgagcctgtggaagcgggagcaggcccggctgaaggcccacgtggtggaccgggacacagaggcctggcagagggaccctgccttcagcggcctgcagagggtgggcggcgtggatgtgtcctttgtgaagggggacagcgtgcgggcctgtgccagcctggtggtgctgtccttccctgagctggaggtgctgctggtggatggaaatggagtgctgcaccaccggggctttggagtggcctgccacctgggcgtgctgacagacctgccctgtgtgggcgtggccaagaagctgctgcaggtggatggcctggagaacaatgccctgcacaaggagaagatccggctgctgcagaccaggggggacagcttccccctgctgggggacagcggcaccgtgctgggcatggccctgcggagccatgacaggagcacccggcccctgtacatctctgtgggccacaggatgagcctggaggccgctgtgcggctgacctgctgctgctgccgcttccgcatccctgagcctgtgcggcaggccgacatctgcagccgggagcacatcaggaagagcctgggcctgcccggcccccccacccccaggagccccaaggcccagaggcctgtggcctgccccaagggggacagcggggagagcagcggggagggccagcccccccaggaccacagccctggccccaggacagcccccaggcctggcagccaggagcaggccggcaaggactggcagtag

SEQ ID NO: 63153 - DNA, 795 bp, Artificial Sequence
  derived and/or modified sequence
atggccctggaggccgccggcggcccccccgaggagaccctgagcctgtggaagagggagcaagccagactcaaggctcatgtagtggacagggacactgaggcctggcagcgcgatcctgccttcagcggactgcagcgggtcggtggcgtcgatgtctccttcgttaaaggggacagtgtgagagcatgcgctagcctcgtcgtgctatccttcccagaattagaggtgcttctggtcgacggaaatggcgtgctgcaccaccgaggcttcggagtcgcttgccacctgggcgtgctgacagacttgccttgcgtaggagtggcaaaaaagctgttgcaagtagacggcttggagaacaacgccttgcataaggagaagattaggttattgcagacaaggggcgattcattccccttgctgggtgacagcggtaccgtgctgggtatggcactgcggtcacacgacagaagcacgcggcctctgtacatttctgtaggacacaggatgtccctcgaagcggctgtgaggcttacctgttgttgctgtaggtttcggataccagagcccgtgagacaggccgacatttgctcaagggaacatatacgaaagtcgcttggcctccccggtcctcctaccccccggagccccaaggcacagcggccggtggcctgtccaaaaggagacagtggagaatcatccggcgaaggccagccgcctcaggatcacagtcccgggccacggacagccccacgccctggatcccaagagcaagccggcaaggactggcagtag

SEQ ID NO: 63154 - DNA, 795 bp, Artificial Sequence
  derived and/or modified sequence
atggccctcgaagctgcaggcggacccccagaagagacactgagtctatggaaacgcgagcaggcacgactgaaagcccatgtggttgatagagataccgaggcatggcagcgggaccctgccttttcagggctacagagagtgggcggagtggacgtttcctttgttaagggcgactctgtgcgcgcttgtgcttctttagtggtgctttcattccccgaactggaggtccttctggtggacggtaatggcgtgttgcatcatcggggattcggggtcgcttgtcacctcggagtgctaaccgacctcccctgcgttggggtcgccaagaaactattacaagtggacgggctcgagaataacgccttgcataaggagaagatcaggctactgcaaaccaggggcgacagtttccccctactgggggatagcggcacagtgttgggaatggcactgcggtcacatgatcgatctactcggcctttatacatatccgtgggccaccgcatgagccttgaggctgcagtccgcttaacctgttgttgttgccgcttccgaattcccgagcccgtaagacaggccgacatttgctctcgtgaacacattcggaagtctcttggcctgcccggtcctccaacccccagaagccctaaggcccagcgccctgtggcctgtcctaagggtgacagcggagagtcatctggagagggacaacctcctcaagaccacagcccaggaccccgaactgccccaaggcccggatcccaggagcaggccggtaaagattggcagtag

SEQ ID NO: 63155 - protein, 214 aa, Artificial Sequence
  derived and/or modified sequence
MRPCQVPGAATGPRAMWLCPLALTLILMAASGAACEVKDVCVGSPGIPGKRGEKGEAGERGPPGLPAHLDEELQATLHDFRHQILQTRGALSLQGSIMTVGEKVFSSNGQSITFDAIQEACARAGGRIAVPRNPEENEAIASFVKKYNTYAYVGLTEGPSPGDFRYSDGTPVNYTNWYRGEPAGRGKEQCVEMYTDGQWNDRNCLYSRLTICEF

SEQ ID NO: 63156 - DNA, 645 bp, Artificial Sequence
  derived and/or modified sequence
atgagaccctgccaggtgcccggcgccgccaccggccccagagccatgtggctgtgccccctggccctgaccctgatcctgatggccgccagcggcgccgcctgcgaggtgaaggacgtgtgcgtgggcagccccggcatccccggcaagagaggcgagaagggcgaggccggcgagagaggcccccccggcctgcccgcccacctggacgaggagctgcaggccaccctgcacgacttcagacaccagatcctgcagaccagaggcgccctgagcctgcagggcagcatcatgaccgtgggcgagaaggtgttcagcagcaacggccagagcatcaccttcgacgccatccaggaggcctgcgccagagccggcggcagaatcgccgtgcccagaaaccccgaggagaacgaggccatcgccagcttcgtgaagaagtacaacacctacgcctacgtgggcctgaccgagggccccagccccggcgacttcagatacagcgacggcacccccgtgaactacaccaactggtacagaggcgagcccgccggcagaggcaaggagcagtgcgtggagatgtacaccgacggccagtggaacgacagaaactgcctgtacagcagactgaccatctgcgagttctag

SEQ ID NO: 63157 - DNA, 645 bp, Artificial Sequence
  derived and/or modified sequence
atgaggccctgtcaggttcccggcgctgccacaggacctagggctatgtggctgtgccctttagctttgacacttatccttatggccgcttctggagccgcatgtgaggttaaagatgtgtgcgtgggctcccccggcattccaggaaaacggggagagaaaggcgaagccggcgagaggggcccccccgggctgcccgcccacttggacgaggaattgcaggccacgctacacgattttaggcaccagatcctgcagactcgtggagctttgagcctccaaggcagcattatgaccgtgggcgagaaggtcttctcctctaatggccagtctataacttttgatgccatacaagaagcttgcgcaagagccgggggccgcatcgctgtcccacgtaatccggaagaaaacgaggcaattgcctcctttgttaagaagtacaatacttacgcatatgtggggctgactgaaggaccatcccccggtgacttccgttactccgatggaacccccgtcaattataccaattggtataggggggaaccagctgggaggggtaaggaacagtgcgtcgagatgtacactgatggacagtggaacgataggaattgcctgtatagtcgcttgaccatttgcgagttttag

SEQ ID NO: 63158 - DNA, 645 bp, Artificial Sequence
  derived and/or modified sequence
atgaggccctgccaggtgcctggagctgccaccggcccccgggccatgtggctgtgccccctggccctgaccctcatcctgatggccgccagcggggccgcctgtgaggtgaaggatgtgtgtgtgggcagccctggcatccctgggaagagaggagagaagggggaggccggggagcggggccccccaggcctgcctgcccacctggatgaggagctgcaggccaccctgcatgacttccgccaccagatcctgcagaccaggggggccctgagcctgcagggcagcatcatgacagtgggggagaaggtgttcagcagcaatggccagagcatcacctttgatgccatccaggaggcctgtgcccgggccggcggcagaattgctgtgcccaggaaccctgaggagaatgaggccatcgccagctttgtgaagaagtacaacacctacgcctacgtgggcctgacagagggccccagccctggggacttccgctacagtgatggcacccctgtgaactacaccaactggtacagaggagagcctgctggccggggcaaggagcagtgtgtggagatgtacacagatggccagtggaatgacaggaactgcctgtacagccggctgaccatctgtgagttctag

SEQ ID NO: 63159 - DNA, 645 bp, Artificial Sequence
  derived and/or modified sequence
atgcggccctgccaggtgcccggcgccgccaccggcccccgggccatgtggttatgccctctggctctcaccctgatcctcatggccgcttccggcgctgcctgcgaggtgaaagacgtctgcgttggctcacctgggattcccgggaagcggggcgaaaaaggtgaagccggggaacggggccctccgggactccccgcacacctcgacgaggagctccaggcgactctacacgatttccggcaccagatcctgcagacaaggggggcactctcattgcagggatccatcatgaccgtgggcgaaaaggtcttttcctccaatgggcaatccatcaccttcgacgcaatacaggaggcctgtgccagggcaggaggacggattgcggtccccaggaaccctgaggaaaacgaggccatagctagttttgtgaagaaatacaacacctacgcttatgttggtctcacagaggggccaagcccaggagacttcaggtactctgacggaacccctgtgaactatactaactggtaccgtggcgaaccagcaggaaggggaaaggagcagtgcgtggagatgtacacagacgggcaatggaacgaccgaaactgcctgtattctcggctgacaatttgtgaattctag

SEQ ID NO: 63160 - DNA, 645 bp, Artificial Sequence
  derived and/or modified sequence
atgcggccatgccaggtgcctggcgcagccaccggtcctcgggctatgtggctgtgcccgttggccttaacactgatccttatggcggcttcgggagccgcttgcgaggtgaaggatgtatgcgtagggtccccaggtattcctggaaaaagaggcgagaagggagaagcaggtgagcgcggtcctccgggtctaccagcacatctggacgaggagctgcaggccaccctccacgatttccgccatcagatacttcagactaggggagcgctctctttgcagggatcaattatgactgtgggcgagaaggtcttttcttcaaacggacagtctattacgttcgacgccatccaggaggcatgtgccagagccggtggcagaatcgctgtgcccaggaatcccgaagagaacgaggccatagcctcctttgtgaaaaagtataatacgtacgcctatgtaggcctgaccgagggaccctcccctggggacttccggtattctgatggtaccccggttaactacacgaattggtatcgcggtgagcctgctggaaggggtaaggaacagtgtgtggaaatgtatactgacggccaatggaatgatcgtaactgtttgtatagccggttaacaatttgcgaattctag

SEQ ID NO: 63161 - DNA, 2002 bp, Artificial Sequence
  derived and/or modified sequence
atgaggccatgccaggtgccaggagcagcgactggacccagagccatgtggctgtgccctctggccctcaccctcatcttgatggcagcctctggtgctgcgtgcgaagtgaaggacgtttgtgttggaagccctggtatccccggcaagcgtggagagaagggggaggctggcgagagaggccctccagggcttccagctcatctagatgaggagctccaagccacactccacgacttcagacatcaaatcctgcagacaaggggagccctcagtctgcagggctccataatgacagtaggagagaaggtcttctccagcaatgggcagtccatcacttttgatgccattcaggaggcatgtgccagagcaggcggccgcattgctgtcccaaggaatccagaggaaaatgaggccattgcaagcttcgtgaagaagtacaacacatatgcctatgtaggcctgactgagggtcccagccctggagacttccgctactcagatgggacccctgtaaactacaccaactggtaccgaggggagcctgcaggtcggggaaaagagcagtgtgtggagatgtacacagatgggcagtggaatgacaggaactgcctgtactcccgactgaccatctgtgagttctgagaggcatttaggccatgggacagggaggatcctgtctggccttcagtttccatccccaggatccacttggtctgtgagatgctagaactccctttcaacagaattcacttgtggctattagagctggaggcacccttagccacttcattcccctgatgggccctgactcttccccataatcactgaccagccttgacactccccttgcaaaccatcccagcactgcaccccaggcagccactcctagccttggcctttggcatgagatggaggcctccttattccccatctggtccagttccttcacttacagatggcagcagtgaggccttggggtagaaggatcctccaaagtcacacagagtgcctgcctcctggtcccctcagctctgcctctgcagcccactgcctgcccagtgccatcaggatgagcagtaccggccaagcataatgacagagagaggcagatttcagggaagccctgactgtgtggagctaaggacacagtggagattctctggcactctgaggtctctgtggcaggcctggtcaggctctccaggtggtcagagggcccagtggtgccccagcacggtggtgcccaagccaaccctgtgactgacatgtacgattcactcctttgagtctttggatgccaactcagccccctgacctggaggcagccggccaaggcctctagggaagagccccccactgcagacatgacccgagtaactttctgctgatgaacaaatctgcaccccacttcagacctcggtgggcattcacaccaccccccatgccaccggctccactttccccttttattaatacattcacccagataatcattaaaattaacatgtgccaggtcttaggatgtgtcttggggtgggcacagtacccggtgactcttggggatatttatttattttccctgagcctatatcttcatctgtgaaatggggataaaaatacttgttgctgtcacaattattaccatctctccagctagcaaaattactaccagagccgttactacacacaaaggctattgaccgagcacataccatgtgccacacaccttgacaaaatcttttaatacagtttattatgtactattcaatctttacacaatgtcacgggaccagtattgtttacccaattttttataaggacactgaagcttagaggagtgaaatgttttgagtgttatttcagagagcaaatggcaaagactggatccaaacccatcttcctggacctgaagttcatgctcccagccaccccacccctgagctgaataaagatgatttaagcataataaatcgttagtgtgttcacatgagtttccata

SEQ ID NO: 63162 - protein, 2626 aa, Artificial Sequence
  derived and/or modified sequence
MGEKVSEAPEPVPRGCSGHGSRTPASALVAASSPGASSAESSSGSETLSEEGEPGGFSREHQPPPPPPLGGTLGARAPAAWAPASVLLERGVLALPPPLPGGAVPPAPRGSSASQEEQDEELDHILSPPPMPFRKCSNPDVASGPGKSLKYKRQLSEDGRQLRRGSLGGALTGRYLLPNPVAGQAWPASAETSNLVRMRSQALGQSAPSLTASLKELSLPRRGSFCRTSNRKSLIGNGQSPALPRPHSPLSAHAGNSPQDSPRNFSPSASAHFSFARSLNRTDGRRWSLASLPSSGYGTNTPSSTVSSSCSSQEKLHQLPYQPTPDELHFLSKHFCTTESIATENRCRNTPMRPRSRSLSPGRSPACCDHEIIMMNHVYKERFPKATAQMEERLKEIITSYSPDNVLPLADGVLSFTHHQIIELARDCLDKSHQGLITSRYFLELQHKLDKLLQEAHDRSESGELAFIKQLVRKILIVIARPARLLECLEFDPEEFYYLLEAAEGHAKEGQGIKTDIPRYIISQLGLNKDPLEEMAHLGNYDSGTAETPETDESVSSSNASLKLRRKPRESDFETIKLISNGAYGAVYFVRHKESRQRFAMKKINKQNLILRNQIQQAFVERDILTFAENPFVVSMYCSFETRRHLCMVMEYVEGGDCATLMKNMGPLPVDMARMYFAETVLALEYLHNYGIVHRDLKPDNLLVTSMGHIKLTDFGLSKVGLMSMTTNLYEGHIEKDAREFLDKQVCGTPEYIAPEVILRQGYGKPVDWWAMGIILYEFLVGCVPFFGDTPEELFGQVISDEINWPEKDEAPPPDAQDLITLLLRQNPLERLGTGGAYEVKQHRFFRSLDWNSLLRQKAEFIPQLESEDDTSYFDTRSEKYHHMETEEEDDTNDEDFNVEIRQFSSCSHRFSKVFSSIDRITQNSAEEKEDSVDKTKSTTLPSTETLSWSSEYSEMQQLSTSNSSDTESNRHKLSSGLLPKLAISTEGEQDEAASCPGDPHEEPGKPALPPEECAQEEPEVTTPASTISSSTLSVGSFSEHLDQINGRSECVDSTDNSSKPSSEPASHMARQRLESTEKKKISGKVTKSLSASALSLMIPGDMFAVSPLGSPMSPHSLSSDPSSSRDSSPSRDSSAASASPHQPIVIHSSGKNYGFTIRAIRVYVGDSDIYTVHHIVWNVEEGSPACQAGLKAGDLITHINGEPVHGLVHTEVIELLLKSGNKVSITTTPFENTSIKTGPARRNSYKSRMVRRSKKSKKKESLERRRSLFKKLAKQPSPLLHTSRSFSCLNRSLSSGESLPGSPTHSLSPRSPTPSYRSTPDFPSGTNSSQSSSPSSSAPNSPAGSGHIRPSTLHGLAPKLGGQRYRSGRRKSAGNIPLSPLARTPSPTPQPTSPQRSPSPLLGHSLGNSKIAQAFPSKMHSPPTIVRHIVRPKSAEPPRSPLLKRVQSEEKLSPSYGSDKKHLCSRKHSLEVTQEEVQREQSQREAPLQSLDENVCDVPPLSRARPVEQGCLKRPVSRKVGRQESVDDLDRDKLKAKVVVKKADGFPEKQESHQKSHGPGSDLENFALFKLEEREKKVYPKAVERSSTFENKASMQEAPPLGSLLKDALHKQASVRASEGAMSDGRVPAEHRQGGGDFRRAPAPGTLQDGLCHSLDRGISGKGEGTEKSSQAKELLRCEKLDSKLANIDYLRKKMSLEDKEDNLCPVLKPKMTAGSHECLPGNPVRPTGGQQEPPPASESRAFVSSTHAAQMSAVSFVPLKALTGRVDSGTEKPGLVAPESPVRKSPSEYKLEGRSVSCLKPIEGTLDIALLSGPQASKTELPSPESAQSPSPSGDVRASVPPVLPSSSGKKNDTTSARELSPSSLKMNKSYLLEPWFLPPSRGLQNSPAVSLPDPEFKRDRKGPHPTARSPGTVMESNPQQREGSSPKHQDHTTDPKLLTCLGQNLHSPDLARPRCPLPPEASPSREKPGLRESSERGPPTARSERSAARADTCREPSMELCFPETAKTSDNSKNLLSVGRTHPDFYTQTQAMEKAWAPGGKTNHKDGPGEARPPPRDNSSLHSAGIPCEKELGKVRRGVEPKPEALLARRSLQPPGIESEKSEKLSSFPSLQKDGAKEPERKEQPLQRHPSSIPPPPLTAKDLSSPAARQHCSSPSHASGREPGAKPSTAEPSSSPQDPPKPVAAHSESSSHKPRPGPDPGPPKTKHPDRSLSSQKPSVGATKGKEPATQSLGGSSREGKGHSKSGPDVFPATPGSQNKASDGIGQGEGGPSVPLHTDRAPLDAKPQPTSGGRPLEVLEKPVHLPRPGHPGPSEPADQKLSAVGEKQTLSPKHPKPSTVKDCPTLCKQTDNRQTDKSPSQPAANTDRRAEGKKCTEALYAPAEGDKLEAGLSFVHSENRLKGAERPAAGVGKGFPEARGKGPGPQKPPTEADKPNGMKRSPSATGQSSFRSTALPEKSLSCSSSFPETRAGVREASAASSDTSSAKAAGGMLELPAPSNRDHRKAQPAGEGRTHMTKSDSLPSFRVSTLPLESHHPDPNTMGGASHRDRALSVTATVGETKGKDPAPAQPPPARKQNVGRDVTKPSPAPNTDRPISLSNEKDFVVRQRRGKESLRSSPHKKAL

SEQ ID NO: 63163 - protein, 2623 aa, Artificial Sequence
  derived and/or modified sequence
MGEKVSEAPEPVPRGCSGHGSRTPASALVAASSPGASSAESSSGSETLSEEGEPGGFSREHQPPPPPPLGGTLGARAPAAWAPASVLLERGVLALPPPLPGGAVPPAPRGSSASQEEQDEELDHILSPPPMPFRKCSNPDVASGPGKSLKYKRQLSEDGRQLRRGSLGGALTGRYLLPNPVAGQAWPASAETSNLVRMRSQALGQSAPSLTASLKELSLPRRGSFCRTSNRKSLIGNGQSPALPRPHSPLSAHAGNSPQDSPRNFSPSASAHFSFARRTDGRRWSLASLPSSGYGTNTPSSTVSSSCSSQEKLHQLPYQPTPDELHFLSKHFCTTESIATENRCRNTPMRPRSRSLSPGRSPACCDHEIIMMNHVYKERFPKATAQMEERLKEIITSYSPDNVLPLADGVLSFTHHQIIELARDCLDKSHQGLITSRYFLELQHKLDKLLQEAHDRSESGELAFIKQLVRKILIVIARPARLLECLEFDPEEFYYLLEAAEGHAKEGQGIKTDIPRYIISQLGLNKDPLEEMAHLGNYDSGTAETPETDESVSSSNASLKLRRKPRESDFETIKLISNGAYGAVYFVRHKESRQRFAMKKINKQNLILRNQIQQAFVERDILTFAENPFVVSMYCSFETRRHLCMVMEYVEGGDCATLMKNMGPLPVDMARMYFAETVLALEYLHNYGIVHRDLKPDNLLVTSMGHIKLTDFGLSKVGLMSMTTNLYEGHIEKDAREFLDKQVCGTPEYIAPEVILRQGYGKPVDWWAMGIILYEFLVGCVPFFGDTPEELFGQVISDEINWPEKDEAPPPDAQDLITLLLRQNPLERLGTGGAYEVKQHRFFRSLDWNSLLRQKAEFIPQLESEDDTSYFDTRSEKYHHMETEEEDDTNDEDFNVEIRQFSSCSHRFSKVFSSIDRITQNSAEEKEDSVDKTKSTTLPSTETLSWSSEYSEMQQLSTSNSSDTESNRHKLSSGLLPKLAISTEGEQDEAASCPGDPHEEPGKPALPPEECAQEEPEVTTPASTISSSTLSVGSFSEHLDQINGRSECVDSTDNSSKPSSEPASHMARQRLESTEKKKISGKVTKSLSASALSLMIPGDMFAVSPLGSPMSPHSLSSDPSSSRDSSPSRDSSAASASPHQPIVIHSSGKNYGFTIRAIRVYVGDSDIYTVHHIVWNVEEGSPACQAGLKAGDLITHINGEPVHGLVHTEVIELLLKSGNKVSITTTPFENTSIKTGPARRNSYKSRMVRRSKKSKKKESLERRRSLFKKLAKQPSPLLHTSRSFSCLNRSLSSGESLPGSPTHSLSPRSPTPSYRSTPDFPSGTNSSQSSSPSSSAPNSPAGSGHIRPSTLHGLAPKLGGQRYRSGRRKSAGNIPLSPLARTPSPTPQPTSPQRSPSPLLGHSLGNSKIAQAFPSKMHSPPTIVRHIVRPKSAEPPRSPLLKRVQSEEKLSPSYGSDKKHLCSRKHSLEVTQEEVQREQSQREAPLQSLDENVCDVPPLSRARPVEQGCLKRPVSRKVGRQESVDDLDRDKLKAKVVVKKADGFPEKQESHQKSHGPGSDLENFALFKLEEREKKVYPKAVERSSTFENKASMQEAPPLGSLLKDALHKQASVRASEGAMSDGRVPAEHRQGGGDFRRAPAPGTLQDGLCHSLDRGISGKGEGTEKSSQAKELLRCEKLDSKLANIDYLRKKMSLEDKEDNLCPVLKPKMTAGSHECLPGNPVRPTGGQQEPPPASESRAFVSSTHAAQMSAVSFVPLKALTGRVDSGTEKPGLVAPESPVRKSPSEYKLEGRSVSCLKPIEGTLDIALLSGPQASKTELPSPESAQSPSPSGDVRASVPPVLPSSSGKKNDTTSARELSPSSLKMNKSYLLEPWFLPPSRGLQNSPAVSLPDPEFKRDRKGPHPTARSPGTVMESNPQQREGSSPKHQDHTTDPKLLTCLGQNLHSPDLARPRCPLPPEASPSREKPGLRESSERGPPTARSERSAARADTCREPSMELCFPETAKTSDNSKNLLSVGRTHPDFYTQTQAMEKAWAPGGKTNHKDGPGEARPPPRDNSSLHSAGIPCEKELGKVRRGVEPKPEALLARRSLQPPGIESEKSEKLSSFPSLQKDGAKEPERKEQPLQRHPSSIPPPPLTAKDLSSPAARQHCSSPSHASGREPGAKPSTAEPSSSPQDPPKPVAAHSESSSHKPRPGPDPGPPKTKHPDRSLSSQKPSVGATKGKEPATQSLGGSSREGKGHSKSGPDVFPATPGSQNKASDGIGQGEGGPSVPLHTDRAPLDAKPQPTSGGRPLEVLEKPVHLPRPGHPGPSEPADQKLSAVGEKQTLSPKHPKPSTVKDCPTLCKQTDNRQTDKSPSQPAANTDRRAEGKKCTEALYAPAEGDKLEAGLSFVHSENRLKGAERPAAGVGKGFPEARGKGPGPQKPPTEADKPNGMKRSPSATGQSSFRSTALPEKSLSCSSSFPETRAGVREASAASSDTSSAKAAGGMLELPAPSNRDHRKAQPAGEGRTHMTKSDSLPSFRVSTLPLESHHPDPNTMGGASHRDRALSVTATVGETKGKDPAPAQPPPARKQNVGRDVTKPSPAPNTDRPISLSNEKDFVVRQRRGKESLRSSPHKKAL

SEQ ID NO: 63164 - DNA, 7881 bp, Artificial Sequence
  derived and/or modified sequence
atgggcgagaaggtgagcgaggcccccgagcccgtgcccagaggctgcagcggccacggcagcagaacccccgccagcgccctggtggccgccagcagccccggcgccagcagcgccgagagcagcagcggcagcgagaccctgagcgaggagggcgagcccggcggcttcagcagagagcaccagccccccccccccccccccctgggcggcaccctgggcgccagagcccccgccgcctgggcccccgccagcgtgctgctggagagaggcgtgctggccctgcccccccccctgcccggcggcgccgtgccccccgcccccagaggcagcagcgccagccaggaggagcaggacgaggagctggaccacatcctgagccccccccccatgcccttcagaaagtgcagcaaccccgacgtggccagcggccccggcaagagcctgaagtacaagagacagctgagcgaggacggcagacagctgagaagaggcagcctgggcggcgccctgaccggcagatacctgctgcccaaccccgtggccggccaggcctggcccgccagcgccgagaccagcaacctggtgagaatgagaagccaggccctgggccagagcgcccccagcctgaccgccagcctgaaggagctgagcctgcccagaagaggcagcttctgcagaaccagcaacagaaagagcctgatcggcaacggccagagccccgccctgcccagaccccacagccccctgagcgcccacgccggcaacagcccccaggacagccccagaaacttcagccccagcgccagcgcccacttcagcttcgccagaagcctgaacagaaccgacggcagaagatggagcctggccagcctgcccagcagcggctacggcaccaacacccccagcagcaccgtgagcagcagctgcagcagccaggagaagctgcaccagctgccctaccagcccacccccgacgagctgcacttcctgagcaagcacttctgcaccaccgagagcatcgccaccgagaacagatgcagaaacacccccatgagacccagaagcagaagcctgagccccggcagaagccccgcctgctgcgaccacgagatcatcatgatgaaccacgtgtacaaggagagattccccaaggccaccgcccagatggaggagagactgaaggagatcatcaccagctacagccccgacaacgtgctgcccctggccgacggcgtgctgagcttcacccaccaccagatcatcgagctggccagagactgcctggacaagagccaccagggcctgatcaccagcagatacttcctggagctgcagcacaagctggacaagctgctgcaggaggcccacgacagaagcgagagcggcgagctggccttcatcaagcagctggtgagaaagatcctgatcgtgatcgccagacccgccagactgctggagtgcctggagttcgaccccgaggagttctactacctgctggaggccgccgagggccacgccaaggagggccagggcatcaagaccgacatccccagatacatcatcagccagctgggcctgaacaaggaccccctggaggagatggcccacctgggcaactacgacagcggcaccgccgagacccccgagaccgacgagagcgtgagcagcagcaacgccagcctgaagctgagaagaaagcccagagagagcgacttcgagaccatcaagctgatcagcaacggcgcctacggcgccgtgtacttcgtgagacacaaggagagcagacagagattcgccatgaagaagatcaacaagcagaacctgatcctgagaaaccagatccagcaggccttcgtggagagagacatcctgaccttcgccgagaaccccttcgtggtgagcatgtactgcagcttcgagaccagaagacacctgtgcatggtgatggagtacgtggagggcggcgactgcgccaccctgatgaagaacatgggccccctgcccgtggacatggccagaatgtacttcgccgagaccgtgctggccctggagtacctgcacaactacggcatcgtgcacagagacctgaagcccgacaacctgctggtgaccagcatgggccacatcaagctgaccgacttcggcctgagcaaggtgggcctgatgagcatgaccaccaacctgtacgagggccacatcgagaaggacgccagagagttcctggacaagcaggtgtgcggcacccccgagtacatcgcccccgaggtgatcctgagacagggctacggcaagcccgtggactggtgggccatgggcatcatcctgtacgagttcctggtgggctgcgtgcccttcttcggcgacacccccgaggagctgttcggccaggtgatcagcgacgagatcaactggcccgagaaggacgaggcccccccccccgacgcccaggacctgatcaccctgctgctgagacagaaccccctggagagactgggcaccggcggcgcctacgaggtgaagcagcacagattcttcagaagcctggactggaacagcctgctgagacagaaggccgagttcatcccccagctggagagcgaggacgacaccagctacttcgacaccagaagcgagaagtaccaccacatggagaccgaggaggaggacgacaccaacgacgaggacttcaacgtggagatcagacagttcagcagctgcagccacagattcagcaaggtgttcagcagcatcgacagaatcacccagaacagcgccgaggagaaggaggacagcgtggacaagaccaagagcaccaccctgcccagcaccgagaccctgagctggagcagcgagtacagcgagatgcagcagctgagcaccagcaacagcagcgacaccgagagcaacagacacaagctgagcagcggcctgctgcccaagctggccatcagcaccgagggcgagcaggacgaggccgccagctgccccggcgacccccacgaggagcccggcaagcccgccctgccccccgaggagtgcgcccaggaggagcccgaggtgaccacccccgccagcaccatcagcagcagcaccctgagcgtgggcagcttcagcgagcacctggaccagatcaacggcagaagcgagtgcgtggacagcaccgacaacagcagcaagcccagcagcgagcccgccagccacatggccagacagagactggagagcaccgagaagaagaagatcagcggcaaggtgaccaagagcctgagcgccagcgccctgagcctgatgatccccggcgacatgttcgccgtgagccccctgggcagccccatgagcccccacagcctgagcagcgaccccagcagcagcagagacagcagccccagcagagacagcagcgccgccagcgccagcccccaccagcccatcgtgatccacagcagcggcaagaactacggcttcaccatcagagccatcagagtgtacgtgggcgacagcgacatctacaccgtgcaccacatcgtgtggaacgtggaggagggcagccccgcctgccaggccggcctgaaggccggcgacctgatcacccacatcaacggcgagcccgtgcacggcctggtgcacaccgaggtgatcgagctgctgctgaagagcggcaacaaggtgagcatcaccaccacccccttcgagaacaccagcatcaagaccggccccgccagaagaaacagctacaagagcagaatggtgagaagaagcaagaagagcaagaagaaggagagcctggagagaagaagaagcctgttcaagaagctggccaagcagcccagccccctgctgcacaccagcagaagcttcagctgcctgaacagaagcctgagcagcggcgagagcctgcccggcagccccacccacagcctgagccccagaagccccacccccagctacagaagcacccccgacttccccagcggcaccaacagcagccagagcagcagccccagcagcagcgcccccaacagccccgccggcagcggccacatcagacccagcaccctgcacggcctggcccccaagctgggcggccagagatacagaagcggcagaagaaagagcgccggcaacatccccctgagccccctggccagaacccccagccccaccccccagcccaccagcccccagagaagccccagccccctgctgggccacagcctgggcaacagcaagatcgcccaggccttccccagcaagatgcacagcccccccaccatcgtgagacacatcgtgagacccaagagcgccgagccccccagaagccccctgctgaagagagtgcagagcgaggagaagctgagccccagctacggcagcgacaagaagcacctgtgcagcagaaagcacagcctggaggtgacccaggaggaggtgcagagagagcagagccagagagaggcccccctgcagagcctggacgagaacgtgtgcgacgtgccccccctgagcagagccagacccgtggagcagggctgcctgaagagacccgtgagcagaaaggtgggcagacaggagagcgtggacgacctggacagagacaagctgaaggccaaggtggtggtgaagaaggccgacggcttccccgagaagcaggagagccaccagaagagccacggccccggcagcgacctggagaacttcgccctgttcaagctggaggagagagagaagaaggtgtaccccaaggccgtggagagaagcagcaccttcgagaacaaggccagcatgcaggaggccccccccctgggcagcctgctgaaggacgccctgcacaagcaggccagcgtgagagccagcgagggcgccatgagcgacggcagagtgcccgccgagcacagacagggcggcggcgacttcagaagagcccccgcccccggcaccctgcaggacggcctgtgccacagcctggacagaggcatcagcggcaagggcgagggcaccgagaagagcagccaggccaaggagctgctgagatgcgagaagctggacagcaagctggccaacatcgactacctgagaaagaagatgagcctggaggacaaggaggacaacctgtgccccgtgctgaagcccaagatgaccgccggcagccacgagtgcctgcccggcaaccccgtgagacccaccggcggccagcaggagcccccccccgccagcgagagcagagccttcgtgagcagcacccacgccgcccagatgagcgccgtgagcttcgtgcccctgaaggccctgaccggcagagtggacagcggcaccgagaagcccggcctggtggcccccgagagccccgtgagaaagagccccagcgagtacaagctggagggcagaagcgtgagctgcctgaagcccatcgagggcaccctggacatcgccctgctgagcggcccccaggccagcaagaccgagctgcccagccccgagagcgcccagagccccagccccagcggcgacgtgagagccagcgtgccccccgtgctgcccagcagcagcggcaagaagaacgacaccaccagcgccagagagctgagccccagcagcctgaagatgaacaagagctacctgctggagccctggttcctgccccccagcagaggcctgcagaacagccccgccgtgagcctgcccgaccccgagttcaagagagacagaaagggcccccaccccaccgccagaagccccggcaccgtgatggagagcaacccccagcagagagagggcagcagccccaagcaccaggaccacaccaccgaccccaagctgctgacctgcctgggccagaacctgcacagccccgacctggccagacccagatgccccctgccccccgaggccagccccagcagagagaagcccggcctgagagagagcagcgagagaggcccccccaccgccagaagcgagagaagcgccgccagagccgacacctgcagagagcccagcatggagctgtgcttccccgagaccgccaagaccagcgacaacagcaagaacctgctgagcgtgggcagaacccaccccgacttctacacccagacccaggccatggagaaggcctgggcccccggcggcaagaccaaccacaaggacggccccggcgaggccagacccccccccagagacaacagcagcctgcacagcgccggcatcccctgcgagaaggagctgggcaaggtgagaagaggcgtggagcccaagcccgaggccctgctggccagaagaagcctgcagccccccggcatcgagagcgagaagagcgagaagctgagcagcttccccagcctgcagaaggacggcgccaaggagcccgagagaaaggagcagcccctgcagagacaccccagcagcatcccccccccccccctgaccgccaaggacctgagcagccccgccgccagacagcactgcagcagccccagccacgccagcggcagagagcccggcgccaagcccagcaccgccgagcccagcagcagcccccaggacccccccaagcccgtggccgcccacagcgagagcagcagccacaagcccagacccggccccgaccccggcccccccaagaccaagcaccccgacagaagcctgagcagccagaagcccagcgtgggcgccaccaagggcaaggagcccgccacccagagcctgggcggcagcagcagagagggcaagggccacagcaagagcggccccgacgtgttccccgccacccccggcagccagaacaaggccagcgacggcatcggccagggcgagggcggccccagcgtgcccctgcacaccgacagagcccccctggacgccaagccccagcccaccagcggcggcagacccctggaggtgctggagaagcccgtgcacctgcccagacccggccaccccggccccagcgagcccgccgaccagaagctgagcgccgtgggcgagaagcagaccctgagccccaagcaccccaagcccagcaccgtgaaggactgccccaccctgtgcaagcagaccgacaacagacagaccgacaagagccccagccagcccgccgccaacaccgacagaagagccgagggcaagaagtgcaccgaggccctgtacgcccccgccgagggcgacaagctggaggccggcctgagcttcgtgcacagcgagaacagactgaagggcgccgagagacccgccgccggcgtgggcaagggcttccccgaggccagaggcaagggccccggcccccagaagccccccaccgaggccgacaagcccaacggcatgaagagaagccccagcgccaccggccagagcagcttcagaagcaccgccctgcccgagaagagcctgagctgcagcagcagcttccccgagaccagagccggcgtgagagaggccagcgccgccagcagcgacaccagcagcgccaaggccgccggcggcatgctggagctgcccgcccccagcaacagagaccacagaaaggcccagcccgccggcgagggcagaacccacatgaccaagagcgacagcctgcccagcttcagagtgagcaccctgcccctggagagccaccaccccgaccccaacaccatgggcggcgccagccacagagacagagccctgagcgtgaccgccaccgtgggcgagaccaagggcaaggaccccgcccccgcccagcccccccccgccagaaagcagaacgtgggcagagacgtgaccaagcccagccccgcccccaacaccgacagacccatcagcctgagcaacgagaaggacttcgtggtgagacagagaagaggcaaggagagcctgagaagcagcccccacaagaaggccctgtag

SEQ ID NO: 63165 - DNA, 7872 bp, Artificial Sequence
  derived and/or modified sequence
atgggcgagaaggtgagcgaggcccccgagcccgtgcccagaggctgcagcggccacggcagcagaacccccgccagcgccctggtggccgccagcagccccggcgccagcagcgccgagagcagcagcggcagcgagaccctgagcgaggagggcgagcccggcggcttcagcagagagcaccagccccccccccccccccccctgggcggcaccctgggcgccagagcccccgccgcctgggcccccgccagcgtgctgctggagagaggcgtgctggccctgcccccccccctgcccggcggcgccgtgccccccgcccccagaggcagcagcgccagccaggaggagcaggacgaggagctggaccacatcctgagccccccccccatgcccttcagaaagtgcagcaaccccgacgtggccagcggccccggcaagagcctgaagtacaagagacagctgagcgaggacggcagacagctgagaagaggcagcctgggcggcgccctgaccggcagatacctgctgcccaaccccgtggccggccaggcctggcccgccagcgccgagaccagcaacctggtgagaatgagaagccaggccctgggccagagcgcccccagcctgaccgccagcctgaaggagctgagcctgcccagaagaggcagcttctgcagaaccagcaacagaaagagcctgatcggcaacggccagagccccgccctgcccagaccccacagccccctgagcgcccacgccggcaacagcccccaggacagccccagaaacttcagccccagcgccagcgcccacttcagcttcgccagaagaaccgacggcagaagatggagcctggccagcctgcccagcagcggctacggcaccaacacccccagcagcaccgtgagcagcagctgcagcagccaggagaagctgcaccagctgccctaccagcccacccccgacgagctgcacttcctgagcaagcacttctgcaccaccgagagcatcgccaccgagaacagatgcagaaacacccccatgagacccagaagcagaagcctgagccccggcagaagccccgcctgctgcgaccacgagatcatcatgatgaaccacgtgtacaaggagagattccccaaggccaccgcccagatggaggagagactgaaggagatcatcaccagctacagccccgacaacgtgctgcccctggccgacggcgtgctgagcttcacccaccaccagatcatcgagctggccagagactgcctggacaagagccaccagggcctgatcaccagcagatacttcctggagctgcagcacaagctggacaagctgctgcaggaggcccacgacagaagcgagagcggcgagctggccttcatcaagcagctggtgagaaagatcctgatcgtgatcgccagacccgccagactgctggagtgcctggagttcgaccccgaggagttctactacctgctggaggccgccgagggccacgccaaggagggccagggcatcaagaccgacatccccagatacatcatcagccagctgggcctgaacaaggaccccctggaggagatggcccacctgggcaactacgacagcggcaccgccgagacccccgagaccgacgagagcgtgagcagcagcaacgccagcctgaagctgagaagaaagcccagagagagcgacttcgagaccatcaagctgatcagcaacggcgcctacggcgccgtgtacttcgtgagacacaaggagagcagacagagattcgccatgaagaagatcaacaagcagaacctgatcctgagaaaccagatccagcaggccttcgtggagagagacatcctgaccttcgccgagaaccccttcgtggtgagcatgtactgcagcttcgagaccagaagacacctgtgcatggtgatggagtacgtggagggcggcgactgcgccaccctgatgaagaacatgggccccctgcccgtggacatggccagaatgtacttcgccgagaccgtgctggccctggagtacctgcacaactacggcatcgtgcacagagacctgaagcccgacaacctgctggtgaccagcatgggccacatcaagctgaccgacttcggcctgagcaaggtgggcctgatgagcatgaccaccaacctgtacgagggccacatcgagaaggacgccagagagttcctggacaagcaggtgtgcggcacccccgagtacatcgcccccgaggtgatcctgagacagggctacggcaagcccgtggactggtgggccatgggcatcatcctgtacgagttcctggtgggctgcgtgcccttcttcggcgacacccccgaggagctgttcggccaggtgatcagcgacgagatcaactggcccgagaaggacgaggcccccccccccgacgcccaggacctgatcaccctgctgctgagacagaaccccctggagagactgggcaccggcggcgcctacgaggtgaagcagcacagattcttcagaagcctggactggaacagcctgctgagacagaaggccgagttcatcccccagctggagagcgaggacgacaccagctacttcgacaccagaagcgagaagtaccaccacatggagaccgaggaggaggacgacaccaacgacgaggacttcaacgtggagatcagacagttcagcagctgcagccacagattcagcaaggtgttcagcagcatcgacagaatcacccagaacagcgccgaggagaaggaggacagcgtggacaagaccaagagcaccaccctgcccagcaccgagaccctgagctggagcagcgagtacagcgagatgcagcagctgagcaccagcaacagcagcgacaccgagagcaacagacacaagctgagcagcggcctgctgcccaagctggccatcagcaccgagggcgagcaggacgaggccgccagctgccccggcgacccccacgaggagcccggcaagcccgccctgccccccgaggagtgcgcccaggaggagcccgaggtgaccacccccgccagcaccatcagcagcagcaccctgagcgtgggcagcttcagcgagcacctggaccagatcaacggcagaagcgagtgcgtggacagcaccgacaacagcagcaagcccagcagcgagcccgccagccacatggccagacagagactggagagcaccgagaagaagaagatcagcggcaaggtgaccaagagcctgagcgccagcgccctgagcctgatgatccccggcgacatgttcgccgtgagccccctgggcagccccatgagcccccacagcctgagcagcgaccccagcagcagcagagacagcagccccagcagagacagcagcgccgccagcgccagcccccaccagcccatcgtgatccacagcagcggcaagaactacggcttcaccatcagagccatcagagtgtacgtgggcgacagcgacatctacaccgtgcaccacatcgtgtggaacgtggaggagggcagccccgcctgccaggccggcctgaaggccggcgacctgatcacccacatcaacggcgagcccgtgcacggcctggtgcacaccgaggtgatcgagctgctgctgaagagcggcaacaaggtgagcatcaccaccacccccttcgagaacaccagcatcaagaccggccccgccagaagaaacagctacaagagcagaatggtgagaagaagcaagaagagcaagaagaaggagagcctggagagaagaagaagcctgttcaagaagctggccaagcagcccagccccctgctgcacaccagcagaagcttcagctgcctgaacagaagcctgagcagcggcgagagcctgcccggcagccccacccacagcctgagccccagaagccccacccccagctacagaagcacccccgacttccccagcggcaccaacagcagccagagcagcagccccagcagcagcgcccccaacagccccgccggcagcggccacatcagacccagcaccctgcacggcctggcccccaagctgggcggccagagatacagaagcggcagaagaaagagcgccggcaacatccccctgagccccctggccagaacccccagccccaccccccagcccaccagcccccagagaagccccagccccctgctgggccacagcctgggcaacagcaagatcgcccaggccttccccagcaagatgcacagcccccccaccatcgtgagacacatcgtgagacccaagagcgccgagccccccagaagccccctgctgaagagagtgcagagcgaggagaagctgagccccagctacggcagcgacaagaagcacctgtgcagcagaaagcacagcctggaggtgacccaggaggaggtgcagagagagcagagccagagagaggcccccctgcagagcctggacgagaacgtgtgcgacgtgccccccctgagcagagccagacccgtggagcagggctgcctgaagagacccgtgagcagaaaggtgggcagacaggagagcgtggacgacctggacagagacaagctgaaggccaaggtggtggtgaagaaggccgacggcttccccgagaagcaggagagccaccagaagagccacggccccggcagcgacctggagaacttcgccctgttcaagctggaggagagagagaagaaggtgtaccccaaggccgtggagagaagcagcaccttcgagaacaaggccagcatgcaggaggccccccccctgggcagcctgctgaaggacgccctgcacaagcaggccagcgtgagagccagcgagggcgccatgagcgacggcagagtgcccgccgagcacagacagggcggcggcgacttcagaagagcccccgcccccggcaccctgcaggacggcctgtgccacagcctggacagaggcatcagcggcaagggcgagggcaccgagaagagcagccaggccaaggagctgctgagatgcgagaagctggacagcaagctggccaacatcgactacctgagaaagaagatgagcctggaggacaaggaggacaacctgtgccccgtgctgaagcccaagatgaccgccggcagccacgagtgcctgcccggcaaccccgtgagacccaccggcggccagcaggagcccccccccgccagcgagagcagagccttcgtgagcagcacccacgccgcccagatgagcgccgtgagcttcgtgcccctgaaggccctgaccggcagagtggacagcggcaccgagaagcccggcctggtggcccccgagagccccgtgagaaagagccccagcgagtacaagctggagggcagaagcgtgagctgcctgaagcccatcgagggcaccctggacatcgccctgctgagcggcccccaggccagcaagaccgagctgcccagccccgagagcgcccagagccccagccccagcggcgacgtgagagccagcgtgccccccgtgctgcccagcagcagcggcaagaagaacgacaccaccagcgccagagagctgagccccagcagcctgaagatgaacaagagctacctgctggagccctggttcctgccccccagcagaggcctgcagaacagccccgccgtgagcctgcccgaccccgagttcaagagagacagaaagggcccccaccccaccgccagaagccccggcaccgtgatggagagcaacccccagcagagagagggcagcagccccaagcaccaggaccacaccaccgaccccaagctgctgacctgcctgggccagaacctgcacagccccgacctggccagacccagatgccccctgccccccgaggccagccccagcagagagaagcccggcctgagagagagcagcgagagaggcccccccaccgccagaagcgagagaagcgccgccagagccgacacctgcagagagcccagcatggagctgtgcttccccgagaccgccaagaccagcgacaacagcaagaacctgctgagcgtgggcagaacccaccccgacttctacacccagacccaggccatggagaaggcctgggcccccggcggcaagaccaaccacaaggacggccccggcgaggccagacccccccccagagacaacagcagcctgcacagcgccggcatcccctgcgagaaggagctgggcaaggtgagaagaggcgtggagcccaagcccgaggccctgctggccagaagaagcctgcagccccccggcatcgagagcgagaagagcgagaagctgagcagcttccccagcctgcagaaggacggcgccaaggagcccgagagaaaggagcagcccctgcagagacaccccagcagcatcccccccccccccctgaccgccaaggacctgagcagccccgccgccagacagcactgcagcagccccagccacgccagcggcagagagcccggcgccaagcccagcaccgccgagcccagcagcagcccccaggacccccccaagcccgtggccgcccacagcgagagcagcagccacaagcccagacccggccccgaccccggcccccccaagaccaagcaccccgacagaagcctgagcagccagaagcccagcgtgggcgccaccaagggcaaggagcccgccacccagagcctgggcggcagcagcagagagggcaagggccacagcaagagcggccccgacgtgttccccgccacccccggcagccagaacaaggccagcgacggcatcggccagggcgagggcggccccagcgtgcccctgcacaccgacagagcccccctggacgccaagccccagcccaccagcggcggcagacccctggaggtgctggagaagcccgtgcacctgcccagacccggccaccccggccccagcgagcccgccgaccagaagctgagcgccgtgggcgagaagcagaccctgagccccaagcaccccaagcccagcaccgtgaaggactgccccaccctgtgcaagcagaccgacaacagacagaccgacaagagccccagccagcccgccgccaacaccgacagaagagccgagggcaagaagtgcaccgaggccctgtacgcccccgccgagggcgacaagctggaggccggcctgagcttcgtgcacagcgagaacagactgaagggcgccgagagacccgccgccggcgtgggcaagggcttccccgaggccagaggcaagggccccggcccccagaagccccccaccgaggccgacaagcccaacggcatgaagagaagccccagcgccaccggccagagcagcttcagaagcaccgccctgcccgagaagagcctgagctgcagcagcagcttccccgagaccagagccggcgtgagagaggccagcgccgccagcagcgacaccagcagcgccaaggccgccggcggcatgctggagctgcccgcccccagcaacagagaccacagaaaggcccagcccgccggcgagggcagaacccacatgaccaagagcgacagcctgcccagcttcagagtgagcaccctgcccctggagagccaccaccccgaccccaacaccatgggcggcgccagccacagagacagagccctgagcgtgaccgccaccgtgggcgagaccaagggcaaggaccccgcccccgcccagcccccccccgccagaaagcagaacgtgggcagagacgtgaccaagcccagccccgcccccaacaccgacagacccatcagcctgagcaacgagaaggacttcgtggtgagacagagaagaggcaaggagagcctgagaagcagcccccacaagaaggccctgtag

SEQ ID NO: 63166 - DNA, 7881 bp, Artificial Sequence
  derived and/or modified sequence
atgggagagaaagtgtccgaggctcccgagcccgtgccccgggggtgctctgggcacggctcccgcactccagcctcagcgctcgttgcagcctccagtccaggcgcttcaagtgccgaatcctcctcaggttccgaaaccttaagcgaggagggcgaaccaggaggtttcagtagggagcaccagcccccgccccctcccccacttggtggtaccctgggggcccgggcaccggccgcctgggcaccagcatcggtcctgttggagcgcggagtgctggctttacctccccccctgcccggcggcgctgtccctccagcccctcgaggatctagcgcatcccaggaagaacaggatgaagaactggaccatattttgtcccccccacccatgccttttaggaaatgctcaaatcctgatgttgcttcggggccaggaaaatcacttaaatataagcggcagctcagtgaggacggcaggcaattgcgccgcggttcactgggcggtgcgctgaccggtagatatctgttgcctaatcctgtcgctggacaggcatggcctgctagcgcagagaccagcaatttagttagaatgcggtcacaggcccttggacagagtgccccaagtttgactgcttccttgaaagagctctcactgccacggagggggtcattctgcagaacgtctaacagaaaatctttgatcgggaacgggcagtcccccgctctgccgcggccccactcgccactgagcgcccacgccggcaactcgccccaggattctcctagaaatttttctccctctgccagcgctcactttagctttgctagatccctgaatcgcactgacggccggagatggtctctagctagcttgcctagctctgggtatgggactaacaccccttcctcaaccgtaagctcctcctgctcttcgcaagagaagcttcatcagctgccttaccagcctacacctgatgagctgcactttcttagcaagcacttttgcacgaccgaatccatcgccacagagaacagatgccgaaacacccctatgaggccccggtcacgatccctgagcccaggcagatccccggcgtgctgcgaccacgaaatcatcatgatgaatcatgtatacaaggaaaggtttcccaaggccaccgcccaaatggaggagcggctgaaagaaatcatcacttcttatagtcccgataacgttctaccactggcggacggagtgctgtcattcacacatcatcagataatagaactcgctagggactgtttggacaagagtcatcaggggctgattacttcacggtacttcttagagttgcagcacaaattggacaaactgctgcaggaagcccatgatagaagtgaaagtggggagctggctttcatcaagcagctggtaaggaagattttaatagtgatagcccgccctgccaggctgcttgagtgcttagaatttgaccccgaggaattttattaccttctggaggcagctgaaggtcacgctaaagaggggcaggggatcaagaccgatattcctcgatacattataagtcaactcgggctgaataaagaccctctcgaggagatggcccacttggggaactatgatagtggaacggccgaaactcccgaaaccgacgagtcggtctctagtagtaacgcttcgttgaaactccgccgcaaacctagggagtcagacttcgaaacgattaagcttataagcaacggcgcatacggtgctgtctacttcgtgaggcacaaggagagccgacaacgtttcgctatgaagaaaatcaataaacagaatttaatcttgaggaaccaaatccagcaggccttcgtggaacgggatatactcaccttcgccgaaaatccattcgttgtgtccatgtactgttcattcgagacgaggcggcacctttgcatggtgatggagtacgtcgaaggcggggactgcgccaccctaatgaaaaacatgggtccattgcctgtagatatggcccggatgtacttcgccgaaactgtgttagccctggaatacctgcacaactacgggattgtgcaccgcgacctcaagcccgataatctacttgtgaccagcatggggcacataaagctgaccgactttggactgagcaaggtggggctgatgagtatgacgaccaatctgtatgaaggtcatattgagaaagacgcgcgggaattccttgacaaacaagtatgcggcactcctgaatatattgccccggaggtgatcctgcgccagggatatggaaagccggtggattggtgggccatggggataattctctatgaatttctcgtgggatgcgtgccattctttggcgacacacctgaggaacttttcggccaagtgatctcagatgaaataaattggccagagaaagatgaagccccaccacccgacgctcaggatctcattacccttctcttaaggcaaaaccctctagaaaggcttggcacaggcggagcttacgaggtgaaacaacatcgattctttcgttccctggactggaatagtctgctgcgacagaaagccgagttcatcccacagctggagagcgaggatgatacatcctatttcgatactcggagtgagaagtaccaccatatggagaccgaagaggaggatgataccaatgatgaggattttaacgtggagattcggcagttttcaagctgcagccaccggttctctaaggttttctcctcaattgaccgtatcactcaaaatagtgcggaggaaaaggaggactcggttgacaaaaccaagtctacaacccttccctccacagagaccctgagctggtcttcagagtattccgaaatgcagcagctatccactagtaactcttctgataccgaaagcaatcggcacaaactgagctctggactgctcccaaaactggctatttccaccgagggcgagcaagacgaagctgctagctgccctggtgatccgcacgaagaacccggcaagccagcgttgcccccggaggagtgcgcccaggaggagcctgaagtgacaactcctgccagtacaattagctcaagtaccctatctgtagggagcttctctgaacaccttgatcaaatcaatggcagaagcgagtgcgtggactctacggacaactcctcgaagccgagcagtgaacccgccagtcacatggcacgacagcgcctggagagcacggaaaaaaaaaagataagtggaaaagtgaccaaatcactctctgcctccgccctatcattaatgatcccaggtgacatgtttgcagtgagccctctcgggagtcctatgtcaccacactcgctgtcctccgatccatctagctcccgcgacagcagtccttcacgcgactcttccgctgcttctgcctctccacaccagccgatcgtgatccattctagtggcaaaaattacggctttaccattcgagccattcgcgtttacgttggagactcagatatttataccgtgcatcacattgtgtggaatgtcgaggaaggctctccagcttgccaagctggtctcaaagctggtgacctgatcacacacatcaacggcgaacctgtgcatggcctcgtgcacactgaggttatcgagctcttgctgaaatcaggcaataaggtgtctatcacaaccaccccttttgaaaacacttccatcaaaactggaccagccaggcggaactcttacaaatcacgcatggtgaggagaagcaagaagagtaaaaaaaaagagtcgcttgaaaggcggcggtcactcttcaaaaagttagccaaacaaccttcgcccctgctgcatacttctaggtcattctcatgcttaaatcgtagcctaagctctggtgagtctctgccaggcagtccaactcatagtctgagcccccgttctcccacgccttcttacagaagcacacctgactttccttcgggtacaaactccagccagtcatcaagcccctccagctcggcaccaaactctccggctggtagcgggcatatccgcccctctacacttcatggcctggctccaaagctggggggtcagcgctatcgatcaggcaggcgcaagtccgccggaaatatccctttatctccactggccagaacaccatctccgacaccccagcccacatcccctcaacgttcaccctcaccactcttgggccactcactggggaacagtaagatcgcccaggccttcccctccaagatgcattcccctcccacaattgtcagacatatcgtacgccctaagagcgccgaacctcccaggtccccactgttgaaaagggtgcagtcagaagagaaactctctcccagttacgggagcgataaaaagcacctgtgtagcaggaagcacagcctggaggtgacacaggaggaggtgcagcgggagcaatcacagagggaggctcctctgcagagtctggatgagaacgtctgtgatgtgccgcccctgtctcgagctcgacctgttgagcagggatgcttaaagcggccggtgagccggaaggtaggaaggcaggaaagcgtggacgatctcgatcgagataagctcaaggccaaggtagttgtgaagaaagccgacggtttcccagaaaaacaagagtcacaccaaaagagccatggaccgggcagcgatcttgagaattttgctctctttaagttggaagaaagagagaaaaaggtgtatcccaaggcggttgaaagatcgtccactttcgagaacaaggccagcatgcaggaggcccctcctcttggttctctgcttaaagatgcacttcataaacaggccagtgtgcgcgcctcggagggcgccatgagcgatgggcgggttcctgcggaacatagacaggggggaggagactttagacgggcgcctgcacccgggaccctgcaagacggtctatgccactctctggatagaggtatatcaggaaagggagaaggcaccgagaaatcttcccaggctaaggagctactccgatgtgagaagttggattccaagctcgccaacatcgactaccttcgaaaaaaaatgagtctggaggataaggaggacaatctctgtccggtcctgaagccaaaaatgaccgcaggcagtcacgagtgtctgccaggcaatcccgtgcgccccaccgggggccagcaggaaccccctcctgcatccgagtcccgggccttcgtgtcatccacccatgccgcacagatgagcgcggtctccttcgttccgctgaaagcactgaccggccgggtcgactccgggaccgaaaaaccaggattggtcgctcctgaaagcccagtccgcaaatcccccagcgaatataaacttgagggacggagtgtgtcatgcctgaaaccaatcgaggggactctcgatatcgccctgctgtctggcccccaggcatcgaagacagagttgccaagccccgagagcgcacaatccccatcaccgtctggtgacgtccgcgcatcggttcccccagtgctgcctagttcttcgggcaaaaagaacgacacaacgtctgcacgagagctgtctccaagtagtctcaaaatgaataaatcctacctgttggagccctggtttctacctccaagtcgaggactccagaactcgcctgccgtatcactgcccgatccagagttcaaacgggaccgcaaagggcctcaccccacagctaggtcgccaggaacggtcatggaatccaatcctcaacagcgagaggggtcatccccaaaacatcaggaccacacaaccgacccgaaacttctgacctgtctcggtcaaaacctgcacagtcccgatttggcacgtccaagatgcccccttccacctgaagcaagtcctagtcgggaaaagcctggtctcagggaatcctcggagaggggtcccccaactgcaaggagtgaacgctcagctgcgcgggctgatacatgcagggagccctccatggagctgtgttttcccgaaactgcaaagaccagcgataattccaaaaacttgcttagtgtgggccggacccaccccgacttctatacacagacccaggctatggaaaaggcttgggctcctgggggtaaaactaatcacaaagatggacccggagaggcccggccccctcccagagataactcttccctgcactccgctggcatcccatgcgagaaagaattgggcaaggtgagacggggagttgaacccaagccagaggctctgttggcgcgtcgctctctgcagccaccaggaatagagtccgagaagagtgagaaactctctagtttcccatcgttgcagaaagacggcgccaaggaaccagagcgcaaggaacaacccctccaacggcacccatctagcattccgcccccacccctgaccgctaaagacctgagctcccctgctgcaagacagcactgcagttccccctcccacgcatcaggacgcgaacccggagctaaacccagtaccgctgaacctagctcaagtccccaggatccacccaagccggtcgcggcccactcggaatcttcctcccacaaaccacgccctggaccagacccaggaccgccaaagacaaagcaccccgatagatcactgtccagccagaagccatctgtcggtgccacgaaggggaaggagcccgcaacccagagtttagggggcagtagtcgtgagggaaaaggacacagcaagtctggtcctgatgtcttccccgcaaccccagggtcccagaataaggcatcagacgggataggccagggcgaaggagggccctccgtacctcttcacacagacagggcccccctcgatgccaaaccgcaacctacaagcggtggtaggcctctggaagtcctggagaagcccgtgcatttaccaagaccgggtcaccctggaccatctgaacccgccgaccagaagctgtccgcggtgggggagaaacagactttgagtccgaagcacccgaagccatctacagtgaaggattgtcccacactgtgcaagcagacagacaatagacaaacggataaaagcccaagccagcctgcagccaatacagacagacgggctgagggcaaaaagtgcaccgaggccctctacgctcctgcagaaggggataaattagaagccgggctgtccttcgtgcactctgaaaataggctaaaaggcgcggaaaggccagcagccggagtgggcaaagggtttcctgaagccaggggaaagggcccaggaccacagaagcctcctactgaggccgataagcctaacgggatgaaacggtctcctagcgccactggacagtcctcatttaggtcgactgccctgccagagaagtcgctatcatgtagctcttcttttcctgagacccgggcgggcgtgagggaggcaagtgccgcctcctccgataccagctctgccaaagccgccggggggatgcttgagcttccggctccgagcaaccgagaccacaggaaggcccagcctgcaggggagggccgtactcacatgaccaagtcagacagcttaccatctttcagggtaagcacactacccctggagtcacatcacccagacccaaacactatgggcggcgctagtcatagggatcgggcactcagtgtgaccgccacagtaggcgagactaagggtaaagatccagcccccgcgcagcccccgccagcaaggaagcagaacgttggcagagacgtgacaaaacccagtcccgctcccaacacagatagacctattagcctgtcaaatgagaaggattttgtcgtccgacaaagaaggggaaaggagagccttcgctctagccctcataagaaagccctgtag

SEQ ID NO: 63167 - DNA, 7872 bp, Artificial Sequence
  derived and/or modified sequence
atgggcgaaaaagtgtctgaagccccagaaccggtacctcggggatgttctggccatggctcaagaaccccggccagcgccttggtcgccgcctccagcccgggagcctccagtgctgaatccagctctggatcggagactctctcagaggagggtgaaccaggcggcttttctcgggaacaccagccacccccacccccccccctcggcggaacacttggcgccagggctcccgctgcttgggcacccgccagcgttctcctcgagcgtggtgtgcttgccctgcccccccccctccccggaggggcagtgcccccagcaccccgaggctcctctgctagtcaagaagaacaagatgaagagctcgatcatatcctttccccaccacctatgccgttcaggaagtgtagcaatccagacgtggcctccgggccagggaaatcgctgaagtataagcgccagctctcagaggacggacgccagctcaggagagggtcccttggcggcgccttaacgggtagatacctactccccaatcccgtggctgggcaggcctggcctgcaagtgctgagacctctaatttggtgaggatgcgatcgcaggcgcttggacaatccgccccaagtctcacagctagcttgaaggagctgtccctcccacgcagaggatcattctgtagaacctcgaatagaaaaagtctgataggaaacggccagtcccccgcactccctcgcccacactctcctctgtccgcccatgcggggaactcgccccaggattcacccagaaacttctcccccagcgcatctgctcacttcagcttcgcccgccggacggacggccggcggtggagcctggcatccctccccagttccggatacggaacaaatacaccctcctccactgtttcgtcctcttgctcatcacaggaaaaactacatcagttgccctaccagccaacaccagacgagttacacttcttatccaagcacttttgtaccaccgagagcatcgccaccgagaatagatgccgcaataccccaatgagaccaagaagccgatccttatcgcctgggcgtagtcctgcatgttgcgaccacgagatcattatgatgaaccatgtgtataaggaaaggttcccaaaggcgactgctcagatggaagaacggctgaaagagattatcaccagttatagtcctgacaacgtgctgccactcgctgatggcgttctttccttcacacatcaccagattatcgagctagcgagagattgcttagacaagagtcaccagggactgatcacatcaaggtacttcctcgaactccagcacaagttggataaactgctccaggaggctcatgataggtccgagtcaggtgagctggcattcatcaagcagctcgttagaaagatcttgatcgtaatcgccaggccagccaggctactcgaatgcctcgaatttgacccagaagaattctactacttactagaagccgccgagggccatgcaaaagagggccagggaatcaaaacggatatacctaggtacatcattagccagctcggcctgaataaggacccgctcgaagagatggcccatttggggaactacgactccggcaccgcggagactcctgaaacggatgaatccgtgtccagctccaatgccagtctgaagttaagacggaagccacgcgagtctgacttcgagaccataaaactgattagtaatggagcctacggagcagtctacttcgtccgccacaaggagagccgccagagattcgccatgaaaaaaatcaacaagcagaatcttatcttgcgaaatcagattcaacaggcatttgtggagagggatatactgacctttgctgaaaaccccttcgtggtgagtatgtactgttcatttgagacgcgcagacacctctgcatggtcatggagtacgttgagggcggagattgcgcaaccctgatgaagaacatgggaccgctgcccgtggacatggctagaatgtactttgcagagactgtgctggcgctggagtatctccacaactatgggatcgttcaccgggacttgaagcctgacaatctgttagttacctccatgggacatattaaattgactgattttgggctgagcaaggttggtcttatgtctatgacaacaaacttgtacgaaggccacatcgagaaagacgctcgggagtttctggacaagcaggtctgcggtacacccgaatacattgcgccagaagtcatcctgcgacaggggtatggcaaaccagtcgactggtgggcgatgggaattatcctgtatgaattcctggtagggtgtgtgcccttcttcggcgatacacctgaggagctgtttggacaggtaatttctgacgaaatcaattggcccgagaaagatgaagcaccgcctccagatgcccaggacctcattaccttattactccgccagaacccactcgagcgcttgggcaccgggggggcatatgaggtgaaacaacatcgattcttccgttcccttgactggaattccctccttcggcagaaagcagagttcattccccagctggaatctgaggacgatacgagctactttgacactaggtcagagaaatatcatcacatggagaccgaggaggaggacgacacaaatgatgaggactttaatgtagaaattcggcagttctcttcctgctcccatcgctttagcaaagtgtttagcagcatcgacaggatcacccaaaattctgcagaggaaaaagaggacagcgttgacaagaccaagtccactacattacccagtactgagaccctgtcctggagctctgaatattctgagatgcagcagctgtcaacaagcaacagcagcgacactgaatcgaatagacataaactcagcagcgggctgcttccaaagttggctatatctacagagggagagcaagacgaggccgcctcttgccctggggatccgcacgaggagcccggaaagcccgccctgccacctgaggagtgtgcccaagaggaaccagaagtcaccactcccgcatcaactatatcatctagtacgttgagcgtggggtctttttcggagcacctggatcagatcaacggacgtagtgaatgtgtagacagcacagacaattctagcaagcccagctctgaacctgcttcccatatggcacgccagcgccttgagagtactgagaagaaaaaaatctcaggaaaggtgaccaagagcctcagtgcttcggccttgagtttgatgatcccaggcgatatgtttgccgtctcccccctgggctctccaatgtcaccacacagtttgtcatcagacccatcttcgagccgggattcatcccccagtcgcgatagtagtgcagcctcagcatcgccgcaccagccaatagtcatccacagctctggcaaaaattatggatttacgatcagagccattcgcgtttacgtgggcgactctgacatctacaccgtgcatcacatcgtctggaatgtggaagagggatcccctgcctgccaggccgggctgaaggccggcgacctgatcacccacatcaacggggagcctgtgcatggccttgtgcatacggaagttatcgaacttttactgaaatctggaaacaaagtgtctatcacgaccacccccttcgaaaacactagcatcaaaactggccctgcacgacggaactcttataagtccaggatggtgcgtcgttctaaaaagtctaaaaaaaaagagagcttggaaaggcgccgatcactgtttaaaaagttagccaagcagccatcacccctcctgcatacctcccggtcatttagctgtctgaaccgctccctgtcctcgggcgagtctctgccgggctcaccaacccatagtctcagccctcggtcacctaccccttcttaccgttcaaccccagacttccccagtggtaccaacagtagccagagcagctcgcctagctcctccgcgcctaatagccctgccggttccggtcatatcaggccttccactctgcatgggttagccccgaagctcgggggacagcggtatagatccgggcgacggaagtctgctgggaatatcccccttagccccctcgcccggactcctagcccgacccctcagcctacttcaccacagagatcccccagcccattgctcggacattcccttggaaattcaaagatagctcaggcttttcctagtaaaatgcacagcccccctacgatagttcgccacatcgtccgccctaaaagtgctgagcctccccggtcacccttgctaaagagagtccagtctgaggagaaactgagcccatcctatggttcagacaaaaagcatctgtgcagtagaaagcactccctggaggtcactcaagaggaagtgcagcgcgagcagtcacagcgagaggctccattacagagtctggatgagaacgtgtgtgatgttcccccactgagccgagcccgccccgttgaacaggggtgtctgaagagacccgtgtcgcggaaggtggggaggcaggaatctgtggatgacctcgatagagacaaattaaaggcaaaggtggtagtcaaaaaggctgacggctttccagaaaagcaagagagccatcagaagtctcacgggcctggcagcgacctggagaatttcgccctctttaaacttgaggagcgcgagaaaaaggtgtacccaaaggccgtagaacggtcatccacatttgaaaacaaggcctctatgcaggaagcgcctcccctgggcagcctccttaaagatgctctgcataagcaagcttccgtccgcgcctcagagggcgcaatgtccgacgggagagtacccgcggagcaccgccaagggggaggggatttccggcgagcccctgctcccgggaccctgcaggacggcctgtgtcacagcctggaccgaggtatatcaggtaagggcgaaggaactgagaagagcagtcaggctaaggagctgcttcgctgcgagaaactggattctaagctggccaatatcgattacttgcgcaagaagatgtctctcgaggataaggaagacaatctttgtcctgtccttaagcctaaaatgactgccggatcgcatgaatgccttcctggcaatccagtgcgaccgaccgggggccagcaggaaccgccacccgcctccgagtctcgggcctttgtttcaagtacccacgccgcccaaatgtccgctgtgagcttcgtacctttgaaggcattgacagggagagtggactcgggcactgagaagcctggcctggtagctccggaatctcctgtccggaaaagcccatccgaatacaaactggagggccgctcagtaagctgtctcaaacctatcgagggcactctggatatagctctcctgagcggcccacaggctagtaaaaccgaattgccttctcctgagtcagcccagtccccaagcccatcgggagacgtccgggcatcagtgccccctgtgctgccttcaagctccgggaagaaaaatgacaccacttccgccagggaactgtcgccttccagcctgaagatgaacaaaagctacctccttgagccttggttccttccaccatctagggggcttcaaaattcccctgccgtctcccttcctgaccccgagtttaagagggatcggaaggggcctcaccctacagcaagatcgcccggcaccgtgatggagagtaacccccaacagagagaggggtcatcccccaagcatcaggatcacaccaccgacccaaagctgttaacatgcctgggtcagaatttgcattcacccgacctcgcccgtcctcgctgccctctgccccctgaggcttcccctagtagggaaaagccgggactccgagaaagcagcgagcgcggcccacccacagcccggtctgaacggtccgccgcccgagccgatacttgcagggagccctccatggaactgtgtttccccgagacggccaagaccagtgataactccaaaaatctgctctctgtcggtaggacccatcccgatttttatactcaaacacaggccatggaaaaggcttgggcccccggcgggaaaacgaaccataaagacggacctggagaagcacgccctcctcccagagacaatagctccctgcatagcgctggcatcccgtgtgagaaggaactcggaaaggtgaggaggggagtggaacccaagccggaggcgctgctggccagacgatcactgcagccaccaggcatcgagagtgaaaagtctgagaaactctcctcatttccctctctgcagaaagacggtgccaaggagcctgaacggaaagaacaaccgctgcagcgtcatccctctagcatccctccacctccgcttacagccaaagatctgagctcccccgcggctaggcaacattgctcaagcccaagccacgcaagtgggcgcgagcccggggctaagccatcaacggccgaacccagctccagtcctcaagacccacccaagccagtagctgcccatagtgagtccagcagccataaaccacgcccaggccctgaccctgggcccccaaagactaagcaccccgaccgcagtctctctagccagaagccctctgttggggcaacaaaggggaaagaacccgcaactcaatctctgggcggatcatctcgcgaagggaagggacactccaagtcaggcccagatgtctttccagcgactcctggctctcaaaataaagccagcgatgggataggccaaggggaagggggtcccagcgtgccgctgcataccgacagggcacctctagacgccaaaccccagccaacatcggggggccgaccgctcgaagtcctggaaaagcccgtgcatctgccacgacccggccatccggggcctagtgaaccggcagatcagaaactgtctgctgtaggagaaaagcagaccttgagccccaaacaccctaaaccttccacagtaaaggactgtcccaccctgtgtaaacagaccgacaacaggcagacagataagtccccctcgcagccagccgcaaataccgaccgacgcgcagaagggaaaaaatgcacagaggccctatatgcccctgcggaaggggataagctggaggctggactcagctttgtgcattcagaaaatagattgaagggcgccgagagacccgctgctggcgtgggcaaaggattcccagaagctcgaggaaagggtccaggtcctcaaaaaccccccaccgaggctgacaaacccaacggtatgaaacgctctccatctgctacgggccagtctagcttcaggtctacagccttacctgagaagagcctctcctgtagttctagttttcctgagactcgcgctggggtcagggaagcctctgcggcaagcagcgacacctcgtccgccaaggccgcgggtggaatgctggagttgcccgcccccagcaatcgggaccacagaaaggctcagccagcaggagaaggccgtacacatatgacaaagtccgactccctgccctcgtttcgcgttagcaccttgcctttagagtctcatcaccccgaccctaacacaatgggaggtgccagtcacagggaccgggcgctatccgtcacagccacagtgggggagacaaaaggtaaggaccccgcccccgctcaaccccctcctgctcgaaaacagaacgttggccgcgacgttaccaaacccagcccagctcccaacactgatcgccccatctccttgtccaatgagaaagacttcgtggttaggcaacggagaggcaaggagtctctgcgctcaagtcctcacaagaaggcgctgtag

SEQ ID NO: 63168 - DNA, 7881 bp, Artificial Sequence
  derived and/or modified sequence
atgggagagaaggtgtctgaggcccctgagcctgtgccccggggctgcagcggccacggcagcaggaccccagccagcgccctggtggccgccagcagccctggggccagcagcgctgagagcagcagcggcagcgagaccctgtctgaggagggggagcccggcggcttcagccgggagcaccagcccccacctcctccacccctgggcggcaccctgggcgcccgggccccagctgcctgggccccagcctctgtgctgctggagcggggcgtgctggccctgcccccacccctgcccggcggcgctgtgcccccagccccccggggcagcagcgccagccaggaggagcaggatgaggagctggaccacatcctgagccccccacccatgcccttcaggaagtgcagcaacccagatgtggccagcggccctgggaagagcctgaagtacaagaggcagctgtctgaagatggccggcagctgcggcggggcagcctgggcggggccctgaccggccgctacctgctgcccaaccctgtggccggccaggcctggccagccagcgctgagaccagcaacctggtgaggatgaggagccaggccctgggccagagcgcccccagcctgacagccagcctgaaggagctgagcctgccccggcggggcagcttctgcaggaccagcaacaggaagagcctgattggaaatggccagagccctgccctgccccggccccacagccccctgagcgcccacgccggcaacagcccccaggacagccccaggaacttcagccccagcgccagcgcccacttctcctttgcccggagcctgaacagaacagatggaagacgctggagcctggccagcctgcccagcagcggctacggcaccaacacccccagcagcacagtgagcagcagctgcagcagccaggagaagctgcaccagctgccctaccagcccaccccagatgagctgcacttcctgagcaagcacttctgcaccacagagagcatcgccacagagaaccgctgcaggaacacccccatgaggcccaggagccgcagcctgagccctggccgcagccctgcctgctgtgaccacgagatcatcatgatgaaccacgtgtacaaggagcgcttccccaaggccacagcccagatggaggagcggctgaaggagatcatcaccagctacagcccagacaacgtgctgcccctggctgatggagtgctgtccttcacccaccaccagatcatcgagctggcccgggactgcctggacaagagccaccagggcctcatcaccagccgctacttcctggagctgcagcacaagctggacaagctgctgcaggaggcccatgacagaagtgagagcggggagctggccttcatcaagcagctggtgaggaagatcctgattgtgattgcccggcctgcccggctgctggagtgcctggagtttgatcctgaggagttctactacctgctggaggccgctgagggccacgccaaggagggccagggcatcaagacagacatcccccgctacatcatcagccagctgggcctgaacaaggaccccctggaggagatggcccacctgggcaactatgattctggaacagctgagaccccagagacagatgagagcgtgagcagcagcaatgccagcctgaagctgcggaggaagccccgggagagtgactttgagaccatcaagctgatcagcaatggagcctacggggctgtgtactttgtgcgccacaaggagagccggcagagatttgccatgaagaagatcaacaagcagaacctgatcctgaggaaccagatccagcaggcctttgtggagcgggacatcctgacctttgctgagaacccctttgtggtgtccatgtactgcagctttgagaccaggaggcacctgtgcatggtgatggagtatgtggagggcggggactgtgccaccctgatgaagaacatgggccccctgcctgtggacatggccaggatgtactttgctgagaccgtgctggccctggagtacctgcacaactacggcatcgtgcaccgggacctgaagccagacaacctgctggtgacctccatgggccacatcaagctgacagactttggcctgagcaaggtgggcctgatgtccatgaccaccaacctgtatgagggccacatcgagaaggatgcccgggagttcctggacaagcaggtgtgtggcaccccagagtacatcgcccctgaggtgatcctgcggcagggctacggcaagcctgtggactggtgggccatgggcatcatcctgtatgagttcctggtgggctgtgtgcccttctttggagacaccccagaggagctgtttggccaggtgatcagtgatgagatcaactggccagagaaggatgaggcccctcctccagatgcccaggacctgatcaccctgctgctgcggcagaaccccctggagcggctgggcaccggcggggcctatgaggtgaagcagcaccgcttcttccgcagcctggactggaacagcctgctgcggcagaaggccgagttcatcccccagctggagagtgaagatgacaccagctactttgacaccaggtctgagaagtaccaccacatggagacagaggaggaggatgacaccaatgatgaggacttcaacgtggagatccggcagttcagcagctgcagccaccgcttcagcaaggtgttcagcagcattgaccgcatcacccagaacagcgctgaggagaaggaggacagcgtggacaagaccaagagcaccaccctgcccagcacagagaccctgtcctggagcagcgagtacagcgagatgcagcagctgagcaccagcaacagcagtgacacagagagcaacagacacaagctgagcagcggcctgctgcccaagctggccatcagcacagaaggagagcaggatgaagctgccagctgccctggggacccccatgaggagcccgggaagccagccctgcccccagaagaatgtgcccaggaggagcctgaggtgaccaccccagccagcaccatcagcagcagcaccctgtctgtgggcagcttcagcgagcacctggaccagatcaatggccgctcagaatgtgtggacagcacagacaacagcagcaagcccagcagcgagcccgccagccacatggcccggcagaggctggagagcacagagaagaagaagatcagcggcaaggtgaccaagagcctgagcgccagcgccctgagcctgatgatccctggggacatgtttgctgtgagccccctgggcagccccatgagcccccacagcctgagcagtgaccccagcagcagccgggacagcagccccagccgggacagcagcgctgccagcgccagcccccaccagcccatcgtcatccacagcagcggcaagaactacggcttcaccatccgggccatccgggtgtatgtgggggacagcgacatctacacagtgcaccacatcgtgtggaatgtggaggagggcagccctgcctgccaggccggcctgaaggccggggacctgatcacccacatcaatggagagcctgtgcacggcctggtgcacacagaggtgattgagctgctgctgaagagcggcaacaaggtgtccatcaccaccaccccatttgagaacaccagcatcaagacaggccctgccaggagaaattcctacaagagcaggatggtgcggcgcagcaagaagagcaagaagaaggagagcctggagcggcggcgcagcctcttcaagaagctggccaagcagcccagccccctgctgcacaccagccgctccttcagctgcctgaacagaagcctgagcagcggggagagcctgcccggcagccccacccacagcctgagccccaggagccccacccccagctaccgcagcaccccagacttccccagcggcaccaacagcagccagagcagcagccccagcagcagcgcccccaacagccctgctggcagcggccacatccggcccagcaccctgcacggcctggcccccaagctgggcggccagcgctaccgcagcggccgcaggaagtctgctggcaacatccccctgagccccctggcccggacccccagccccaccccccagcccaccagcccccagaggagccccagccccctgctgggccacagcctgggcaacagcaagatcgcccaggccttccccagcaagatgcacagcccccccaccatcgtgcgccacatcgtgcggcccaagtctgctgagccccccaggagccccctgctgaagagggtgcagagcgaggagaagctgagccccagctatggcagtgacaagaagcacctgtgcagcaggaagcacagcctggaggtgacccaggaggaggtgcagcgggagcagagccagcgggaggcccccctgcagagcctggatgaaaatgtgtgtgatgtgccccccctgagccgggcccggcctgtggagcagggctgcctgaagaggcctgtgtccaggaaggtgggccggcaggagagcgtggatgacctggaccgggacaagctgaaggccaaggtggtggtgaagaaggcagatggcttccctgagaagcaggagagccaccagaagagccacggccctggcagtgacctggagaactttgccctcttcaagctggaggagcgggagaagaaggtgtaccccaaggctgtggagaggagcagcacctttgagaacaaggcctccatgcaggaggccccacccctgggcagcctgctgaaggatgccctgcacaagcaggcctctgtgcgggccagcgagggcgccatgtctgatggccgggtgcctgctgagcaccggcagggcggcggggacttccggcgggccccagcccctggcaccctgcaggacggcctgtgccacagcctggaccggggcatctctggaaaaggagagggcacagagaagagcagccaggccaaggagctgctgcgctgtgagaagctggacagcaagctggccaacatcgactacctgaggaagaagatgagcctggaggacaaggaggacaacctgtgccctgtgctgaagcccaagatgacagctggcagccatgaatgtctgcccggcaaccctgtgcggcccactggaggccagcaggagcccccaccagccagcgagagccgggcctttgtgagcagcacccacgccgcccagatgtctgctgtgtcctttgtgcccctgaaggccctgaccggccgggtggacagcggcacagagaagccaggcctggtggcccctgagagccctgtgaggaagagccccagcgagtacaagctggagggccgctctgtgtcctgcctgaagcccatcgagggcaccctggacatcgccctgctgagcggcccccaggccagcaagacagagctgcccagccctgagagcgcccagagccccagccccagcggagatgtgcgggcctctgtgccccctgtgctgcccagcagcagcggcaagaagaatgacaccaccagcgcccgggagctgagccccagcagcctgaagatgaacaagagctacctgctggagccctggttcctgccccccagccggggcctgcagaacagccctgctgtgtccctgcctgaccctgagttcaagagggacaggaagggcccccaccccacagcccggagccctggcaccgtgatggagagcaacccccagcagcgggagggcagcagccccaagcaccaggaccacaccacagaccccaagctgctgacctgcctgggccagaacctgcacagcccagacctggcccggccccgctgccccctgcccccagaggccagccccagccgggagaagccaggcctgcgggagagcagcgagcggggccccccaacagcccggtctgagaggtctgctgcccgggctgacacctgccgggagcccagcatggagctgtgcttccctgagacagccaagaccagtgacaacagcaagaacctgctgtctgtgggccgcacccacccagacttctacacccagacccaggccatggagaaggcctgggcccctgggggcaagaccaaccacaaggatggccctggagaggcccggcccccaccccgggacaacagcagcctgcacagcgctggcatcccctgtgagaaggagctgggcaaggtgagaagaggagtggagcccaagccagaggccctgctggcccggcgcagcctgcagcccccaggcatcgagagcgagaagtctgagaagctgagcagcttccccagcctgcagaaggatggagccaaggagcctgagaggaaggagcagcccctgcagaggcaccccagcagcatccccccaccacccctgacagccaaggacctgagcagccctgctgcccggcagcactgcagcagccccagccacgccagcggccgggagcccggggccaagcccagcacagctgagcccagcagcagcccccaggacccccccaagcctgtggccgcccacagcgagagcagcagccacaagcccaggcctggccctgaccccggcccccccaagaccaagcacccagacaggagcctgagcagccagaagcccagcgtgggcgccaccaagggcaaggagcccgccacccagagcctgggcggcagcagccgggagggcaagggccacagcaagagcggcccagatgtgtttcctgccaccccaggcagccagaacaaggccagtgatggcatcggccagggcgagggcggccccagcgtgcccctgcacacagaccgggcccccctggatgccaagccccagcccaccagcggcggccggcccctggaggtgctggagaagcctgtgcacctgccccggcccggccaccctggccccagcgagcctgctgaccagaagctgtctgctgtgggggagaagcagaccctgagccccaagcaccccaagcccagcacagtgaaggactgccccaccctgtgcaagcagacagacaaccggcagacagacaagagccccagccagcctgctgccaacacagaccggcgggcagagggcaagaagtgcacagaggccctgtatgccccagctgagggggacaagctggaggccggcctgagctttgtgcacagcgagaaccggctgaagggagctgagaggcctgctgctggggtgggcaagggcttccctgaggcccggggcaaaggacctggcccccagaagccacccacagaggccgacaagcccaacggcatgaagaggagccccagcgccaccggccagagcagcttccgcagcacagccctgcctgagaagagcctgagctgcagcagcagcttccctgagaccagggctggggtgcgggaggccagcgctgccagcagtgacaccagcagcgccaaggctgctgggggcatgctggagctgcctgcccccagcaacagagaccacaggaaggcccagcctgctggggagggccgcacccacatgaccaagagtgacagcctgcccagcttccgggtgtccaccctgcccctggagagccaccacccagaccccaacaccatgggcggggccagccaccgggaccgggccctgtctgtgacagccaccgtgggggagaccaagggcaaggaccctgccccagcccagcccccaccagccaggaagcagaatgtgggcagagatgtgaccaagcccagccctgcccccaacacagaccggcccatcagcctgagcaatgagaaggactttgtggtgcggcagaggcggggcaaggagagcctgcggagcagcccccacaagaaggccctgtag

SEQ ID NO: 63169 - DNA, 7872 bp, Artificial Sequence
  derived and/or modified sequence
atgggagagaaggtgtctgaggcccctgagcctgtgccccggggctgcagcggccacggcagcaggaccccagccagcgccctggtggccgccagcagccctggggccagcagcgctgagagcagcagcggcagcgagaccctgtctgaggagggggagcccggcggcttcagccgggagcaccagcccccacctcctccacccctgggcggcaccctgggcgcccgggccccagctgcctgggccccagcctctgtgctgctggagcggggcgtgctggccctgcccccacccctgcccggcggcgctgtgcccccagccccccggggcagcagcgccagccaggaggagcaggatgaggagctggaccacatcctgagccccccacccatgcccttcaggaagtgcagcaacccagatgtggccagcggccctgggaagagcctgaagtacaagaggcagctgtctgaagatggccggcagctgcggcggggcagcctgggcggggccctgaccggccgctacctgctgcccaaccctgtggccggccaggcctggccagccagcgctgagaccagcaacctggtgaggatgaggagccaggccctgggccagagcgcccccagcctgacagccagcctgaaggagctgagcctgccccggcggggcagcttctgcaggaccagcaacaggaagagcctgattggaaatggccagagccctgccctgccccggccccacagccccctgagcgcccacgccggcaacagcccccaggacagccccaggaacttcagccccagcgccagcgcccacttctcctttgccaggagaacagatggccgccgctggagcctggccagcctgcccagcagcggctacggcaccaacacccccagcagcacagtgagcagcagctgcagcagccaggagaagctgcaccagctgccctaccagcccaccccagatgagctgcacttcctgagcaagcacttctgcaccacagagagcatcgccacagaaaatcgctgcaggaacacccccatgaggcccaggagccgcagcctgagccctggccgcagccctgcctgctgtgaccacgagatcatcatgatgaaccacgtgtacaaggagcgcttccccaaggccacagcccagatggaggagcggctgaaggagatcatcaccagctacagcccagacaacgtgctgcccctggctgatggagtgctgtccttcacccaccaccagatcatcgagctggcccgggactgcctggacaagagccaccagggcctcatcaccagccgctacttcctggagctgcagcacaagctggacaagctgctgcaggaggcccatgacagaagtgaaagtggagagctggccttcatcaagcagctggtgaggaagatcctgattgtcatcgcccggcctgcccggctgctggagtgcctggagtttgatcctgaggagttctactacctgctggaggccgctgagggccacgccaaggagggccagggcatcaagacagacatcccccgctacatcatcagccagctgggcctgaacaaggaccccctggaggagatggcccacctgggcaactatgacagcggcacagctgagaccccagagacagatgaatctgtgagcagcagcaatgccagcctgaagctgcggaggaagccccgggagagtgactttgagaccatcaagctgatcagcaatggagcctatggagctgtgtactttgtgcgccacaaggagagccggcagagatttgccatgaagaagatcaacaagcagaacctgatcctgaggaaccagatccagcaggcctttgtggagcgggacatcctgacctttgctgagaacccctttgtggtgtccatgtactgcagctttgagacccggcggcacctgtgcatggtgatggagtatgtggagggcggggactgtgccaccctgatgaagaacatgggccccctgcctgtggacatggccaggatgtactttgctgagaccgtgctggccctggagtacctgcacaactatggaattgtgcaccgggacctgaagccagacaacctgctggtgacctccatgggccacatcaagctgacagactttggcctgagcaaggtgggcctgatgtccatgaccaccaacctgtatgagggccacatcgagaaggatgcccgggagttcctggacaagcaggtgtgtggcaccccagagtacatcgcccctgaggtgatcctgcggcagggctacggcaagcctgtggactggtgggccatgggcatcatcctgtatgagttcctggtgggctgtgtgcccttcttcggggacaccccagaggagctgtttggccaggtgatcagtgatgagatcaactggccagagaaggatgaggcccctcctccagatgcccaggacctgatcaccctgctgctgcggcagaaccccctggagcggctgggcactggaggagcctatgaggtgaagcagcaccgcttcttccgcagcctggactggaacagcctgctgcggcagaaggccgagttcatcccccagctggagagtgaagatgacaccagctactttgacaccaggtctgagaagtaccaccacatggagacagaggaggaggatgacaccaatgatgaggacttcaacgtggagatccggcagttcagcagctgcagccaccgcttcagcaaggtgttcagcagcattgaccgcatcacccagaacagcgctgaggagaaggaggacagcgtggacaagaccaagagcaccaccctgcccagcacagagaccctgtcctggagcagcgagtacagcgagatgcagcagctgagcaccagcaacagcagtgacacagagagcaacagacacaagctgagcagcggcctgctgcccaagctggccatcagcacagaaggagagcaggatgaggccgccagctgccctggggacccccatgaggagcccgggaagccagccctgcccccagaggagtgtgcccaggaggagcctgaggtgaccaccccagccagcaccatcagcagcagcaccctgtctgtgggcagcttcagcgagcacctggaccagatcaatggccgctcagaatgtgtggacagcacagacaacagcagcaagcccagcagcgagcccgccagccacatggcccggcagaggctggagagcacagagaagaagaagatcagcggcaaggtgaccaagagcctgagcgccagcgccctgagcctgatgatccctggggacatgtttgctgtgagccccctgggcagccccatgagcccccacagcctgagcagtgaccccagcagcagccgggacagcagccccagccgggacagcagcgctgccagcgccagcccccaccagcccatcgtcatccacagcagcggcaagaactacggcttcaccatccgggccatccgggtgtatgtgggggacagcgacatctacacagtgcaccacatcgtgtggaatgtggaggagggcagccctgcctgccaggccggcctgaaggccggggacctgatcacccacatcaacggggagcctgtgcacggcctggtgcacacagaggtgattgagctgctgctgaagagcggcaacaaggtgtccatcaccaccaccccatttgagaacaccagcatcaagacaggccctgcccggaggaacagctacaagagcaggatggtgagaagaagcaagaagagcaagaagaaggagagcctggagaggagaagaagcctcttcaagaagctggccaagcagcccagccccctgctgcacaccagccgctccttcagctgcctgaacagaagcctgagcagtggagagagcctgcccggcagccccacccacagcctgagccccaggagccccacccccagctaccgcagcaccccagacttccccagcggcaccaacagcagccagagcagcagccccagcagcagcgcccccaacagccctgctggcagcggccacatccggcccagcaccctgcacggcctggcccccaagctgggcggccagcgctacagaagtggaagaaggaagtctgctggcaacatccccctgagccccctggcccggacccccagccccaccccccagcccaccagcccccagaggagccccagccccctgctgggccacagcctgggcaacagcaagatcgcccaggccttccccagcaagatgcacagcccccccaccatcgtgcgccacatcgtgcggcccaagtctgctgagcccccaagaagccccctgctgaagagggtgcagagcgaggagaagctgagccccagctatggcagtgacaagaagcacctgtgcagcaggaagcacagcctggaggtgacccaggaggaggtgcagcgggagcagagccagcgggaggcccccctgcagagcctggatgaaaatgtgtgtgatgtgccccccctgagccgggcccggcctgtggagcagggctgcctgaagaggcctgtgtccaggaaggtgggccggcaggagagcgtggatgacctggaccgggacaagctgaaggccaaggtggtggtgaagaaggcagatggcttccctgagaagcaggagagccaccagaagagccacggccctggcagtgacctggagaactttgccctcttcaagctggaggagcgggagaagaaggtgtaccccaaggctgtggagaggagcagcacctttgagaacaaggcctccatgcaggaggccccacccctgggcagcctgctgaaggatgccctgcacaagcaggcctctgtgcgggccagcgagggcgccatgtctgatggccgggtgcctgctgagcaccggcagggcggcggggacttcagaagagccccagcccctggcaccctgcaggacggcctgtgccacagcctggaccggggcatcagcggcaagggggagggcacagagaagagcagccaggccaaggagctgctgcgctgtgagaagctggacagcaagctggccaacatcgactacctgaggaagaagatgagcctggaggacaaggaggacaacctgtgccctgtgctgaagcccaagatgacagctggcagccatgagtgcctgcccggcaaccctgtgcggcccaccggcggccagcaggagcccccaccagccagcgagagccgggcctttgtgagcagcacccatgctgcccagatgtctgctgtgtcctttgtgcccctgaaggccctgaccggccgggtggacagcggcacagagaagccaggcctggtggcccctgagagccctgtgaggaagagccccagcgagtacaagctggagggccgctctgtgtcctgcctgaagcccatcgagggcaccctggacatcgccctgctgagcggcccccaggccagcaagacagagctgcccagccctgagagcgcccagagccccagccccagcggagatgtgcgggcctctgtgccccctgtgctgcccagcagcagcggcaagaagaatgacaccaccagcgcccgggagctgagccccagcagcctgaagatgaacaagagctacctgctggagccctggttcctgccccccagccggggcctgcagaacagccctgctgtgtccctgcctgaccctgagttcaagagggacaggaagggcccccaccccacagcccggagccctggcaccgtgatggagagcaacccccagcagcgggagggcagcagccccaagcaccaggaccacaccacagaccccaagctgctgacctgcctgggccagaacctgcacagcccagacctggcccggccccgctgccccctgcccccagaggccagccccagccgggagaagccaggcctgcgggagagcagcgagcggggccccccaacagcccggtctgagaggtctgctgcccgggctgacacctgccgggagcccagcatggagctgtgcttccctgagacagccaagaccagtgacaacagcaagaacctgctgtctgtgggccgcacccacccagacttctacacccagacccaggccatggagaaggcctgggcccctgggggcaagaccaaccacaaggatggccctggagaggcccggcccccaccccgggacaacagcagcctgcacagcgctggcatcccctgtgagaaggagctgggcaaggtgcggcggggcgtggagcccaagccagaggccctgctggcccggcgcagcctgcagcccccaggcattgaaagtgagaagtctgagaagctgagcagcttccccagcctgcagaaggatggagccaaggagcctgagaggaaggagcagcccctgcagaggcaccccagcagcatccccccaccacccctgacagccaaggacctgagcagccctgctgcccggcagcactgcagcagccccagccacgccagcggccgggagcccggggccaagcccagcacagctgagcccagcagcagcccccaggacccccccaagcctgtggccgcccacagcgagagcagcagccacaagccccggcccggccctgaccccggcccccccaagaccaagcacccagacaggagcctgagcagccagaagcccagcgtgggcgccaccaagggcaaggagcccgccacccagagcctgggcggcagcagccgggagggcaagggccacagcaagagcggcccagatgtgtttcctgccaccccaggcagccagaacaaggccagtgatggcatcggccagggcgagggcggccccagcgtgcccctgcacacagaccgggcccccctggatgccaagccccagcccaccagcggcggccggcccctggaggtgctggagaagcctgtgcacctgcccaggcctggccaccctggccccagcgagcctgctgaccagaagctgtctgctgtgggggagaagcagaccctgagccccaagcaccccaagcccagcacagtgaaggactgccccaccctgtgcaagcagacagacaaccggcagacagacaagagccccagccagcctgctgccaacacagacagaagagctgagggcaagaagtgcacagaggccctgtatgccccagctgagggggacaagctggaggccggcctgagctttgtgcacagtgaaaatcggctgaagggagctgagaggcctgctgctggggtgggcaagggcttccctgaggcccggggcaagggccctggcccccagaagcccccaacagaagctgacaagcccaacggcatgaagaggagccccagcgccaccggccagagcagcttccgcagcacagccctgcctgagaagagcctgagctgcagcagcagcttccctgagacccgggccggcgtgcgggaggccagcgctgccagcagtgacaccagcagcgccaaggccgccggcggcatgctggagctgcctgcccccagcaacagagaccacaggaaggcccagcctgctggggagggccgcacccacatgaccaagagtgacagcctgcccagcttccgggtgtccaccctgcccctggagagccaccacccagaccccaacaccatgggcggggccagccaccgggaccgggccctgtctgtgacagccaccgtgggggagaccaagggcaaggaccctgccccagcccagcccccaccagccaggaagcagaatgtgggcagagatgtgaccaagcccagccctgcccccaacacagaccggcccatcagcctgagcaatgagaaggactttgtggtgcggcagaggcggggcaaggagagcctgcggagcagcccccacaagaaggccctgtag

SEQ ID NO: 63170 - DNA, 7881 bp, Artificial Sequence
  derived and/or modified sequence
atgggcgagaaggtgagcgaggcccccgagcccgtgccccggggctgtagtggccacggctcccgaactccagcctctgccctggtagctgccagttctccaggcgcaagtagcgcggagtccagtagcggatccgagacattatccgaagagggtgagcctggcggcttttcacgtgaacatcagccaccgcctccccccccgctcggcggcacgctcggggcaagagcccctgccgcttgggctcccgcaagcgtactgttagagaggggcgttctggcacttccaccgccactgcctggcggcgcggtgccacctgcacctcggggatcctcagcctcccaggaggagcaagatgaggagttggatcatatcctttcgcctcccccgatgccgttccgaaagtgttccaatccagatgtggcatcaggacctggaaagagcttgaagtacaaacggcaactctccgaagacgggcgccagctgcgaagaggatctctcggcggcgctctgaccggcaggtacctccttcctaatccagtggcgggccaagcatggcctgcgtctgctgagacgagtaacttagttaggatgcgctcccaggccctgggacagagcgccccttctctcactgcttctctcaaggagttgtctctgccaaggaggggaagcttctgccgcactagcaaccgcaagtccctgattgggaatgggcagagcccagctctgcctcggccccattcacccctctctgcacacgccgggaactctccccaagattcaccacgaaatttttcacccagcgcttctgctcacttttccttcgcacggtctttgaaccggaccgacggtcggcgctggtctctggcctctctgccctcctcgggctatggaacaaacactccctctagcacagtgtccagcagttgctcttcacaagaaaagctgcaccagctgccttaccagcccactcctgacgagctgcattttctcagcaaacacttctgcactacagaatccatcgcaaccgaaaataggtgccgaaacacaccaatgcgtcctagatccagatccctctctccaggccgttcccccgcttgttgtgaccatgagattataatgatgaatcatgtatacaaggaacggttcccgaaagccacagcccagatggaggagcggcttaaggaaataattacttcctacagccctgacaatgtgttacctctggccgatggggtgctctcttttactcaccaccagattatcgaactggccagagactgcctggataaatctcaccagggcttgatcacatctaggtatttcctggagttgcagcataaactggacaagttattacaggaggctcacgacaggagcgaatccggcgaactggcgtttataaagcaattggttagaaaaattctgatcgtcattgcgagacccgcacgcctgctagaatgtctggaattcgatcccgaggagttctactatctcctcgaagccgcggagggccacgcaaaggaaggccaaggtataaaaaccgacattccacgctacatcatcagccagctcgggctgaataaggatccgctggaggaaatggcccatcttggaaactacgacagcggaactgccgaaacccctgagacggacgagtcagtgagcagcagtaacgcttccctgaagctgcggagaaagcccagagagtccgattttgagactattaaactcatcagcaacggagcctacggggccgtgtatttcgtgaggcacaaggagtcacgtcagcggtttgccatgaagaagataaataaacagaatctgattctgaggaatcagattcagcaggctttcgtggaaagagatatacttaccttcgctgagaacccattcgtcgtctccatgtattgcagttttgagacacggcgccatttgtgcatggtcatggagtacgtggaaggtggggattgcgccaccctcatgaaaaatatgggccctctgcctgtggacatggccaggatgtactttgctgagacagtgctcgcactcgaatatctgcataattatgggatagtgcatagagacctcaaacccgacaacctgctcgtaacgagcatgggccacataaagcttaccgatttcggtctctccaaagtcgggctgatgtctatgaccaccaatctctacgagggtcatattgaaaaggatgctagagaattcctggataagcaggtgtgcgggaccccagaatacattgcgccggaggtgatcctccgacaaggttacggcaaaccggtcgattggtgggcgatgggcataatcctttatgagttcctggtcggctgcgtgcctttcttcggcgacactcccgaagagctttttggacaggtaatctctgatgaaattaattggccggagaaagacgaggcgcccccgcctgatgcccaggacctcatcacactgctgctgcggcaaaacccactggagaggttgggcaccgggggagcctatgaggtgaagcagcacaggtttttcaggagtctagactggaattccttgttgagacaaaaagctgagttcatcccgcaactggagtcagaggacgatacatcatattttgacactagaagcgaaaaataccatcacatggagacagaagaagaggatgatactaacgatgaagattttaacgtagagattcgacaatttagttcatgttcccatcgtttctcaaaggtgttctctagtattgatcgcatcacccaaaatagcgccgaggagaaggaagatagcgtggataagacaaagtcaaccacgctgccgtccacagagactctatcttggagctcagaatactccgagatgcagcagctgagcacctcgaattctagtgacacagagtccaacaggcacaaactatcttcaggtttgctgcctaaacttgccatttccaccgagggagaacaggacgaggcagctagttgccctggagacccccacgaggagcccgggaagccggccctgcccccagaagaatgcgcgcaagaagagcctgaggtcacaactcctgcatccaccatatcatcatccactttaagcgtggggtcctttagtgaacacctcgaccagattaacggtcgctccgaatgtgtggattctacggataactcctccaagccatcgagcgagcctgcatcacacatggctcgtcagaggctggaaagcacagagaagaagaagatttccgggaaagtgacaaaaagcctgagcgccagcgcactatccctaatgattccaggcgacatgtttgctgtcagcccactgggttcacctatgagcccccactctctcagcagcgaccctagcagctcacgcgactcaagtccctctagagactcatcagccgctagcgcctctccgcatcaaccaattgtcatccacagcagcggaaagaattatgggtttactattcgtgcgatccgagtgtacgtgggggatagcgatatctacaccgtgcaccatatcgtgtggaacgtcgaggaaggcagtcctgcctgccaggccggcttgaaagcaggcgacctcataacacacattaacggtgaacctgtacacggtctcgtgcatacagaagtgattgaattgctgctgaagagcggtaataaggtgtctataactacgacaccctttgaaaacacatccatcaagacagggcccgcccggagaaatagttacaaaagccggatggtgaggcggtccaagaaatctaagaaaaaagagtcgctggaacgcagacggagcctattcaagaaattggcaaagcagccatcccccctgctgcatacttcccggtcatttagctgcttgaacagatctctatccagtggcgagagccttcccggatctccaacccactcattatctccacggagtccgactccctcttatcggagcactccagatttcccatcagggacaaactccagccagtccagtagtccgtctagctccgccccaaactcccccgcagggagtggacatataaggccatcgaccctgcatgggctggcgccgaaactgggagggcagaggtaccgaagcggtagaagaaagtcagctggtaatatccctctatctcccctcgcccggaccccgtcgcccacaccccagccgacatccccccaaaggtccccgtcccccttgctcggacattcgctaggtaatagcaagatcgctcaggctttccccagcaagatgcactcccctcccacaatcgtcaggcacattgtcagaccaaaatccgctgagccaccacgtagccccctcctcaaacgcgtccagagtgaggagaagctgagtccgtcttatggctccgacaaaaagcatctgtgctcaaggaagcatagcctggaagtgacacaggaagaggtgcagcgcgagcaaagccaacgcgaggcgcccctgcagagtctggacgagaacgtttgtgacgtgccacccctgtccagggccaggcccgtggaacaaggctgcctgaagcggcccgtatcccgcaaagtgggcagacaggagagcgtggacgacctggatagggacaagctgaaagcaaaggtcgtagtaaagaaagctgatggcttccccgagaagcaggaaagtcaccaaaaatcccacggccctgggtctgacctcgaaaatttcgctctctttaagctggaggaacgagagaaaaaggtgtatcccaaggctgtggagaggtccagtacgttcgaaaataaggcatcaatgcaagaagccccgccattgggcagcttgttgaaggacgctctccataagcaggcgtcagtgcgagccagcgaaggcgcaatgagtgatggacgggtccccgcagaacacagacaaggagggggcgactttagaagagctccagcccctggcaccttgcaggacggcctgtgtcatagcctggacaggggtatcagcgggaaaggcgaggggaccgagaagtcttctcaggctaaggagctgctcagatgcgaaaagctcgatagcaaactggccaatatcgactaccttaggaaaaagatgtcgctggaggacaaggaagataacctttgcccagtcctgaaacccaaaatgaccgcaggatcccacgagtgtttgcccggaaatcccgtgcgcccaaccggcggtcagcaagaacctccaccagcctctgagagtagggcattcgtcagcagcacacatgctgcccagatgagcgcggtgtctttcgtcccactgaaggctctcaccggacgggtggatagcgggaccgaaaagccagggctggtggcccctgagtctcccgtgcgcaagtccccctcagagtataagctcgaaggccggtctgtgtcctgcctgaagcccatcgaaggaacactggacatagccctattatccggccctcaagcttccaagacagaattaccttcaccagagagcgctcagagcccatcgccttccggagatgtccgtgcatccgtgccacccgtgctgcccagttccagcggcaagaagaatgacaccacatcagcccgcgaactgtctcctagcagtcttaaaatgaacaagtcatatctactagagccttggttcctgccaccctccagaggactgcaaaattcaccggccgtgtcgctgccagacccagaatttaagagggaccgcaagggaccacatcctacagcaagatctccagggaccgttatggagtctaacccgcagcagcgtgaaggctccagccccaaacatcaggatcacacaaccgaccctaaactgctcacctgcctcggccagaacctgcatagccctgaccttgctaggcctcgctgccccttaccacccgaagccagccccagtcgggaaaagcccgggctgagagaaagcagcgagcggggccctcccactgcaaggagcgaaagaagtgctgctagggccgatacctgcagggaaccctctatggagctgtgtttcccggaaactgccaagactagtgacaacagtaagaacctgttgtccgtcggtcgcacccatcctgacttctacacacagacacaggctatggaaaaagcatgggctcccggtgggaagactaaccacaaggacggcccgggcgaagctcgcccccctccacgtgacaacagtagcctgcatagcgcagggatcccttgtgaaaaggaattgggcaaagtgagacgaggggttgagcccaagcctgaagctcttctagctcggcgatccctgcagccacccggcatcgagagcgagaaatctgagaagctgtcttcatttccaagcctacagaaagatggcgccaaggaaccagagcgcaaagaacagccactgcagagacatccctctagcattcctcctccgcccttgacagccaaagacctgtcctcaccagctgcccgccaacactgctcctctcccagccatgcttctgggagggagccaggagccaaaccatctacagccgaaccatccagttcccctcaagatcctccaaagcctgtggccgcccacagcgagtcttcttcacataagcctaggccagggcctgaccccgggcccccaaagactaagcaccctgacaggtcgttaagcagccaaaaacccagcgtgggagccaccaaaggtaaagagcctgcaacacagagccttggcggctccagtcgcgagggtaaggggcacagcaagagtgggcccgatgtcttccctgcaacccccgggtcacagaataaagcaagtgatggcatcgggcagggagagggcgggccatctgtgcctttacacaccgaccgtgcacccctggatgccaagccgcagccaacgtctggtggtagacccctggaggtcctcgagaaacccgttcatctacctaggcccggccaccctggccctagcgagccagcagatcagaaattaagcgctgtgggagagaagcagacactgtcaccgaagcaccccaagccttcaacagtcaaggactgtcctacgctgtgtaaacagactgacaacagacagactgataagagcccctcacaaccggctgcaaatacagataggcgcgcggaaggcaaaaagtgtacggaagctctctacgcccccgccgagggtgataaactggaggccggcctgtctttcgtgcactccgagaaccggctgaaaggggcagaacgacccgctgcgggcgtcggcaagggctttcccgaagcccgaggcaaaggacccggaccccagaaaccccccaccgaagccgataagccgaacggtatgaaacgctcacctagcgcgacagggcagagctccttccggagcacggccctgccggaaaaaagtctgtcctgtagtagcagcttccctgagacgcgagctggagtgcgggaagccagcgccgccagtagcgacacttcttcagccaaagcagcaggtgggatgctggaactccccgcaccatccaacagagatcatagaaaggctcagcctgccggggagggaagaacccacatgacaaagtcagattccctgccctcgtttagggtttctacgctgccccttgagtcacaccaccccgaccctaacaccatgggaggcgccagtcaccgcgacagagccttgagtgtgactgcaactgtaggcgaaacaaagggtaaagaccccgctcccgcccagcctcccccggctcggaagcagaacgtgggccgtgacgtgacaaagccgtctcctgcacccaataccgaccgacctattagcctaagcaatgaaaaggacttcgtcgtgaggcagcggcgcgggaaggaaagtctgcgcagctccccacataaaaaggccctctag

SEQ ID NO: 63171 - DNA, 7872 bp, Artificial Sequence
  derived and/or modified sequence
atgggcgagaaggtgagcgaggcccccgagcccgtgccccggggctgcagtggtcatggctccagaacccctgcctccgccctcgttgcagcgagcagccctggggcctcatctgccgagagctcatcaggctccgagacgttgtctgaggagggagagcctggagggttctcccgcgagcaccagcccccaccaccgcctccgcttggtggtacactaggagctagagcccctgcagcgtgggccccagcctccgtgctgttggaaagaggagtattagctttaccgcctccactgccaggcggagctgtccccccagcaccacggggaagttcagctagtcaggaggagcaggacgaggaactggaccacattctgtccccaccgcccatgcccttcagaaaatgtagcaatccggatgttgcctccggccctggcaagtcactcaagtataagaggcaactcagtgaagacggacgtcagctgcggcgtggctccctaggaggcgcccttactggcaggtatcttctgcctaatccagtggctggtcaggcatggccagcatccgccgaaacgtccaacttggttcgcatgagatcccaggcactgggacagtccgctccatcactcaccgcctctctgaaagaactctccttgccacggagagggtccttttgcagaacttcaaatagaaaatccctgattggaaacggacagagcccggccctgcctaggccccactcacccctgtcagcccatgccggcaacagtccacaggactctccgcggaatttcagcccatctgccagtgcacatttcagttttgctcgcaggacagacgggagaaggtggtccctcgctagtctacccagttccgggtatggcacgaacacccccagtagtacggtcagctcttcttgttcatctcaagagaagctccatcagctgccttaccagccgactcccgacgaacttcattttctgtctaaacacttctgcaccaccgaaagcatcgccaccgaaaaccgatgccggaatactccgatgcgtccccgttccaggagtctcagccccgggaggtcgccagcctgttgcgatcacgaaattattatgatgaaccacgtctacaaggagcgcttcccaaaagctacagcacagatggaggagcggctgaaagaaatcataacatcttactctcctgacaatgtcctgccattagctgacggcgtgctctcttttacccatcaccagatcatcgagctcgcgagggactgcctcgataaatcccatcagggactgatcacatcccgctactttctggaactgcagcacaaactcgataaactgctccaggaagcgcacgatcggtcggaaagcggcgaattggcttttattaaacagctggttaggaagatactaatcgtgatcgccagacccgctcggctgttggaatgtctcgagttcgatcctgaagaattctattacctgctggaagctgcagaaggccacgcaaaggaaggacagggaattaaaactgacatccccagatatatcatctcccagttggggttgaacaaggaccctctggaagagatggctcacctggggaactacgactcggggacagccgagacgccagagactgacgaaagtgtgagctcctcgaatgcaagtctgaagttgaggagaaaaccccgcgaatctgactttgagacgatcaaactcatatcgaacggagcctacggggccgtgtactttgtccgacataaggaatccagacagcgatttgcaatgaagaaaatcaacaagcagaacctcattttaaggaatcagattcaacaggcatttgtggaaagagacatcctcacatttgctgagaaccctttcgtagtgagcatgtattgctcatttgaaacgcgacggcacctgtgtatggtgatggagtatgttgaaggaggagactgcgctacccttatgaaaaacatgggacccctgccagtcgacatggctaggatgtattttgcggagaccgtgttagcgctcgagtaccttcataattacggaatcgtccatcgagacctcaagcctgataatctgctggtaactagtatgggtcacataaagttgacagactttggactttcgaaagtggggctgatgagtatgactactaatttatacgaggggcacatagaaaaagatgccagggaattcctcgacaaacaagtttgcggaactccagagtatattgcccccgaggtgatcctacgccagggttatggtaagcccgtcgactggtgggctatggggataattttgtacgaatttctcgttggttgcgtccctttctttggggatacccctgaggaactgtttgggcaggtcatcagcgacgagatcaattggccagagaaggatgaagctccgccgcccgacgcccaagacctgatcacgttgctgcttcgacagaatccactagagcgcctaggaactggaggagcgtacgaagtcaagcaacatcggtttttcagatccctggactggaatagcctgctccggcagaaggctgaattcatcccgcagttggaaagcgaggatgacacctcgtatttcgacactcgctccgagaagtaccatcatatggaaactgaagaggaggatgacactaacgatgaggactttaacgttgagattaggcagtttagctcatgctcacatcgtttttctaaggtgtttagttcgatcgataggattacccagaacagcgcagaagagaaagaggactcagtggataaaacaaaatctactacactgccaagtacagagaccctcagctggagcagtgaatactcagaaatgcagcagctgtctactagcaattcgagcgatactgagagcaaccgtcataagctcagttctgggctactcccgaagctagcgatttctacagagggcgaacaggatgaggcagccagttgtcctggcgatccgcacgaagaaccgggcaaaccagccctaccacctgaagaatgcgctcaggaagagccagaggttacaacccccgcgtcgacaattagcagtagcacattgtccgttggctcctttagcgaacacctggaccaaattaacggtaggagcgaatgtgttgattcaacagataattcgtccaagcctagctcagaacccgcgagccacatggcccgccagcgtctggaatccaccgagaaaaagaaaatttctggcaaagtgactaagtcactgtcagcttcagccttgagcctaatgattcctggagacatgttcgccgtgagtcccctgggaagcccaatgagccctcactcgctcagctctgatcctagctctagccgagacagttcaccatcacgggacagctccgccgccagcgcttccccgcatcagcccattgtgatccattcaagtggcaagaattatgggtttactattagggccatccgcgtctacgtgggtgacagcgatatctacaccgtacaccatatcgtgtggaatgtcgaggaaggcagcccagcatgccaagctggcctcaaagcaggtgatctgatcacacacattaacggtgagccagtgcacggactggtgcacactgaagtgattgaacttctgctgaagagtggaaacaaggttagcataactaccacccccttcgagaacaccagtatcaaaaccggccctgccagaagaaactcatacaagtcccgtatggtgagacgcagtaagaaaagcaaaaagaaagagagcctagaaaggcggcggagcctattcaagaaactggctaagcagcctagccctttgctgcacacgtccaggagtttcagctgcctgaacagaagcctttctagcggagaatccttgcctggatcccccacccactccctcagtccccgttcacctacgccaagttatcgatctacacccgactttccgagtgggacaaactccagtcagagtagctcaccctcctccagcgcccccaatagcccagcagggtccggtcatatcaggccatcaaccctccacggcctagctcctaaattaggcggtcagagatataggagtggccgtcgcaaaagtgctggtaatatccctttaagcccactggcgaggacgccttcgcctacaccacagcctacgtccccccagcgtagtccatccccattactaggtcatagtctgggaaactcgaagatcgcccaggccttccccagcaagatgcattctccgcctacgatcgtccgccacatcgtgcggccgaagagtgcggaaccccctcgcagtcctctgctcaagcgggttcagtccgaggagaaactctctccaagttatgggagcgacaagaagcatctgtgttctcgcaagcactccctggaagttacacaggaagaggtgcagcgtgagcagtcccagagggaggctcccctccagtcgctggacgaaaatgtatgcgatgtacctcccctcagtagagccagacccgtcgaacaggggtgtctcaagcggccagtatcacggaaggtagggcggcaggaaagtgtagacgatctggatagagataaactcaaagcaaaagtagtcgtcaaaaaggcagatggattccctgagaaacaggagagtcaccaaaagtctcacggacctggcagtgacctggaaaatttcgctttgttcaaactcgaagagagggaaaagaaggtctatcccaaagcggtcgaacgctcatccactttcgaaaataaagcttcaatgcaagaggcaccacctctggggagccttctcaaggacgcactccacaagcaagcaagcgtgcgggcttcagaaggagcaatgtcagatggacgagttcccgcagaacataggcaaggtggcggagatttccggagagcacctgcaccaggtaccctccaggacggcctttgccacagtctggatcgtggaatctctggcaagggggaaggaaccgaaaaatctagtcaagccaaggaactgttacgctgtgaaaaactcgatagcaagctggcaaacatcgactacttgaggaaaaagatgtccctggaggacaaagaggacaatttatgccccgtacttaaacctaaaatgaccgctggaagtcacgagtgcctgcccggcaatcctgtccggcctaccggggggcaacaagaaccaccacctgcttcagaatctcgggcttttgtgagctccactcacgccgctcaaatgtcggcagtgagcttcgttccgttaaaggcactgacaggccgcgtggattcaggaacagaaaagcccggcctcgtggctcccgaaagtcctgtgcggaagtctccctcagaatataagctcgaaggccgcagtgtgtcgtgtctcaagccaatcgaaggaacactggacatcgcactactctctggacctcaagccagtaaaacagaattgccctctcctgaaagtgctcagtcccctagtccatccggcgacgtgagagcatcggtgccccctgtcctcccttcctcctcaggaaagaaaaatgacacgacatctgccagagagctgtctccttcctccctgaaaatgaacaaatcctacttgctcgaaccatggttcttgccacccagccgcggtcttcagaatagccctgccgtctccctgcctgatcccgagtttaagagggatagaaaggggcctcatcccaccgcccgaagccccggcactgtgatggagtctaacccacagcaaagggagggcagcagcccaaaacaccaggaccacactacagatccaaagcttttgacttgtctggggcagaacctccatagtccagatttagctcgaccacggtgccccctgccaccggaagcaagccctagtagggaaaaaccgggcctgcgagagagttctgagcggggtcctccaaccgccaggtcggagagatccgcagctcgcgcagacacttgtcgggagccgagtatggagctctgcttccccgaaacagccaaaacctcagataattctaagaatttgcttagcgttgggcggacccaccctgacttctatacccagacccaggccatggagaaggcttgggcgcccggcgggaagacaaatcataaggatggccccggcgaggcacgcccgcctccgcgcgataactcctccctgcactccgctggcattccctgtgaaaaagagctgggcaaagtgagaaggggtgtcgaaccaaaacctgaagctctgctggctaggcggtctctacagcccccgggcattgaaagcgaaaagtcagagaagctttcaagttttccgtcacttcagaaggacggcgccaaagagcctgagaggaaagagcagccactccagcggcacccgtcgtctataccccccccccccctgacagccaaggacctctcctcgcccgctgcacgccagcattgttcctctccatcccatgcatccggacgagagcccggcgccaagccttctacggctgagccttccagttcacctcaggacccacctaagccagtggctgctcattcagagtcatcctcccacaagcctcggcccggccccgatccgggaccaccgaagaccaagcaccccgatcgttctttgtcatctcaaaaacccagtgtgggggcaaccaaagggaaggaaccagccacacagtctttggggggctcctcaagagagggtaagggccatagtaaatctggacccgatgttttccccgccactcctggaagccagaacaaggcatcggacggaattggacaaggggagggcgggccctctgtgcccctgcataccgacagggcaccactggatgcaaagccccaaccgacatctggggggcgacctcttgaagtgctggagaagccagtacacctaccacgccctggtcaccctggtccatcagaacctgctgatcagaagctctctgccgttggggagaaacagaccctgtccccaaagcaccccaagccaagcactgtgaaggattgccctaccctatgcaaacaaaccgacaataggcagacagataagagcccgtcacagcctgccgccaacaccgaccggcgggctgaaggcaagaaatgcacagaagctctgtatgctcccgccgaaggcgataaactggaagcagggctgtcattcgttcattcagagaatagacttaaaggcgccgaaagacccgccgcaggagtcggtaagggcttccctgaagcccgcgggaagggacccggccctcagaaaccccccaccgaggccgacaagcccaacggcatgaagcgttccccctcggccactgggcagtcttcattcaggtctacggccctgccagaaaaatctttgagttgttcttcgagctttcctgagacccgtgcaggagtgagagaggctagtgccgcatctagcgatacgtcctctgcgaaagcagctggaggcatgctggagttaccagccccatccaatagagaccatcgtaaagcccagccggctggggagggcaggacccacatgacaaagagcgattccctcccctcattccgcgtgtccacgctgccattggaatcccatcaccccgatccaaatacaatgggcggggccagccacagagacagagctctcagcgtcactgcaacggtcggggagacgaaaggaaaagatccagcgcctgctcagccaccacccgcccgcaagcagaacgttgggagagacgtgaccaagccaagcccagcaccaaatacagatcggccaatatccttaagcaacgagaaagacttcgttgtgcgccagaggcggggcaaagagtcactgcgcagcagcccacataaaaaggccctctag

SEQ ID NO: 63172 - DNA, 10733 bp, Artificial Sequence
  derived and/or modified sequence
caaggagaagccgcagtacccgcggctcgggtgcagcgcgggagcacagtggagcgcagatcgcggacccgagcgggcatgtccccgcgcgcgggagcctccgtttgcggccgggcccgggcggctgtgaacttagcagcgggctcctgcggccccgtcactgccatgtagtcgctggcggggctccctgcagcccgggagcggcagtgccagtgagcctgagcccaggagcccgcgtcttccccgggaggcgctgagtgcgcgccgcgcccccgccgctcgggaggcactttgggccagacagggaaatgggggagaaagtttcggaggcgccagagccggtgccccgcggctgcagtggccacggcagccggactccagcctctgcgctggtcgccgcgtcctctccgggtgcttcctcggccgagtcctcctcgggctcagaaactctgtcggaggaaggggagcccggcggcttctccagagagcatcagccgccgccgccgccgccgttgggaggcaccctgggcgcccgggcgcccgccgcgtgggctccggcaagcgtgctgctggagcgcggagtccttgcgctgccgccgccgcttcccggaggagctgtgccgcccgcgccccggggcagcagcgcgtcccaggaggagcaggacgaggagcttgaccacatattatcccctccacccatgccgtttcggaaatgcagcaacccagatgtggcttctggccctggaaaatcactgaagtataaaagacagctgagtgaggatggaagacagctaaggcgagggagcctgggaggagccctgactgggaggtaccttcttccaaacccggtggcgggacaggcctggccggcctctgcagagacgtccaacctcgtgcgcatgcgcagccaggccctgggccagtcggcgccctcgctcaccgccagcctgaaggagctgagtctccccagaagaggaagtttttgccgaacaagcaaccggaaaagcttaataggcaatgggcagtcaccagcattgcctcgaccacactcacctctctctgctcatgcaggaaatagccctcaagatagtccaagaaatttctcccccagtgcctcagcccatttttcatttgcacggagtctcaataggactgatggacgccgctggtcgttggcttctctcccttcctctggctatgggacaaacacacccagctctacggtctcttcatcctgttcctcccaggagaagttgcatcagttaccataccaaccaacaccagacgagttacacttcttatcaaaacatttctgtaccaccgaaagcatcgccactgagaacagatgcaggaacacgccgatgcgcccccgttcccgaagtctgagccctggacgttctcccgcctgctgtgaccatgaaataattatgatgaaccatgtctacaaagaaaggttcccaaaggctacagctcagatggaagaacgtctaaaggaaattatcaccagctactctcctgacaacgttctacccttagcagatggagtgcttagtttcactcaccaccagattattgaactggctcgagattgcttggataaatcccaccagggcctcatcacctcacgatacttccttgaattacagcacaaattagataagttgctacaggaggctcatgatcgttcagaaagtggagaattggcatttattaaacaactagttcgaaagatcctaattgttattgcccgccctgctcggttattagagtgcctggaatttgatccggaagaattttactacctattggaagcagcagaaggccatgccaaagaaggacagggtattaaaaccgacattcccaggtacatcattagccaactgggactcaataaggatcccttggaagaaatggctcatttgggaaactacgatagtgggacagcagaaacaccagaaacagatgaatcagtgagtagctctaatgcctccctgaaacttcgaaggaaacctcgggaaagtgattttgaaacgattaaattgattagcaatggagcctatggggcagtctactttgttcggcataaagaatcccggcagaggtttgccatgaagaagattaataaacagaacctcatccttcgaaaccagatccagcaggcctttgtggagcgggatatcctgacttttgcagaaaacccctttgttgtcagcatgtattgctcctttgaaacaaggcgccacttgtgcatggtcatggaatatgtggaagggggagactgtgctactttaatgaaaaacatgggtcctctccctgttgatatggccagaatgtactttgctgagacggtcttggccttggaatatttacataattatggaattgtacacagggatttgaaaccagacaacttgttggttacctccatggggcacataaagctgacagattttggattatctaaggtgggactaatgagcatgactaccaacctttacgagggtcatattgagaaggatgctagagagttcctggataaacaggtctgtggcacacctgaatacattgcaccagaagtgattctgaggcagggttatggaaagccggtggactggtgggccatggggattatcctctatgaatttctggttggatgcgtgccattctttggggatactccagaggagctatttggacaagtcatcagtgatgagatcaactggcctgagaaggatgaggcacccccacctgatgcccaggatctgattaccttactcctcaggcagaatcccctggagaggctgggaacaggtggtgcatatgaagtcaaacagcatcgattcttccgttctttagactggaacagtttgctgagacagaaggcagaatttattccccaactggaatctgaggatgacacaagttattttgatactcggtctgagaagtatcatcatatggaaacggaggaagaagatgacacaaatgatgaagactttaatgtggaaataaggcagttttcttcatgttcacacaggttttcaaaagttttcagcagtatagatcgaatcactcagaattcagcagaagagaaggaagactctgtggacaaaaccaaaagcaccaccttgccatccacagaaacactgagctggagttcagaatattctgaaatgcaacagctatcaacatccaactcttcagatactgaaagcaacagacataaactcagttctggcctacttcccaaactggctatttcaacagagggagagcaagatgaagctgcctcctgccctggagacccccatgaggagccaggaaagccagcccttcctcctgaagagtgtgcccaggaggagcctgaggtcaccaccccagccagcaccatcagcagctccaccctgtcagttggcagtttttcagagcacttggatcagataaatggacgaagcgagtgtgtggacagtacagataattcctcaaagccatccagtgaacccgcttctcacatggctcggcagcgattagaaagcacagaaaaaaagaaaatctcggggaaagtcacaaagtccctctctgccagtgctctttccctcatgatcccaggagatatgtttgctgtttcccctctgggaagtccaatgtctccccattccctgtcctcggacccttcttcttcacgagattcctctcccagccgagattcctcagcagcttctgccagtccacatcagccgattgtgatccacagttcggggaagaactacggctttaccatccgagccatccgggtgtatgtgggagacagtgacatctatacagtgcaccatatcgtctggaatgtagaagaaggaagtccggcatgccaggcaggactgaaggctggagatcttatcactcacatcaatggagaaccagtgcatggacttgtccacacagaagttatagaactcctactgaagagtgggaataaggtgtcaatcactactaccccatttgaaaacacatcaatcaaaactggaccagccaggagaaacagctataagagccggatggtgaggcggagcaagaaatccaagaagaaagaaagtctcgaaaggaggagatctcttttcaaaaagctagccaagcagccttctcctttactccacaccagccgaagtttctcctgcttgaacagatccctgtcatcgggtgagagcctcccaggttcccccactcatagcttgtctccccggtctccaacaccaagctaccgctccacccctgacttcccatctggtactaattcctcccagagcagctcccctagttctagtgcccccaattccccagcagggtccgggcacatccggcccagcactctccacggtcttgcacccaaactcggcgggcagcggtaccggtccggaaggcgaaagtccgccggcaacatcccactgtccccgctggcccggacgccctctccaaccccgcaacccacctccccgcagcggtcaccatcccctcttctgggacactcactgggcaattccaagatcgcgcaagcctttcccagcaagatgcactccccgcccaccatcgtcagacacatcgtgaggcccaagagtgcggagccccccaggtccccgctgctcaagcgcgtgcagtccgaggagaagctgtcgccctcttacggcagtgacaagaagcacctgtgctcccgcaagcacagcctggaggtgacccaagaggaggtgcagcgggagcagtcccagcgggaggcgccgctgcagagcctggatgagaacgtgtgcgacgtgccgccgctcagccgcgcccggccagtggagcaaggctgcctgaaacgcccagtctcccggaaggtgggccgccaggagtctgtggacgacctggaccgcgacaagctgaaggccaaggtggtggtgaagaaagcagacggcttcccagagaaacaggaatcccaccagaaatcccatggacccgggagtgatttggaaaactttgctctgtttaagctggaagagagagagaagaaagtctatccgaaggctgtggaaaggtcaagtacttttgaaaacaaagcgtctatgcaggaggcgccaccgctgggcagcctgctgaaggatgctcttcacaagcaggccagcgtgcgcgccagcgagggtgcgatgtcggatggccgggtgcctgcggagcaccgccagggtggcggggacttcagacgggcccccgctcctggcaccctccaggatggtctctgccactccctcgacaggggcatctctgggaagggggaaggcacggagaagtcctcccaggccaaggagcttctccgatgtgaaaagttagacagcaagctggccaacatcgattacctccgaaagaaaatgtcacttgaggacaaagaggacaacctctgccctgtgctgaagcccaagatgacagctggctcccacgaatgcctgccagggaacccagtccgacccacgggtgggcagcaggagcccccgccggcttctgagagccgagcttttgtcagcagcacccatgcagctcagatgagtgccgtctcttttgttcccctcaaggccttaacaggccgggtggacagtggaacggagaagcctggcttggttgctcctgagtcccctgttaggaagagcccctccgagtataagctggaaggtaggtctgtctcatgcctgaagccgatcgagggcactctggacattgctctcctgtccggacctcaggcctccaagacagaactgccttccccagagtctgcacagagccccagcccaagtggtgacgtgagggcctctgtgccaccagttctccccagcagcagtgggaaaaagaacgataccaccagtgcaagagagctttctccttccagcttaaagatgaataaatcctacctgctggagccttggttcctgccccccagccgaggtctccagaattcaccagcagtttccctgcctgacccagagttcaagagggacaggaaaggtccccatcctactgccaggagccctggaacagtcatggaaagcaatccccaacagagagagggcagctcccctaaacaccaagaccacaccactgaccccaagcttctgacctgcctggggcagaacctccacagccctgacctggccaggccacgctgcccgctcccacctgaagcttccccctcaagggagaagccaggcctgagggaatcgtctgaaagaggccctcccacagccagaagcgagcgctctgctgcgagggctgacacatgcagagagccctccatggaactgtgctttccagaaactgcgaaaaccagtgacaactccaaaaatctcctctctgtgggaaggacccacccagatttctatacacagacccaggccatggagaaagcatgggcgccgggtgggaaaacgaaccacaaagatggcccaggtgaggcgaggcccccgcccagagacaactcctctctgcactcagctggaattccctgtgagaaggagctgggcaaggtgaggcgtggcgtggaacccaagcccgaagcgcttcttgccaggcggtctctgcagccacctggaattgagagtgagaagagtgaaaagctctccagtttcccatctttgcagaaagatggtgccaaggaacctgaaaggaaggagcagcctctacaaaggcatcccagcagcatccctccgccccctctgacggccaaagacctgtccagcccggctgccaggcagcattgcagttccccaagccacgcttctggcagagagccgggggccaagcccagcactgcagagcccagctcgagcccccaggaccctcccaagcctgttgctgcgcacagtgaaagcagcagccacaagccccggcctggccctgacccgggccctccaaagactaagcaccccgaccggtccctctcctctcagaaaccaagtgtcggggccacaaagggcaaagagcctgccactcagtccctcggtggctctagcagagaggggaagggccacagtaagagtgggccggatgtgtttcctgctaccccaggctcccagaacaaagccagcgatgggattggccagggagaaggtgggccctctgtcccactgcacactgacagggctcctctagacgccaagccacaacccaccagtggtgggcggcccctggaggtgctggagaagcctgtgcatttgccaaggccgggacacccagggcctagtgagccagcggaccagaaactgtccgctgttggtgaaaagcaaaccctgtctccaaagcaccccaaaccatccactgtgaaagattgccccaccctgtgcaaacagacagacaacagacagacagacaaaagcccgagtcagccggccgccaacaccgacagaagggcggaagggaagaaatgcactgaagcactttatgctccagcagagggcgacaagctcgaggccggcctttcctttgtgcatagcgagaaccggttgaaaggcgcggagcggccagccgcgggggtggggaagggcttccctgaggccagagggaaagggcccggtccccagaagccaccgacggaggcagacaagcccaatggcatgaaacggtccccctcagccactgggcagagttctttccgatccacggccctcccggaaaagtctctgagctgctcctccagcttccctgaaaccagggccggagttagagaggcctctgcagccagcagcgacacctcttctgccaaggccgccgggggcatgctggagcttccagcccccagcaacagggaccataggaaggctcagcctgccggggagggccgaacccacatgacaaagagtgactccctgccctccttccgggtctccaccctgcctctggagtcacaccaccccgacccaaacaccatgggcggggccagccaccgggacagggctctctcggtgactgccaccgtaggggaaaccaaagggaaggaccctgccccagcccagcctcccccagctaggaaacagaacgtgggcagagacgtgaccaagccatccccagccccaaacactgaccgccccatctctctttctaatgagaaggactttgtggtacggcagaggcgggggaaagagagtttgcgtagcagccctcacaaaaaggccttgtaacggggagggcccaggggcaggactgtggagacccgtcctgaacgggcgactgtgtcttgactacctttcaaaaccagcactgtgtgggaatgtccgccaggcagagctcggagcctcattgagacaggggagagagaaagacaaagaggggaccttcttccagatgccttcccagttgtaaccggtaaaactgttaccagatagtgtttgtacaaaaaaaaaaaaaaaaaaaaaaaaaaaaattacctttacagttgagggttgttgaggaaaatgattttctttgtaaatatatagcatcgtgtttggtttgggatgtagagtctatacctggctgctgattgcgtcgtttactacagctttttttaaataagatttttgctttaccatttatcataatgtagtaatgaagcaaaatggtcaaaactgggtgtgtgtgaacagagatacacccatattcgtgtatatacacatccacctacatgttttggtctgtggtttaagagactatttcaaggttccatttttataagctaaaacattctaagttaagatggaagaaagccctaaacacagtagattctgagtttttatgtgtattttaaccagagtttctgatagtactgtatctggctacctatatttccagatctaaagcaagaactactctaagtactgcatttggaatcctcctccattaggaatggccaggacaagtggagctagccattttcattacacggccatcccaatggacactggatccctggtccaactgtctaaaaggccagttgttcctttctgtggatgtggatgtctggccttcacctgaggtagagcggggactataaacacacatcaactttctttctgtttgctttcttttccttcttttcaaactcttaaactcaggcctttatgctgtgagtgactagtccaagaagcacacattttgtagtagtcctgcaccagccctgctcttgaataaaaaggaaaattactggctgcacccaaatcttctagtacttgagtaataagcatcaggcattggaagaggttttaaatttgcttttttgaggaaaagaactgggggtggattttggcatcgtagcatatcgattaaagaataatcaggacatcagatacattttaatacatagctggggccttatgttgtagatgaagcttgctgtttttagcaagttcctgggtttcacattcatttctgctgcatctagtagctccacacatttcataacctgatctctttatttgtatgcaaaaaatactgtcttaatacagagcagcatttttgtaacaaagagactcgctggagctatttggtgcttgaatgtgaccatcctttttacttttgctaagccttatttaaattttgtataccgtggaatatgtagaatttgtcaaatcattttagtgctgaaggtttttgatttcttgtttttgtttctgttgttgcagtttctttggtggcttgttttgtattgtaagatggcacttgctgatataaatactaaggcactaagagaaaatacagataagtatttataagttgcttgggaaccatagcagaattttttgtttggttttgtaagagaaaaaaaattaccaataaataactgatctagcacccaaactctcttgggggatgtcttagtatcttcacgctataaaattgttcatctaagcacagcatcatcttatggccttatggattgtaaatcttctagtgaggctataaactccactctgaaaacaaaggcataacttaaccgactgctcagttgtccttcgttgtaaaatgaattggctttgggaaaaaggaaaaaaacaaacaaaaaaagaaaaagaaaaaagcctcctccttgcccctaatttttttttcccatatggttttagccattccccatcactatattgtgaagctgtaaaaatatatatatatactttacaagagtttactaatggatttcaaaactggtctcaacgtttataatacatatctgtgtttggcagttgtcataacccaatcctacattcagccatcgggacaagtctgtcggggaggtagttcatggtttacaagcctttgctttttaactgtccaatttcctttaaagcacaactagctatttgtttacaaatgatatttttatgtatattttgtatagtgtatcatcatttttgccaaatatgtttttcattataaatgagtaaagagtacttaaggttgcattcatgtattacatgtttgttgttgtaaacctctccaatcagctggtagaaattctcctcattgtgttctatttggtcagtctctgtgtgattgtaggatgtgctccttggtagtactcccagctgtagatttaccagcttaaaagtttgttaggatctgtgcaataaagtgtttgcagtcttattttctctaagaaattccttatggacgtcataattgttgtatattgaacaaaatatttatacttatgcagttgcataacattgaaataaaaatttagcatgaaaaga

SEQ ID NO: 63173 - DNA, 10713 bp, Artificial Sequence
  derived and/or modified sequence
cgcagtacccgcggctcgggtgcagcgcgggagcacagtggagcgcagatcgcggacccgagcgggcatgtccccgcgcgcgggagcctccgtttgcggccgggcccgggcggctgtgaacttagcagcgggctcctgcggccccgtcactgccatgtagtcgctggcggggctccctgcagcccgggagcggcagtgccagtgagcctgagcccaggagcccgcgtcttccccgggaggcgctgagtgcgcgccgcgcccccgccgctcgggaggcactttgggccagacagggaaatgggggagaaagtttcggaggcgccagagccggtgccccgcggctgcagtggccacggcagccggactccagcctctgcgctggtcgccgcgtcctctccgggtgcttcctcggccgagtcctcctcgggctcagaaactctgtcggaggaaggggagcccggcggcttctccagagagcatcagccgccgccgccgccgccgttgggaggcaccctgggcgcccgggcgcccgccgcgtgggctccggcaagcgtgctgctggagcgcggagtccttgcgctgccgccgccgcttcccggaggagctgtgccgcccgcgccccggggcagcagcgcgtcccaggaggagcaggacgaggagcttgaccacatattatcccctccacccatgccgtttcggaaatgcagcaacccagatgtggcttctggccctggaaaatcactgaagtataaaagacagctgagtgaggatggaagacagctaaggcgagggagcctgggaggagccctgactgggaggtaccttcttccaaacccggtggcgggacaggcctggccggcctctgcagagacgtccaacctcgtgcgcatgcgcagccaggccctgggccagtcggcgccctcgctcaccgccagcctgaaggagctgagtctccccagaagaggaagtttttgccgaacaagcaaccggaaaagcttaataggcaatgggcagtcaccagcattgcctcgaccacactcacctctctctgctcatgcaggaaatagccctcaagatagtccaagaaatttctcccccagtgcctcagcccatttttcatttgcacggaggactgatggacgccgctggtcgttggcttctctcccttcctctggctatgggacaaacacacccagctctacggtctcttcatcctgttcctcccaggagaagttgcatcagttaccataccaaccaacaccagacgagttacacttcttatcaaaacatttctgtaccaccgaaagcatcgccactgagaacagatgcaggaacacgccgatgcgcccccgttcccgaagtctgagccctggacgttctcccgcctgctgtgaccatgaaataattatgatgaaccatgtctacaaagaaaggttcccaaaggctacagctcagatggaagaacgtctaaaggaaattatcaccagctactctcctgacaacgttctacccttagcagatggagtgcttagtttcactcaccaccagattattgaactggctcgagattgcttggataaatcccaccagggcctcatcacctcacgatacttccttgaattacagcacaaattagataagttgctacaggaggctcatgatcgttcagaaagtggagaattggcatttattaaacaactagttcgaaagatcctaattgttattgcccgccctgctcggttattagagtgcctggaatttgatccggaagaattttactacctattggaagcagcagaaggccatgccaaagaaggacagggtattaaaaccgacattcccaggtacatcattagccaactgggactcaataaggatcccttggaagaaatggctcatttgggaaactacgatagtgggacagcagaaacaccagaaacagatgaatcagtgagtagctctaatgcctccctgaaacttcgaaggaaacctcgggaaagtgattttgaaacgattaaattgattagcaatggagcctatggggcagtctactttgttcggcataaagaatcccggcagaggtttgccatgaagaagattaataaacagaacctcatccttcgaaaccagatccagcaggcctttgtggagcgggatatcctgacttttgcagaaaacccctttgttgtcagcatgtattgctcctttgaaacaaggcgccacttgtgcatggtcatggaatatgtggaagggggagactgtgctactttaatgaaaaacatgggtcctctccctgttgatatggccagaatgtactttgctgagacggtcttggccttggaatatttacataattatggaattgtacacagggatttgaaaccagacaacttgttggttacctccatggggcacataaagctgacagattttggattatctaaggtgggactaatgagcatgactaccaacctttacgagggtcatattgagaaggatgctagagagttcctggataaacaggtctgtggcacacctgaatacattgcaccagaagtgattctgaggcagggttatggaaagccggtggactggtgggccatggggattatcctctatgaatttctggttggatgcgtgccattctttggggatactccagaggagctatttggacaagtcatcagtgatgagatcaactggcctgagaaggatgaggcacccccacctgatgcccaggatctgattaccttactcctcaggcagaatcccctggagaggctgggaacaggtggtgcatatgaagtcaaacagcatcgattcttccgttctttagactggaacagtttgctgagacagaaggcagaatttattccccaactggaatctgaggatgacacaagttattttgatactcggtctgagaagtatcatcatatggaaacggaggaagaagatgacacaaatgatgaagactttaatgtggaaataaggcagttttcttcatgttcacacaggttttcaaaagttttcagcagtatagatcgaatcactcagaattcagcagaagagaaggaagactctgtggacaaaaccaaaagcaccaccttgccatccacagaaacactgagctggagttcagaatattctgaaatgcaacagctatcaacatccaactcttcagatactgaaagcaacagacataaactcagttctggcctacttcccaaactggctatttcaacagagggagagcaagatgaagctgcctcctgccctggagacccccatgaggagccaggaaagccagcccttcctcctgaagagtgtgcccaggaggagcctgaggtcaccaccccagccagcaccatcagcagctccaccctgtcagttggcagtttttcagagcacttggatcagataaatggacgaagcgagtgtgtggacagtacagataattcctcaaagccatccagtgaacccgcttctcacatggctcggcagcgattagaaagcacagaaaaaaagaaaatctcggggaaagtcacaaagtccctctctgccagtgctctttccctcatgatcccaggagatatgtttgctgtttcccctctgggaagtccaatgtctccccattccctgtcctcggacccttcttcttcacgagattcctctcccagccgagattcctcagcagcttctgccagtccacatcagccgattgtgatccacagttcggggaagaactacggctttaccatccgagccatccgggtgtatgtgggagacagtgacatctatacagtgcaccatatcgtctggaatgtagaagaaggaagtccggcatgccaggcaggactgaaggctggagatcttatcactcacatcaatggagaaccagtgcatggacttgtccacacagaagttatagaactcctactgaagagtgggaataaggtgtcaatcactactaccccatttgaaaacacatcaatcaaaactggaccagccaggagaaacagctataagagccggatggtgaggcggagcaagaaatccaagaagaaagaaagtctcgaaaggaggagatctcttttcaaaaagctagccaagcagccttctcctttactccacaccagccgaagtttctcctgcttgaacagatccctgtcatcgggtgagagcctcccaggttcccccactcatagcttgtctccccggtctccaacaccaagctaccgctccacccctgacttcccatctggtactaattcctcccagagcagctcccctagttctagtgcccccaattccccagcagggtccgggcacatccggcccagcactctccacggtcttgcacccaaactcggcgggcagcggtaccggtccggaaggcgaaagtccgccggcaacatcccactgtccccgctggcccggacgccctctccaaccccgcaacccacctccccgcagcggtcaccatcccctcttctgggacactcactgggcaattccaagatcgcgcaagcctttcccagcaagatgcactccccgcccaccatcgtcagacacatcgtgaggcccaagagtgcggagccccccaggtccccgctgctcaagcgcgtgcagtccgaggagaagctgtcgccctcttacggcagtgacaagaagcacctgtgctcccgcaagcacagcctggaggtgacccaagaggaggtgcagcgggagcagtcccagcgggaggcgccgctgcagagcctggatgagaacgtgtgcgacgtgccgccgctcagccgcgcccggccagtggagcaaggctgcctgaaacgcccagtctcccggaaggtgggccgccaggagtctgtggacgacctggaccgcgacaagctgaaggccaaggtggtggtgaagaaagcagacggcttcccagagaaacaggaatcccaccagaaatcccatggacccgggagtgatttggaaaactttgctctgtttaagctggaagagagagagaagaaagtctatccgaaggctgtggaaaggtcaagtacttttgaaaacaaagcgtctatgcaggaggcgccaccgctgggcagcctgctgaaggatgctcttcacaagcaggccagcgtgcgcgccagcgagggtgcgatgtcggatggccgggtgcctgcggagcaccgccagggtggcggggacttcagacgggcccccgctcctggcaccctccaggatggtctctgccactccctcgacaggggcatctctgggaagggggaaggcacggagaagtcctcccaggccaaggagcttctccgatgtgaaaagttagacagcaagctggccaacatcgattacctccgaaagaaaatgtcacttgaggacaaagaggacaacctctgccctgtgctgaagcccaagatgacagctggctcccacgaatgcctgccagggaacccagtccgacccacgggtgggcagcaggagcccccgccggcttctgagagccgagcttttgtcagcagcacccatgcagctcagatgagtgccgtctcttttgttcccctcaaggccttaacaggccgggtggacagtggaacggagaagcctggcttggttgctcctgagtcccctgttaggaagagcccctccgagtataagctggaaggtaggtctgtctcatgcctgaagccgatcgagggcactctggacattgctctcctgtccggacctcaggcctccaagacagaactgccttccccagagtctgcacagagccccagcccaagtggtgacgtgagggcctctgtgccaccagttctccccagcagcagtgggaaaaagaacgataccaccagtgcaagagagctttctccttccagcttaaagatgaataaatcctacctgctggagccttggttcctgccccccagccgaggtctccagaattcaccagcagtttccctgcctgacccagagttcaagagggacaggaaaggtccccatcctactgccaggagccctggaacagtcatggaaagcaatccccaacagagagagggcagctcccctaaacaccaagaccacaccactgaccccaagcttctgacctgcctggggcagaacctccacagccctgacctggccaggccacgctgcccgctcccacctgaagcttccccctcaagggagaagccaggcctgagggaatcgtctgaaagaggccctcccacagccagaagcgagcgctctgctgcgagggctgacacatgcagagagccctccatggaactgtgctttccagaaactgcgaaaaccagtgacaactccaaaaatctcctctctgtgggaaggacccacccagatttctatacacagacccaggccatggagaaagcatgggcgccgggtgggaaaacgaaccacaaagatggcccaggtgaggcgaggcccccgcccagagacaactcctctctgcactcagctggaattccctgtgagaaggagctgggcaaggtgaggcgtggcgtggaacccaagcccgaagcgcttcttgccaggcggtctctgcagccacctggaattgagagtgagaagagtgaaaagctctccagtttcccatctttgcagaaagatggtgccaaggaacctgaaaggaaggagcagcctctacaaaggcatcccagcagcatccctccgccccctctgacggccaaagacctgtccagcccggctgccaggcagcattgcagttccccaagccacgcttctggcagagagccgggggccaagcccagcactgcagagcccagctcgagcccccaggaccctcccaagcctgttgctgcgcacagtgaaagcagcagccacaagccccggcctggccctgacccgggccctccaaagactaagcaccccgaccggtccctctcctctcagaaaccaagtgtcggggccacaaagggcaaagagcctgccactcagtccctcggtggctctagcagagaggggaagggccacagtaagagtgggccggatgtgtttcctgctaccccaggctcccagaacaaagccagcgatgggattggccagggagaaggtgggccctctgtcccactgcacactgacagggctcctctagacgccaagccacaacccaccagtggtgggcggcccctggaggtgctggagaagcctgtgcatttgccaaggccgggacacccagggcctagtgagccagcggaccagaaactgtccgctgttggtgaaaagcaaaccctgtctccaaagcaccccaaaccatccactgtgaaagattgccccaccctgtgcaaacagacagacaacagacagacagacaaaagcccgagtcagccggccgccaacaccgacagaagggcggaagggaagaaatgcactgaagcactttatgctccagcagagggcgacaagctcgaggccggcctttcctttgtgcatagcgagaaccggttgaaaggcgcggagcggccagccgcgggggtggggaagggcttccctgaggccagagggaaagggcccggtccccagaagccaccgacggaggcagacaagcccaatggcatgaaacggtccccctcagccactgggcagagttctttccgatccacggccctcccggaaaagtctctgagctgctcctccagcttccctgaaaccagggccggagttagagaggcctctgcagccagcagcgacacctcttctgccaaggccgccgggggcatgctggagcttccagcccccagcaacagggaccataggaaggctcagcctgccggggagggccgaacccacatgacaaagagtgactccctgccctccttccgggtctccaccctgcctctggagtcacaccaccccgacccaaacaccatgggcggggccagccaccgggacagggctctctcggtgactgccaccgtaggggaaaccaaagggaaggaccctgccccagcccagcctcccccagctaggaaacagaacgtgggcagagacgtgaccaagccatccccagccccaaacactgaccgccccatctctctttctaatgagaaggactttgtggtacggcagaggcgggggaaagagagtttgcgtagcagccctcacaaaaaggccttgtaacggggagggcccaggggcaggactgtggagacccgtcctgaacgggcgactgtgtcttgactacctttcaaaaccagcactgtgtgggaatgtccgccaggcagagctcggagcctcattgagacaggggagagagaaagacaaagaggggaccttcttccagatgccttcccagttgtaaccggtaaaactgttaccagatagtgtttgtacaaaaaaaaaaaaaaaaaaaaaaaaaaaaattacctttacagttgagggttgttgaggaaaatgattttctttgtaaatatatagcatcgtgtttggtttgggatgtagagtctatacctggctgctgattgcgtcgtttactacagctttttttaaataagatttttgctttaccatttatcataatgtagtaatgaagcaaaatggtcaaaactgggtgtgtgtgaacagagatacacccatattcgtgtatatacacatccacctacatgttttggtctgtggtttaagagactatttcaaggttccatttttataagctaaaacattctaagttaagatggaagaaagccctaaacacagtagattctgagtttttatgtgtattttaaccagagtttctgatagtactgtatctggctacctatatttccagatctaaagcaagaactactctaagtactgcatttggaatcctcctccattaggaatggccaggacaagtggagctagccattttcattacacggccatcccaatggacactggatccctggtccaactgtctaaaaggccagttgttcctttctgtggatgtggatgtctggccttcacctgaggtagagcggggactataaacacacatcaactttctttctgtttgctttcttttccttcttttcaaactcttaaactcaggcctttatgctgtgagtgactagtccaagaagcacacattttgtagtagtcctgcaccagccctgctcttgaataaaaaggaaaattactggctgcacccaaatcttctagtacttgagtaataagcatcaggcattggaagaggttttaaatttgcttttttgaggaaaagaactgggggtggattttggcatcgtagcatatcgattaaagaataatcaggacatcagatacattttaatacatagctggggccttatgttgtagatgaagcttgctgtttttagcaagttcctgggtttcacattcatttctgctgcatctagtagctccacacatttcataacctgatctctttatttgtatgcaaaaaatactgtcttaatacagagcagcatttttgtaacaaagagactcgctggagctatttggtgcttgaatgtgaccatcctttttacttttgctaagccttatttaaattttgtataccgtggaatatgtagaatttgtcaaatcattttagtgctgaaggtttttgatttcttgtttttgtttctgttgttgcagtttctttggtggcttgttttgtattgtaagatggcacttgctgatataaatactaaggcactaagagaaaatacagataagtatttataagttgcttgggaaccatagcagaattttttgtttggttttgtaagagaaaaaaaattaccaataaataactgatctagcacccaaactctcttgggggatgtcttagtatcttcacgctataaaattgttcatctaagcacagcatcatcttatggccttatggattgtaaatcttctagtgaggctataaactccactctgaaaacaaaggcataacttaaccgactgctcagttgtccttcgttgtaaaatgaattggctttgggaaaaaggaaaaaaacaaacaaaaaaagaaaaagaaaaaagcctcctccttgcccctaatttttttttcccatatggttttagccattccccatcactatattgtgaagctgtaaaaatatatatatatactttacaagagtttactaatggatttcaaaactggtctcaacgtttataatacatatctgtgtttggcagttgtcataacccaatcctacattcagccatcgggacaagtctgtcggggaggtagttcatggtttacaagcctttgctttttaactgtccaatttcctttaaagcacaactagctatttgtttacaaatgatatttttatgtatattttgtatagtgtatcatcatttttgccaaatatgtttttcattataaatgagtaaagagtacttaaggttgcattcatgtattacatgtttgttgttgtaaacctctccaatcagctggtagaaattctcctcattgtgttctatttggtcagtctctgtgtgattgtaggatgtgctccttggtagtactcccagctgtagatttaccagcttaaaagtttgttaggatctgtgcaataaagtgtttgcagtcttattttctctaagaaattccttatggacgtcataattgttgtatattgaacaaaatatttatacttatgcagttgcataacattgaaataaaaatttagcatgaaaaga
